(19) United States
(12) Patent Application Publication
(10) Pub. No.: US 2025/0382617 A1
(43) Pub. Date: Dec. 18, 2025

(54) DOUBLE STRANDED OLIGONUCLEOTIDE COMPOSITIONS FOR RNA INTERFERENCE AND METHODS RELATING THERETO

(71) Applicant: WAVE LIFE SCIENCES LTD., Singapore (SG)

(72) Inventors: Chandra VARGEESE, Cambridge, MA (US); Naoki Iwamoto, Cambridge, MA (US); Wei Liu, Cambridge, MA (US); Khoa Ngoc Dang Luu, Cambridge, MA (US); Pachamuthu Kandasamy, Cambridge, MA (US); Subramanian Marappan, Cambridge, MA (US); Jayakanthan Kumarasamy, Cambridge, MA (US); Himali Kavin Shah, Cambridge, NH (US); Arindom Chatterjee, Cambridge, MA (US); Fengjiao Zhang, Cambridge, MA (US); Anthony Lamattina, Cambridge, MA (US); Fangjun Liu, Cambridge, MA (US); Jeonghoon Choi, Cambridge, MA (US); Nayantara Kothari, Cambridge, MA (US); Kuldeep Singh, Cambridge, MA (US)

(73) Assignee: WAVE LIFE SCIENCES LTD., Singapore (SG)

(21) Appl. No.: 19/314,882

(22) Filed: Aug. 29, 2025

Related U.S. Application Data
(63) Continuation of application No. PCT/US24/18169, filed on Mar. 1, 2024.
(60) Provisional application No. 63/487,823, filed on Mar. 1, 2023.
(60) Provisional application No. 63/491,720, filed on Mar. 22, 2023.
(60) Provisional application No. 63/581,614, filed on Sep. 8, 2023.
(60) Provisional application No. 63/585,133, filed on Sep. 25, 2023.

(51) Int. Cl. C12N 15/113

(52) U.S. Cl. CPC C12N 15/113; C12N 15/1137; C12Y 115/01001; C12N 2310/14; C12N 2310/351

(57) ABSTRACT

The present disclosure provides double stranded oligonucleotides, compositions, and methods relating thereto. The present disclosure encompasses the recognition that structural elements of double stranded oligonucleotides, such as base sequence, chemical modifications (e.g., modifications of sugar, base, and/or internucleotidic linkages) or patterns thereof, and/or stereochemistry (e.g., stereochemistry of backbone chiral centers (chiral internucleotidic linkages), and/or patterns thereof, can have significant impact on oligonucleotide properties and activities, e.g., RNA interference (RNAi) activity, Ago2 loading, thermal stability, in vivo stability, delivery to tissues and into cells, etc. The present disclosure also provides methods for treatment of diseases, e.g., hepatic diseases, central nervous system (CNS) diseases, etc., using provided double stranded oligonucleotide compositions, for example, in RNA interference.

### CROSS-REFERENCE TO RELATED APPLICATIONS

[0001] This application is a continuation of International Application No. PCT/US2024/018169, filed Mar. 1, 2024, which claims the benefit of U.S. Provisional Application No. 63/487,823, filed Mar. 1, 2023, U.S. Provisional Application No. 63/491,720, filed Mar. 22, 2023, U.S. Provisional Application No. 63/581,614, filed Sep. 8, 2023, and U.S. Provisional Application No. 63/585,133, filed Sep. 25, 2023, the contents of which are incorporated herein by reference in their entirety.

### SEQUENCE LISTING

[0002] The present application contains a Sequence Listing which has been submitted via EFS-Web and is hereby incorporated by reference in its entirety. Said Sequence Listing, created on Aug. 29, 2025, is named 0882900204.xml and is 15,786,610 bytes in size.

### BACKGROUND

[0003] Gene-targeting oligonucleotides are useful in various applications, e.g., therapeutic, diagnostic, research and nanomaterials applications. The use of naturally-occurring nucleic acids (e.g., unmodified DNA or RNA) in such applications can be limited by, for example, their susceptibility to endo- and exo-nucleases. As such, various synthetic counterparts have been developed to circumvent these shortcomings. These include synthetic oligonucleotides that contain chemical modifications, e.g., base modifications, sugar modifications, backbone modifications. There remains, however, a need in the art for double-stranded (ds) oligonucleotides with improved properties for use in connection with the above-described applications.

### SUMMARY

[0004] The present disclosure is directed, in part, to the recognition that controlling structural elements of the oligonucleotides of a double-stranded (ds) oligonucleotide can have a significant impact on the ds oligonucleotide's properties and/or activity. In certain embodiments, such structural elements include one or more of: (1) chemical modifications (e.g., modifications of a sugar, base and/or internucleotidic linkage) and patterns thereof; and (2) alterations in stereochemistry (e.g., stereochemistry of a backbone chiral internucleotidic linkage) and patterns thereof. One or more of such structural elements can, in certain embodiments, be independently present in one or both oligonucleotides of a ds oligonucleotide. In certain embodiments, the properties and/or activities impacted by such structural elements include, but are not limited to, participation in, direction of a decrease in expression, activity or level of a gene or a gene product thereof, mediated, for example, by RNA interference (RNAi interference), RNase H-mediated knockdown, steric hindrance of translation, etc. Moreover, in certain embodiments, the properties and/or activities impacted by such structural elements include, but are not limited to, participation in, Ago2 loading, thermal stability, in vivo stability, delivery to tissues and into cells, among others.

[0005] In certain embodiments, the present disclosure demonstrates that compositions comprising ds oligonucleotides (e.g., dsRNAi oligonucleotides, also referred to as dsRNAi agents) with controlled structural elements provide unexpected properties and/or activities.

[0006] In certain embodiments, the present disclosure encompasses the recognition that stereochemistry, e.g., stereochemistry of backbone chiral centers, can unexpectedly maintain or improve properties of ds oligonucleotides. For example, but not by way of limitation, the instant disclosure relates, in part, to ds oligonucleotides comprising a guide strand comprising backbone phosphoryl guanidine chiral centers in the Sp configuration.

[0007] In certain embodiments, the guide strand comprises a backbone phosphoryl guanidine chiral center in the Sp configuration between the +3 nucleotide and the immediately downstream (+4) nucleotide, i.e., in the 3′ direction. In certain embodiments, the ds oligonucleotides comprising a guide strand backbone phosphoryl guanidine chiral center in the Sp configuration between the +3 nucleotide and the immediately downstream (+4) nucleotide, i.e., in the 3′ direction, further comprise one or a plurality of modified sugars.

[0008] In certain embodiments, the ds oligonucleotides comprising a guide strand backbone phosphoryl guanidine chiral center in the Sp configuration between the +3 nucleotide and the immediately downstream (+4) nucleotide, i.e., in the 3′ direction, comprise a modified sugar at the 5′ terminal (+1) nucleotide, second (+2) nucleotide, third (+3) nucleotide, fourth (+4) nucleotide, fifth (+5) nucleotide, sixth (+6) nucleotide, seventh (+7) nucleotide, eighth (+8) nucleotide, ninth (+9) nucleotide, tenth (+10) nucleotide, twelfth (+12) nucleotide, sixteenth (+16) nucleotide, seventeenth (+17) nucleotide, eighteenth (+18) nucleotide, nineteenth (+19) nucleotide, twentieth (+20) nucleotide, twenty-first (+21) nucleotide, twenty-second (+22), and/or twenty-third (+23), the 3′ terminal, nucleotide.

[0009] In certain embodiments, the ds oligonucleotides comprising a guide strand backbone phosphoryl guanidine chiral center in the Sp configuration between the +3 nucleotide and the immediately downstream (+4) nucleotide, i.e., in the 3′ direction, comprise a modified sugar at the 5′ terminal (+1) nucleotide. In certain embodiments, the ds oligonucleotides comprising a guide strand backbone phosphoryl guanidine chiral center in the Sp configuration between the +3 nucleotide and the immediately downstream (+4) nucleotide, i.e., in the 3′ direction, comprise a modified at the second (+2) nucleotide. In certain embodiments, the ds oligonucleotides comprising a guide strand backbone phosphoryl guanidine chiral center in the Sp configuration between the +3 nucleotide and the immediately downstream (+4) nucleotide, i.e., in the 3′ direction, comprise a modified sugar at the third (+3) nucleotide. In certain embodiments, the ds oligonucleotides comprising a guide strand backbone phosphoryl guanidine chiral center in the Sp configuration between the +3 nucleotide and the immediately downstream (+4) nucleotide, i.e., in the 3′ direction, comprise a modified sugar at the fourth (+4) nucleotide. In certain embodiments, the ds oligonucleotides comprising a guide strand backbone phosphoryl guanidine chiral center in the Sp configuration between the +3 nucleotide and the immediately downstream (+4) nucleotide, i.e., in the 3′ direction, comprise a modified sugar at the fifth (+5) nucleotide. In certain embodiments, the ds oligonucleotides comprising a guide strand backbone phosphoryl guanidine chiral center in the Sp configuration between the +3 nucleotide and the immediately downstream (+4) nucleotide, i.e., in the 3′ direction, comprise a modified sugar of the sixth (+6) nucleotide. In certain embodiments, the ds oligonucleotides comprising a guide strand backbone phosphoryl guanidine chiral center in the Sp configuration between the +3 nucleotide and the immediately downstream (+4) nucleotide, i.e., in the 3′ direction, comprise a modified sugar of the seventh (+7) nucleotide. In certain embodiments, the ds oligonucleotides comprising a guide strand backbone phosphoryl guanidine chiral center in the Sp configuration between the +3 nucleotide and the immediately downstream (+4) nucleotide, i.e., in the 3′ direction, comprise a modified sugar of the eighth (+8) nucleotide. In certain embodiments, the ds oligonucleotides comprising a guide strand backbone phosphoryl guanidine chiral center in the Sp configuration between the +3 nucleotide and the immediately downstream (+4) nucleotide, i.e., in the 3′ direction, comprise a modified sugar of the ninth (+9) nucleotide. In certain embodiments, the ds oligonucleotides comprising a guide strand backbone phosphoryl guanidine chiral center in the Sp configuration between the +3 nucleotide and the immediately downstream (+4) nucleotide, i.e., in the 3′ direction, comprise a modified sugar of the tenth (+10) nucleotide. In certain embodiments, the ds oligonucleotides comprising a guide strand backbone phosphoryl guanidine chiral center in the Sp configuration between the +3 nucleotide and the immediately downstream (+4) nucleotide, i.e., in the 3′ direction, comprise a modified sugar of the twelfth (+12) nucleotide. In certain embodiments, the ds oligonucleotides comprising a guide strand backbone phosphoryl guanidine chiral center in the Sp configuration between the +3 nucleotide and the immediately downstream (+4) nucleotide, i.e., in the 3′ direction, comprise a modified sugar of the sixteenth (+16) nucleotide. In certain embodiments, the ds oligonucleotides comprising a guide strand backbone phosphoryl guanidine chiral center in the Sp configuration between the +3 nucleotide and the immediately downstream (+4) nucleotide, i.e., in the 3′ direction, comprise a modified sugar of the seventeenth (+17) nucleotide. In certain embodiments, the ds oligonucleotides comprising a guide strand backbone phosphoryl guanidine chiral center in the Sp configuration between the +3 nucleotide and the immediately downstream (+4) nucleotide, i.e., in the 3′ direction, comprise a modified sugar of the eighteenth (+18) nucleotide. In certain embodiments, the ds oligonucleotides comprising a guide strand backbone phosphoryl guanidine chiral center in the Sp configuration between the +3 nucleotide and the immediately downstream (+4) nucleotide, i.e., in the 3′ direction, comprise a modified sugar of the nineteenth (+19) nucleotide. In certain embodiments, the ds oligonucleotides comprising a guide strand backbone phosphoryl guanidine chiral center in the Sp configuration between the +3 nucleotide and the immediately downstream (+4) nucleotide, i.e., in the 3′ direction, comprise a modified sugar of the twentieth (+20) nucleotide. In certain embodiments, the ds oligonucleotides comprising a guide strand backbone phosphoryl guanidine chiral center in the Sp configuration between the +3 nucleotide and the immediately downstream (+4) nucleotide, i.e., in the 3′ direction, comprise a modified sugar of the twenty-first (+21) nucleotide. In certain embodiments, the ds oligonucleotides comprising a guide strand backbone phosphoryl guanidine chiral center in the Sp configuration between the +3 nucleotide and the immediately downstream (+4) nucleotide, i.e., in the 3′ direction, comprise a modified sugar of the twenty-second (+22) nucleotide. In certain embodiments, the ds oligonucleotides comprising a guide strand backbone phosphoryl guanidine chiral center in the Sp configuration between the +3 nucleotide and the immediately downstream (+4) nucleotide, i.e., in the 3′ direction, comprise a modified sugar of the twenty-third (+23), the 3′ terminal, nucleotide.

[0010] In certain embodiments, the modified sugar comprises a 2′-F modification, 2′-H modification, 2′-OH modification, 2′-O-alkyl modification, e.g., 2′-O-methyl (OMe) modification, 2′-methoxyethyl (MOE) modification, 5′-alkyl modification, e.g., 5′-(R)-methyl or 5′-(S)-methyl, DNA, locked nucleic acid (LNA), unlocked nucleic acid (UNA), glycol nucleic acid (GNA), or Homo-DNA.

[0011] In certain embodiments, the ds oligonucleotides comprising a guide strand backbone phosphoryl guanidine chiral center in the Sp configuration between the +3 nucleotide and the immediately downstream (+4) nucleotide, i.e., in the 3′ direction, comprise a 2′-F modification of the 5′ terminal (+1) nucleotide, second (+2) nucleotide, third (+3) nucleotide, fourth (+4) nucleotide, fifth (+5) nucleotide, sixth (+6) nucleotide, seventh (+7) nucleotide, eighth (+8) nucleotide, ninth (+9) nucleotide, tenth (+10) nucleotide, twelfth (+12) nucleotide, sixteenth (+16) nucleotide, seventeenth (+17) nucleotide, eighteenth (+18) nucleotide, nineteenth (+19) nucleotide, twentieth (+20) nucleotide, twenty-first (+21) nucleotide, twenty-second (+22), and/or twenty-third (+23), the 3′ terminal, nucleotide. In certain embodiments, the ds oligonucleotides comprising a guide strand backbone phosphoryl guanidine chiral center in the Sp configuration between the +3 nucleotide and the immediately downstream (+4) nucleotide, i.e., in the 3′ direction, comprise a 2′-F modification of the 5′ terminal (+1) nucleotide. In certain embodiments, the ds oligonucleotides comprising a guide strand backbone phosphoryl guanidine chiral center in the Sp configuration between the +3 nucleotide and the immediately downstream (+4) nucleotide, i.e., in the 3′ direction, comprise a 2′-F modification of the second (+2) nucleotide. In certain embodiments, the ds oligonucleotides comprising a guide strand backbone phosphoryl guanidine chiral center in the Sp configuration between the +3 nucleotide and the immediately downstream (+4) nucleotide, i.e., in the 3′ direction, comprise a 2′-F modification of the third (+3) nucleotide. In certain embodiments, the ds oligonucleotides comprising a guide strand backbone phosphoryl guanidine chiral center in the Sp configuration between the +3 nucleotide and the immediately downstream (+4) nucleotide, i.e., in the 3′ direction, comprise a 2′-F modification of the fourth (+4) nucleotide. In certain embodiments, the ds oligonucleotides comprising a guide strand backbone phosphoryl guanidine chiral center in the Sp configuration between the +3 nucleotide and the immediately downstream (+4) nucleotide, i.e., in the 3′ direction, comprise a 2′-F modification of the fifth (+5) nucleotide. In certain embodiments, the ds oligonucleotides comprising a guide strand backbone phosphoryl guanidine chiral center in the Sp configuration between the +3 nucleotide and the immediately downstream (+4) nucleotide, i.e., in the 3′ direction, comprise a 2′-F modification of the sixth (+6) nucleotide.

[0012] In certain embodiments, the ds oligonucleotides comprising a guide strand backbone phosphoryl guanidine chiral center in the Sp configuration between the +3 nucleotide and the immediately downstream (+4) nucleotide, i.e., in the 3′ direction, comprise a Homo-DNA modification of the 5′ terminal (+1) nucleotide, sixth (+6) nucleotide, ninth (+9) nucleotide, tenth (+10) nucleotide, twelfth (+12) nucleotide, sixteenth (+16) nucleotide, seventeenth (+17) nucleotide, eighteenth (+18) nucleotide, nineteenth (+19) nucleotide, twentieth (+20) nucleotide, twenty-first (+21) nucleotide, twenty-second (+22), and/or twenty-third (+23), the 3′ terminal, nucleotide. In certain embodiments, the ds oligonucleotides comprising a guide strand backbone phosphoryl guanidine chiral center in the Sp configuration between the +3 nucleotide and the immediately downstream (+4) nucleotide, i.e., in the 3′ direction, comprise a Homo-DNA modification of the 5′ terminal (+1) nucleotide. In certain embodiments, the ds oligonucleotides comprising a guide strand backbone phosphoryl guanidine chiral center in the Sp configuration between the +3 nucleotide and the immediately downstream (+4) nucleotide, i.e., in the 3′ direction, comprise a Homo-DNA modification of the sixth (+6) nucleotide. In certain embodiments, the ds oligonucleotides comprising a guide strand backbone phosphoryl guanidine chiral center in the Sp configuration between the +3 nucleotide and the immediately downstream (+4) nucleotide, i.e., in the 3′ direction, comprise a Homo-DNA modification of the ninth (+9) nucleotide. In certain embodiments, the ds oligonucleotides comprising a guide strand backbone phosphoryl guanidine chiral center in the Sp configuration between the +3 nucleotide and the immediately downstream (+4) nucleotide, i.e., in the 3′ direction, comprise a Homo-DNA modification of the tenth (+10) nucleotide. In certain embodiments, the ds oligonucleotides comprising a guide strand backbone phosphoryl guanidine chiral center in the Sp configuration between the +3 nucleotide and the immediately downstream (+4) nucleotide, i.e., in the 3′ direction, comprise a Homo-DNA modification of the twelfth (+12) nucleotide. In certain embodiments, the ds oligonucleotides comprising a guide strand backbone phosphoryl guanidine chiral center in the Sp configuration between the +3 nucleotide and the immediately downstream (+4) nucleotide, i.e., in the 3′ direction, comprise a Homo-DNA modification of the sixteenth (+16) nucleotide. In certain embodiments, the ds oligonucleotides comprising a guide strand backbone phosphoryl guanidine chiral center in the Sp configuration between the +3 nucleotide and the immediately downstream (+4) nucleotide, i.e., in the 3′ direction, comprise a Homo-DNA modification of the seventeenth (+17) nucleotide. In certain embodiments, the ds oligonucleotides comprising a guide strand backbone phosphoryl guanidine chiral center in the Sp configuration between the +3 nucleotide and the immediately downstream (+4) nucleotide, i.e., in the 3′ direction, comprise a Homo-DNA modification of the eighteenth (+18) nucleotide. In certain embodiments, the ds oligonucleotides comprising a guide strand backbone phosphoryl guanidine chiral center in the Sp configuration between the +3 nucleotide and the immediately downstream (+4) nucleotide, i.e., in the 3′ direction, comprise a Homo-DNA modification of the nineteenth (+19) nucleotide. In certain embodiments, the ds oligonucleotides comprising a guide strand backbone phosphoryl guanidine chiral center in the Sp configuration between the +3 nucleotide and the immediately downstream (+4) nucleotide, i.e., in the 3′ direction, comprise a Homo-DNA modification of the twentieth (+20) nucleotide. In certain embodiments, the ds oligonucleotides comprising a guide strand backbone phosphoryl guanidine chiral center in the Sp configuration between the +3 nucleotide and the immediately downstream (+4) nucleotide, i.e., in the 3′ direction, comprise a Homo-DNA modification of the twenty-first (+21) nucleotide. In certain embodiments, the ds oligonucleotides comprising a guide strand backbone phosphoryl guanidine chiral center in the Sp configuration between the +3 nucleotide and the immediately downstream (+4) nucleotide, i.e., in the 3′ direction, comprise a Homo-DNA modification of the twenty-second (+22) nucleotide. In certain embodiments, the ds oligonucleotides comprising a guide strand backbone phosphoryl guanidine chiral center in the Sp configuration between the +3 nucleotide and the immediately downstream (+4) nucleotide, i.e., in the 3′ direction, comprise a Homo-DNA modification of the twenty-third (+23), the 3′ terminal, nucleotide.

[0013] In certain embodiments, the present disclosure provides a ds oligonucleotide, useful for any purpose, which operates through any mechanism, and which comprises comprising a guide strand backbone phosphoryl guanidine chiral center in the Sp configuration between the +3 nucleotide and the immediately downstream (+4) nucleotide, i.e., in the 3′ direction, which further comprises:
[0014] (1) a guide strand comprising backbone phosphorothioate chiral centers in Sp configuration between the 3′ terminal nucleotide and the penultimate (N-1) nucleotide and as between the penultimate (N-1) nucleotide and the immediately upstream, i.e., in the 5′ direction, (N-2) nucleotide;
[0015] (2) a guide strand comprising backbone phosphorothioate chiral centers in Rp, Sp, or alternating configurations between the 5′ terminal (+1) nucleotide and the immediately downstream, i.e., in the 3′ direction, (+2) nucleotide and between the +2 nucleotide and the immediately downstream (+3) nucleotide;
[0016] (3) a guide strand comprising one or more backbone phosphorothioate chiral centers upstream, i.e., in the 5′ direction, relative to backbone phosphorothioate chiral centers in Sp configuration between the 3′ terminal nucleotide and the penultimate (N-1) nucleotide and as between the penultimate (N-1) nucleotide and the immediately upstream (N-2) nucleotide, where the upstream backbone phosphorothioate chiral centers are in Rp or Sp configuration;
[0017] (4) a guide strand comprising one or more backbone phosphorothioate chiral centers in Rp or Sp configuration between the 5′ terminal (+1) nucleotide and the immediately downstream (+2) nucleotide; and between the +2 nucleotide and the immediately downstream (+3) nucleotide;
[0018] (5) a guide strand comprising one or more backbone phosphorothioate chiral centers in Rp or Sp configuration where linkage occurs between any two adjacent nucleotides between the penultimate 3′ nucleotide of the guide strand, where N is the 3′ terminal nucleotide, and the upstream N-10 nucleotide;
[0019] (6) a guide strand comprising one or more backbone phosphoryl guanidine chiral centers in the Sp configuration between the +7 and the immediately downstream (+8), i.e., in the 3′ direction.
[0020] (7) a guide strand comprising a 5′ terminal modification;
[0021] (8) a passenger strand in combination with one or more of the aforementioned guide strands, comprising one or more backbone chiral centers in Rp or Sp configuration; (9) a passenger strand in combination with one or more of the aforementioned guide strands, comprising one or more backbone phosphoryl guanidine chiral centers in the Rp configuration between the +7 nucleotide and the immediately downstream (+8) nucleotide, i.e., in the 3′ direction;
[0022] (10) a passenger strand in combination with one or more of the aforementioned guide strands, comprising one or more backbone phosphoryl guanidine chiral centers in the Rp configuration between the +15 nucleotide and the immediately downstream (+16) nucleotide, i.e., in the 3′ direction; and
[0023] (11) a passenger strand in combination with one or more of the aforementioned guide strands, comprising backbone phosphorothioate chiral centers in the Sp configuration between the 5′ terminal (+1) nucleotide and the immediately downstream, i.e., in the 3′ direction, (+2) nucleotide and between the 3′ terminal nucleotide and the penultimate (N-1) nucleotide;
   wherein the ds oligonucleotide further comprises one or more of.
[0024] (1) a guide strand where one or both of the 5′ and 3′ terminal dinucleotides are not linked by non-negatively charged internucleotidic linkages, i.e., the guide strand comprises one more Rp, Sp, or stereorandom non-negatively charged internucleotidic linkages downstream, i.e., in the 3′ direction, relative to the linkage between the 5′ terminal dinucleotide and/or upstream, i.e., in the 5′ direction, relative to the linkage between the 3′ terminal dinucleotide;
[0025] (2) a guide strand where one or more Rp, Sp, or stereorandom non-negatively charged internucleotidic linkage occurs between any two adjacent nucleotides between the second (+2) nucleotide relative to the 5′ terminal nucleotide of the guide strand and the penultimate 3′ (N-1) nucleotide of the guide strand, where N is the 3′ terminal nucleotide;
[0026] (3) a guide strand where an Rp, Sp, or stereorandom non-negatively charged internucleotidic linkage occurs between the tenth (+10) and eleventh (+11) nucleotides, relative to the 5′ terminal nucleotide;
[0027] (4) a guide strand where an Rp, Sp, or stereorandom non-negatively charged internucleotidic linkage occurs between the seventh (+7) and eighth (+8) nucleotides, relative to the 5′ terminal nucleotide;
[0028] (5) a guide strand comprising one or more backbone phosphorothioate chiral centers in Rp or Sp configuration where linkage occurs between any two adjacent nucleotides between the penultimate 3′ nucleotide of the guide strand, where N is the 3′ terminal nucleotide, and the upstream N-10 nucleotide;
[0029] (6) a passenger strand where one or more Rp, Sp, or stereorandom non-negatively charged internucleotidic linkage occurs upstream, i.e., in the 5′ direction, relative to the central nucleotide of the passenger strand;
[0030] (7) a passenger strand where one or more Rp, Sp, or stereorandom non-negatively charged internucleotidic linkage occurs downstream, i.e., in the 3′ direction, relative to the central nucleotide of the passenger strand;
[0031] (8) a passenger strand where one or more backbone phosphorothioate chiral centers in Rp or Sp configuration internucleotidic linkage occurs upstream, i.e., in the 5′ direction, relative to the central nucleotide of the passenger strand;
[0032] (9) a passenger strand where one or more backbone phosphorothioate chiral centers in Rp or Sp configuration internucleotidic linkage internucleotidic linkage occurs downstream, i.e., in the 3′ direction, relative to the central nucleotide of the passenger strand; and
[0033] (10) a passenger strand comprising one or more modified sugars, e.g. Homo-DNA, between the 5′ terminal (+1) nucleotide and the penultimate (N-1) nucleotide.

[0034] In certain embodiments, the ds oligonucleotides comprising a guide strand backbone phosphoryl guanidine chiral center in the Sp configuration between the +3 nucleotide and the immediately downstream (+4) nucleotide, i.e., in the 3′ direction, comprise a LNA modification of the 5′ terminal (+1) nucleotide, second (+2) nucleotide, third (+3) nucleotide, fourth (+4) nucleotide, fifth (+5) nucleotide, sixth (+6) nucleotide, seventh (+7) nucleotide, and/or eighth (+8) nucleotide. In certain embodiments, the ds oligonucleotides comprising a guide strand backbone phosphoryl guanidine chiral center in the Sp configuration between the +3 nucleotide and the immediately downstream (+4) nucleotide, i.e., in the 3′ direction, comprise a LNA modification of the 5′ terminal (+1) nucleotide. In certain embodiments, the ds oligonucleotides comprising a guide strand backbone phosphoryl guanidine chiral center in the Sp configuration between the +3 nucleotide and the immediately downstream (+4) nucleotide, i.e., in the 3′ direction, comprise a LNA modification of the second (+2) nucleotide. In certain embodiments, the ds oligonucleotides comprising a guide strand backbone phosphoryl guanidine chiral center in the Sp configuration between the +3 nucleotide and the immediately downstream (+4) nucleotide, i.e., in the 3′ direction, comprise a LNA modification of the third (+3) nucleotide. In certain embodiments, the ds oligonucleotides comprising a guide strand backbone phosphoryl guanidine chiral center in the Sp configuration between the +3 nucleotide and the immediately downstream (+4) nucleotide, i.e., in the 3′ direction, comprise a LNA modification of the fourth (+4) nucleotide. In certain embodiments, the ds oligonucleotides comprising a guide strand backbone phosphoryl guanidine chiral center in the Sp configuration between the +3 nucleotide and the immediately downstream (+4) nucleotide, i.e., in the 3′ direction, comprise a LNA modification of the fifth (+5) nucleotide. In certain embodiments, the ds oligonucleotides comprising a guide strand backbone phosphoryl guanidine chiral center in the Sp configuration between the +3 nucleotide and the immediately downstream (+4) nucleotide, i.e., in the 3′ direction, comprise a LNA modification of the sixth (+6) nucleotide. In certain embodiments, the ds oligonucleotides comprising a guide strand backbone phosphoryl guanidine chiral center in the Sp configuration between the +3 nucleotide and the immediately downstream (+4) nucleotide, i.e., in the 3′ direction, comprise a LNA modification of the seventh (+7) nucleotide. In certain embodiments, the ds oligonucleotides comprising a guide strand backbone phosphoryl guanidine chiral center in the Sp configuration between the +3 nucleotide and the immediately downstream (+4) nucleotide, i.e., in the 3′ direction, comprise a LNA modification of the eighth (+8) nucleotide. In certain embodiments, the present disclosure provides a ds oligonucleotide, useful for any purpose, which operates through any mechanism, and which comprises comprising a guide strand backbone phosphoryl guanidine chiral center in the Sp configuration between the +3 nucleotide and the immediately downstream (+4) nucleotide, i.e., in the 3′ direction, which further comprises:
[0035] (1) a guide strand comprising backbone phosphorothioate chiral centers in Sp configuration between the 3′ terminal nucleotide and the penultimate (N-1) nucleotide and as between the penultimate (N-1) nucleotide and the immediately upstream, i.e., in the 5′ direction, (N-2) nucleotide;
[0036] (2) a guide strand comprising backbone phosphorothioate chiral centers in Rp, Sp, or alternating configurations between the 5′ terminal (+1) nucleotide and the immediately downstream, i.e., in the 3′ direction, (+2) nucleotide and between the +2 nucleotide and the immediately downstream (+3) nucleotide;
[0037] (3) a guide strand comprising one or more backbone phosphorothioate chiral centers upstream, i.e., in the 5′ direction, relative to backbone phosphorothioate chiral centers in Sp configuration between the 3′ terminal nucleotide and the penultimate (N-1) nucleotide and as between the penultimate (N-1) nucleotide and the immediately upstream (N-2) nucleotide, where the upstream backbone phosphorothioate chiral centers are in Rp or Sp configuration;
[0038] (4) a guide strand comprising one or more backbone phosphorothioate chiral centers in Rp or Sp configuration between the 5′ terminal (+1) nucleotide and the immediately downstream (+2) nucleotide; and between the +2 nucleotide and the immediately downstream (+3) nucleotide;
[0039] (5) a guide strand comprising one or more backbone phosphorothioate chiral centers in Rp or Sp configuration where linkage occurs between any two adjacent nucleotides between the penultimate 3′ nucleotide of the guide strand, where N is the 3′ terminal nucleotide, and the upstream N-10 nucleotide;
[0040] (6) a guide strand comprising one or more backbone phosphoryl guanidine chiral centers in the Sp configuration between the +7 and the immediately downstream (+8), i.e., in the 3′ direction.
[0041] (7) a guide strand comprising a 5′ terminal modification;
[0042] (8) a passenger strand in combination with one or more of the aforementioned guide strands, comprising one or more backbone chiral centers in Rp or Sp configuration;
[0043] (9) a passenger strand in combination with one or more of the aforementioned guide strands, comprising one or more backbone phosphoryl guanidine chiral centers in the Rp configuration between the +7 nucleotide and the immediately downstream (+8) nucleotide, i.e., in the 3′ direction;
[0044] (10) a passenger strand in combination with one or more of the aforementioned guide strands, comprising one or more backbone phosphoryl guanidine chiral centers in the Rp configuration between the +15 nucleotide and the immediately downstream (+16) nucleotide, i.e., in the 3′ direction; and
[0045] (11) a passenger strand in combination with one or more of the aforementioned guide strands, comprising backbone phosphorothioate chiral centers in the Sp configuration between the 5′ terminal (+1) nucleotide and the immediately downstream, i.e., in the 3′ direction, (+2) nucleotide and between the 3′ terminal nucleotide and the penultimate (N-1) nucleotide;
   wherein the ds oligonucleotide further comprises one or more of.
[0046] (1) a guide strand where one or both of the 5′ and 3′ terminal dinucleotides are not linked by non-negatively charged internucleotidic linkages, i.e., the guide strand comprises one more Rp, Sp, or stereorandom non-negatively charged internucleotidic linkages downstream, i.e., in the 3′ direction, relative to the linkage between the 5′ terminal dinucleotide and/or upstream, i.e., in the 5′ direction, relative to the linkage between the 3′ terminal dinucleotide;
[0047] (2) a guide strand where one or more Rp, Sp, or stereorandom non-negatively charged internucleotidic linkage occurs between any two adjacent nucleotides between the second (+2) nucleotide relative to the 5′ terminal nucleotide of the guide strand and the penultimate 3′ (N-1) nucleotide of the guide strand, where N is the 3′ terminal nucleotide;
[0048] (3) a guide strand where an Rp, Sp, or stereorandom non-negatively charged internucleotidic linkage occurs between the tenth (+10) and eleventh (+11) nucleotides, relative to the 5′ terminal nucleotide;
[0049] (4) a guide strand where an Rp, Sp, or stereorandom non-negatively charged internucleotidic linkage occurs between the seventh (+7) and eighth (+8) nucleotides, relative to the 5′ terminal nucleotide;
[0050] (5) a guide strand comprising one or more backbone phosphorothioate chiral centers in Rp or Sp configuration where linkage occurs between any two adjacent nucleotides between the penultimate 3′ nucleotide of the guide strand, where N is the 3′ terminal nucleotide, and the upstream N-10 nucleotide;
[0051] (6) a passenger strand where one or more Rp, Sp, or stereorandom non-negatively charged internucleotidic linkage occurs upstream, i.e., in the 5′ direction, relative to the central nucleotide of the passenger strand;
[0052] (7) a passenger strand where one or more Rp, Sp, or stereorandom non-negatively charged internucleotidic linkage occurs downstream, i.e., in the 3′ direction, relative to the central nucleotide of the passenger strand;
[0053] (8) a passenger strand where one or more backbone phosphorothioate chiral centers in Rp or Sp configuration internucleotidic linkage occurs upstream, i.e., in the 5′ direction, relative to the central nucleotide of the passenger strand;
[0054] (9) a passenger strand where one or more backbone phosphorothioate chiral centers in Rp or Sp configuration internucleotidic linkage internucleotidic linkage occurs downstream, i.e., in the 3′ direction, relative to the central nucleotide of the passenger strand; and
[0055] (10) a passenger strand comprising one or more modified sugars, e.g. Homo-DNA, between the 5′ terminal (+1) nucleotide and the penultimate (N-1) nucleotide.

[0056] In certain embodiments, the ds oligonucleotides comprising a guide strand backbone phosphoryl guanidine chiral center in the Sp configuration between the +3 nucleotide and the immediately downstream (+4) nucleotide, i.e., in the 3′ direction, comprise a 2′-O-alkyl modification of the 5′ terminal (+1) nucleotide, second (+2) nucleotide, third (+3) nucleotide, fourth (+4) nucleotide, fifth (+5) nucleotide, sixth (+6) nucleotide, seventh (+7) nucleotide, and/or eighth (+8) nucleotide. In certain embodiments, the ds oligonucleotides comprising a guide strand backbone phosphoryl guanidine chiral center in the Sp configuration between the +3 nucleotide and the immediately downstream (+4) nucleotide, i.e., in the 3′ direction, comprise a 2′-O-alkyl modification of the 5′ terminal (+1) nucleotide. In certain embodiments, the ds oligonucleotides comprising a guide strand backbone phosphoryl guanidine chiral center in the Sp configuration between the +3 nucleotide and the immediately downstream (+4) nucleotide, i.e., in the 3′ direction, comprise a 2′-O-alkyl modification of the second (+2) nucleotide. In certain embodiments, the ds oligonucleotides comprising a guide strand backbone phosphoryl guanidine chiral center in the Sp configuration between the +3 nucleotide and the immediately downstream (+4) nucleotide, i.e., in the 3′ direction, comprise a 2′-O-alkyl modification of the third (+3) nucleotide. In certain embodiments, the ds oligonucleotides comprising a guide strand backbone phosphoryl guanidine chiral center in the Sp configuration between the +3 nucleotide and the immediately downstream (+4) nucleotide, i.e., in the 3′ direction, comprise a 2′-O-alkyl modification of the fourth (+4) nucleotide. In certain embodiments, the ds oligonucleotides comprising a guide strand backbone phosphoryl guanidine chiral center in the Sp configuration between the +3 nucleotide and the immediately downstream (+4) nucleotide, i.e., in the 3′ direction, comprise a 2′-O-alkyl modification of the fifth (+5) nucleotide. In certain embodiments, the ds oligonucleotides comprising a guide strand backbone phosphoryl guanidine chiral center in the Sp configuration between the +3 nucleotide and the immediately downstream (+4) nucleotide, i.e., in the 3′ direction, comprise a 2′-O-alkyl modification of the sixth (+6) nucleotide. In certain embodiments, the ds oligonucleotides comprising a guide strand backbone phosphoryl guanidine chiral center in the Sp configuration between the +3 nucleotide and the immediately downstream (+4) nucleotide, i.e., in the 3′ direction, comprise a 2′-O-alkyl modification of the seventh (+7) nucleotide. In certain embodiments, the ds oligonucleotides comprising a guide strand backbone phosphoryl guanidine chiral center in the Sp configuration between the +3 nucleotide and the immediately downstream (+4) nucleotide, i.e., in the 3′ direction, comprise a 2′-O-alkyl modification of the eighth (+8) nucleotide.

[0057] In certain embodiments, the present disclosure provides a ds oligonucleotide, useful for any purpose, which operates through any mechanism, and which comprises comprising a guide strand backbone phosphoryl guanidine chiral center in the Sp configuration between the +3 nucleotide and the immediately downstream (+4) nucleotide, i.e., in the 3′ direction, which further comprises:
[0058] (1) a guide strand comprising backbone phosphorothioate chiral centers in Sp configuration between the 3′ terminal nucleotide and the penultimate (N-1) nucleotide and as between the penultimate (N-1) nucleotide and the immediately upstream, i.e., in the 5′ direction, (N-2) nucleotide;
[0059] (2) a guide strand comprising backbone phosphorothioate chiral centers in Rp, Sp, or alternating configurations between the 5′ terminal (+1) nucleotide and the immediately downstream, i.e., in the 3′ direction, (+2) nucleotide and between the +2 nucleotide and the immediately downstream (+3) nucleotide;
[0060] (3) a guide strand comprising one or more backbone phosphorothioate chiral centers upstream, i.e., in the 5′ direction, relative to backbone phosphorothioate chiral centers in Sp configuration between the 3′ terminal nucleotide and the penultimate (N-1) nucleotide and as between the penultimate (N-1) nucleotide and the immediately upstream (N-2) nucleotide, where the upstream backbone phosphorothioate chiral centers are in Rp or Sp configuration;
[0061] (4) a guide strand comprising one or more backbone phosphorothioate chiral centers in Rp or Sp configuration between the 5′ terminal (+1) nucleotide and the immediately downstream (+2) nucleotide; and between the +2 nucleotide and the immediately downstream (+3) nucleotide;
[0062] (5) a guide strand comprising one or more backbone phosphorothioate chiral centers in Rp or Sp configuration where linkage occurs between any two adjacent nucleotides between the penultimate 3′ nucleotide of the guide strand, where N is the 3′ terminal nucleotide, and the upstream N-10 nucleotide;
[0063] (6) a guide strand comprising one or more backbone phosphoryl guanidine chiral centers in the Sp configuration between the +7 and the immediately downstream (+8), i.e., in the 3′ direction.
[0064] (7) a guide strand comprising a 5′ terminal modification;
[0065] (8) a passenger strand in combination with one or more of the aforementioned guide strands, comprising one or more backbone chiral centers in Rp or Sp configuration;
[0066] (9) a passenger strand in combination with one or more of the aforementioned guide strands, comprising one or more backbone phosphoryl guanidine chiral centers in the Rp configuration between the +7 nucleotide and the immediately downstream (+8) nucleotide, i.e., in the 3′ direction;
[0067] (10) a passenger strand in combination with one or more of the aforementioned guide strands, comprising one or more backbone phosphoryl guanidine chiral centers in the Rp configuration between the +15 nucleotide and the immediately downstream (+16) nucleotide, i.e., in the 3′ direction; and
[0068] (11) a passenger strand in combination with one or more of the aforementioned guide strands, comprising backbone phosphorothioate chiral centers in the Sp configuration between the 5′ terminal (+1) nucleotide and the immediately downstream, i.e., in the 3′ direction, (+2) nucleotide and between the 3′ terminal nucleotide and the penultimate (N-1) nucleotide;
   wherein the ds oligonucleotide further comprises one or more of.
[0069] (1) a guide strand where one or both of the 5′ and 3′ terminal dinucleotides are not linked by non-negatively charged internucleotidic linkages, i.e., the guide strand comprises one more Rp, Sp, or stereorandom non-negatively charged internucleotidic linkages downstream, i.e., in the 3′ direction, relative to the linkage between the 5′ terminal dinucleotide and/or upstream, i.e., in the 5′ direction, relative to the linkage between the 3′ terminal dinucleotide;
[0070] (2) a guide strand where one or more Rp, Sp, or stereorandom non-negatively charged internucleotidic linkage occurs between any two adjacent nucleotides between the second (+2) nucleotide relative to the 5′ terminal nucleotide of the guide strand and the penultimate 3′ (N-1) nucleotide of the guide strand, where N is the 3′ terminal nucleotide;
[0071] (3) a guide strand where an Rp, Sp, or stereorandom non-negatively charged internucleotidic linkage occurs between the tenth (+10) and eleventh (+11) nucleotides, relative to the 5′ terminal nucleotide;
[0072] (4) a guide strand where an Rp, Sp, or stereorandom non-negatively charged internucleotidic linkage occurs between the seventh (+7) and eighth (+8) nucleotides, relative to the 5′ terminal nucleotide;
[0073] (5) a guide strand comprising one or more backbone phosphorothioate chiral centers in Rp or Sp configuration where linkage occurs between any two adjacent nucleotides between the penultimate 3′ nucleotide of the guide strand, where N is the 3′ terminal nucleotide, and the upstream N-10 nucleotide;
[0074] (6) a passenger strand where one or more Rp, Sp, or stereorandom non-negatively charged internucleotidic linkage occurs upstream, i.e., in the 5′ direction, relative to the central nucleotide of the passenger strand;
[0075] (7) a passenger strand where one or more Rp, Sp, or stereorandom non-negatively charged internucleotidic linkage occurs downstream, i.e., in the 3′ direction, relative to the central nucleotide of the passenger strand;
[0076] (8) a passenger strand where one or more backbone phosphorothioate chiral centers in Rp or Sp configuration internucleotidic linkage occurs upstream, i.e., in the 5′ direction, relative to the central nucleotide of the passenger strand;
[0077] (9) a passenger strand where one or more backbone phosphorothioate chiral centers in Rp or Sp configuration internucleotidic linkage internucleotidic linkage occurs downstream, i.e., in the 3′ direction, relative to the central nucleotide of the passenger strand; and
[0078] (10) a passenger strand comprising one or more modified sugars, e.g. Homo-DNA, between the 5′ terminal (+1) nucleotide and the penultimate (N-1) nucleotide.

[0079] In certain embodiments, the ds oligonucleotides comprising a guide strand backbone phosphoryl guanidine chiral center in the Sp configuration between the +3 nucleotide and the immediately downstream (+4) nucleotide, i.e., in the 3′ direction, comprise a DNA modification of the 5′ terminal (+1) nucleotide, second (+2) nucleotide, third (+3) nucleotide, fourth (+4) nucleotide, fifth (+5) nucleotide, sixth (+6) nucleotide, seventh (+7) nucleotide, and/or eighth (+8) nucleotide. In certain embodiments, the ds oligonucleotides comprising a guide strand backbone phosphoryl guanidine chiral center in the Sp configuration between the +3 nucleotide and the immediately downstream (+4) nucleotide, i.e., in the 3′ direction, comprise a DNA modification of the 5′ terminal (+1) nucleotide. In certain embodiments, the ds oligonucleotides comprising a guide strand backbone phosphoryl guanidine chiral center in the Sp configuration between the +3 nucleotide and the immediately downstream (+4) nucleotide, i.e., in the 3′ direction, comprise a DNA modification of the second (+2) nucleotide. In certain embodiments, the ds oligonucleotides comprising a guide strand backbone phosphoryl guanidine chiral center in the Sp configuration between the +3 nucleotide and the immediately downstream (+4) nucleotide, i.e., in the 3′ direction, comprise a DNA modification of the third (+3) nucleotide. In certain embodiments, the ds oligonucleotides comprising a guide strand backbone phosphoryl guanidine chiral center in the Sp configuration between the +3 nucleotide and the immediately downstream (+4) nucleotide, i.e., in the 3′ direction, comprise a DNA modification of the fourth (+4) nucleotide. In certain embodiments, the ds oligonucleotides comprising a guide strand backbone phosphoryl guanidine chiral center in the Sp configuration between the +3 nucleotide and the immediately downstream (+4) nucleotide, i.e., in the 3′ direction, comprise a DNA modification of the fifth (+5) nucleotide. In certain embodiments, the ds oligonucleotides comprising a guide strand backbone phosphoryl guanidine chiral center in the Sp configuration between the +3 nucleotide and the immediately downstream (+4) nucleotide, i.e., in the 3′ direction, comprise a DNA modification of the sixth (+6) nucleotide. In certain embodiments, the ds oligonucleotides comprising a guide strand backbone phosphoryl guanidine chiral center in the Sp configuration between the +3 nucleotide and the immediately downstream (+4) nucleotide, i.e., in the 3′ direction, comprise a DNA modification of the seventh (+7) nucleotide. In certain embodiments, the ds oligonucleotides comprising a guide strand backbone phosphoryl guanidine chiral center in the Sp configuration between the +3 nucleotide and the immediately downstream (+4) nucleotide, i.e., in the 3′ direction, comprise a DNA modification of the eighth (+8) nucleotide.

[0080] In certain embodiments, the present disclosure provides a ds oligonucleotide, useful for any purpose, which operates through any mechanism, and which comprises comprising a guide strand backbone phosphoryl guanidine chiral center in the Sp configuration between the +3 nucleotide and the immediately downstream (+4) nucleotide, i.e., in the 3′ direction, which further comprises:
[0081] (1) a guide strand comprising backbone phosphorothioate chiral centers in Sp configuration between the 3′ terminal nucleotide and the penultimate (N-1) nucleotide and as between the penultimate (N-1) nucleotide and the immediately upstream, i.e., in the 5′ direction, (N-2) nucleotide;
[0082] (2) a guide strand comprising backbone phosphorothioate chiral centers in Rp, Sp, or alternating configurations between the 5′ terminal (+1) nucleotide and the immediately downstream, i.e., in the 3′ direction, (+2) nucleotide and between the +2 nucleotide and the immediately downstream (+3) nucleotide;
[0083] (3) a guide strand comprising one or more backbone phosphorothioate chiral centers upstream, i.e., in the 5′ direction, relative to backbone phosphorothioate chiral centers in Sp configuration between the 3′ terminal nucleotide and the penultimate (N-1) nucleotide and as between the penultimate (N-1) nucleotide and the immediately upstream (N-2) nucleotide, where the upstream backbone phosphorothioate chiral centers are in Rp or Sp configuration;
[0084] (4) a guide strand comprising one or more backbone phosphorothioate chiral centers in Rp or Sp configuration between the 5′ terminal (+1) nucleotide and the immediately downstream (+2) nucleotide; and between the +2 nucleotide and the immediately downstream (+3) nucleotide;
[0085] (5) a guide strand comprising one or more backbone phosphorothioate chiral centers in Rp or Sp configuration where linkage occurs between any two adjacent nucleotides between the penultimate 3′ nucleotide of the guide strand, where N is the 3′ terminal nucleotide, and the upstream N-10 nucleotide;
[0086] (6) a guide strand comprising one or more backbone phosphoryl guanidine chiral centers in the Sp configuration between the +7 and the immediately downstream (+8), i.e., in the 3′ direction.
[0087] (7) a guide strand comprising a 5′ terminal modification;
[0088] (8) a passenger strand in combination with one or more of the aforementioned guide strands, comprising one or more backbone chiral centers in Rp or Sp configuration;
[0089] (9) a passenger strand in combination with one or more of the aforementioned guide strands, comprising one or more backbone phosphoryl guanidine chiral centers in the Rp configuration between the +7 nucleotide and the immediately downstream (+8) nucleotide, i.e., in the 3′ direction;
[0090] (10) a passenger strand in combination with one or more of the aforementioned guide strands, comprising one or more backbone phosphoryl guanidine chiral centers in the Rp configuration between the +15 nucleotide and the immediately downstream (+16) nucleotide, i.e., in the 3′ direction; and
[0091] (11) a passenger strand in combination with one or more of the aforementioned guide strands, comprising backbone phosphorothioate chiral centers in the Sp configuration between the 5′ terminal (+1) nucleotide and the immediately downstream, i.e., in the 3′ direction, (+2) nucleotide and between the 3′ terminal nucleotide and the penultimate (N-1) nucleotide;
   wherein the ds oligonucleotide further comprises one or more of:
[0092] (1) a guide strand where one or both of the 5′ and 3′ terminal dinucleotides are not linked by non-negatively charged internucleotidic linkages, i.e., the guide strand comprises one more Rp, Sp, or stereorandom non-negatively charged internucleotidic linkages downstream, i.e., in the 3′ direction, relative to the linkage between the 5′ terminal dinucleotide and/or upstream, i.e., in the 5′ direction, relative to the linkage between the 3′ terminal dinucleotide;
[0093] (2) a guide strand where one or more Rp, Sp, or stereorandom non-negatively charged internucleotidic linkage occurs between any two adjacent nucleotides between the second (+2) nucleotide relative to the 5′ terminal nucleotide of the guide strand and the penultimate 3′ (N-1) nucleotide of the guide strand, where N is the 3′ terminal nucleotide;
[0094] (3) a guide strand where an Rp, Sp, or stereorandom non-negatively charged internucleotidic linkage occurs between the tenth (+10) and eleventh (+11) nucleotides, relative to the 5′ terminal nucleotide;
[0095] (4) a guide strand where an Rp, Sp, or stereorandom non-negatively charged internucleotidic linkage occurs between the seventh (+7) and eighth (+8) nucleotides, relative to the 5′ terminal nucleotide;
[0096] (5) a guide strand comprising one or more backbone phosphorothioate chiral centers in Rp or Sp configuration where linkage occurs between any two adjacent nucleotides between the penultimate 3′ nucleotide of the guide strand, where N is the 3′ terminal nucleotide, and the upstream N-10 nucleotide;
[0097] (6) a passenger strand where one or more Rp, Sp, or stereorandom non-negatively charged internucleotidic linkage occurs upstream, i.e., in the 5′ direction, relative to the central nucleotide of the passenger strand;
[0098] (7) a passenger strand where one or more Rp, Sp, or stereorandom non-negatively charged internucleotidic linkage occurs downstream, i.e., in the 3′ direction, relative to the central nucleotide of the passenger strand;
[0099] (8) a passenger strand where one or more backbone phosphorothioate chiral centers in Rp or Sp configuration internucleotidic linkage occurs upstream, i.e., in the 5′ direction, relative to the central nucleotide of the passenger strand;
[0100] (9) a passenger strand where one or more backbone phosphorothioate chiral centers in Rp or Sp configuration internucleotidic linkage internucleotidic linkage occurs downstream, i.e., in the 3′ direction, relative to the central nucleotide of the passenger strand; and
[0101] (10) a passenger strand comprising one or more modified sugars, e.g. Homo-DNA, between the 5′ terminal (+1) nucleotide and the penultimate (N-1) nucleotide.

[0102] In certain embodiments, the ds oligonucleotides comprising a guide strand backbone phosphoryl guanidine chiral center in the Sp configuration between the +3 nucleotide and the immediately downstream (+4) nucleotide, i.e., in the 3′ direction, comprise a GNA modification of the 5′ terminal (+1) nucleotide, second (+2) nucleotide, third (+3) nucleotide, fourth (+4) nucleotide, fifth (+5) nucleotide, sixth (+6) nucleotide, seventh (+7) nucleotide, and/or eighth (+8) nucleotide. In certain embodiments, the ds oligonucleotides comprising a guide strand backbone phosphoryl guanidine chiral center in the Sp configuration between the +3 nucleotide and the immediately downstream (+4) nucleotide, i.e., in the 3′ direction, comprise a GNA modification of the 5′ terminal (+1) nucleotide. In certain embodiments, the ds oligonucleotides comprising a guide strand backbone phosphoryl guanidine chiral center in the Sp configuration between the +3 nucleotide and the immediately downstream (+4) nucleotide, i.e., in the 3′ direction, comprise a GNA modification of the second (+2) nucleotide. In certain embodiments, the ds oligonucleotides comprising a guide strand backbone phosphoryl guanidine chiral center in the Sp configuration between the +3 nucleotide and the immediately downstream (+4) nucleotide, i.e., in the 3′ direction, comprise a GNA modification of the third (+3) nucleotide. In certain embodiments, the ds oligonucleotides comprising a guide strand backbone phosphoryl guanidine chiral center in the Sp configuration between the +3 nucleotide and the immediately downstream (+4) nucleotide, i.e., in the 3′ direction, comprise a GNA modification of the fourth (+4) nucleotide. In certain embodiments, the ds oligonucleotides comprising a guide strand backbone phosphoryl guanidine chiral center in the Sp configuration between the +3 nucleotide and the immediately downstream (+4) nucleotide, i.e., in the 3′ direction, comprise a GNA modification of the fifth (+5) nucleotide. In certain embodiments, the ds oligonucleotides comprising a guide strand backbone phosphoryl guanidine chiral center in the Sp configuration between the +3 nucleotide and the immediately downstream (+4) nucleotide, i.e., in the 3′ direction, comprise a GNA modification of the sixth (+6) nucleotide. In certain embodiments, the ds oligonucleotides comprising a guide strand backbone phosphoryl guanidine chiral center in the Sp configuration between the +3 nucleotide and the immediately downstream (+4) nucleotide, i.e., in the 3′ direction, comprise a GNA modification of the seventh (+7) nucleotide. In certain embodiments, the ds oligonucleotides comprising a guide strand backbone phosphoryl guanidine chiral center in the Sp configuration between the +3 nucleotide and the immediately downstream (+4) nucleotide, i.e., in the 3′ direction, comprise a GNA modification of the eighth (+8) nucleotide.

[0103] In certain embodiments, the present disclosure provides a ds oligonucleotide, useful for any purpose, which operates through any mechanism, and which comprises comprising a guide strand backbone phosphoryl guanidine chiral center in the Sp configuration between the +3 nucleotide and the immediately downstream (+4) nucleotide, i.e., in the 3′ direction, which further comprises:
[0104] (1) a guide strand comprising backbone phosphorothioate chiral centers in Sp configuration between the 3′ terminal nucleotide and the penultimate (N-1) nucleotide and as between the penultimate (N-1) nucleotide and the immediately upstream, i.e., in the 5′ direction, (N-2) nucleotide;
[0105] (2) a guide strand comprising backbone phosphorothioate chiral centers in Rp, Sp, or alternating configurations between the 5′ terminal (+1) nucleotide and the immediately downstream, i.e., in the 3′ direction, (+2) nucleotide and between the +2 nucleotide and the immediately downstream (+3) nucleotide;
[0106] (3) a guide strand comprising one or more backbone phosphorothioate chiral centers upstream, i.e., in the 5′ direction, relative to backbone phosphorothioate chiral centers in Sp configuration between the 3′ terminal nucleotide and the penultimate (N-1) nucleotide and as between the penultimate (N-1) nucleotide and the immediately upstream (N-2) nucleotide, where the upstream backbone phosphorothioate chiral centers are in Rp or Sp configuration;
[0107] (4) a guide strand comprising one or more backbone phosphorothioate chiral centers in Rp or Sp configuration between the 5′ terminal (+1) nucleotide and the immediately downstream (+2) nucleotide; and between the +2 nucleotide and the immediately downstream (+3) nucleotide;
[0108] (5) a guide strand comprising one or more backbone phosphorothioate chiral centers in Rp or Sp configuration where linkage occurs between any two adjacent nucleotides between the penultimate 3′ nucleotide of the guide strand, where N is the 3′ terminal nucleotide, and the upstream N-10 nucleotide;
[0109] (6) a guide strand comprising one or more backbone phosphoryl guanidine chiral centers in the Sp configuration between the +7 and the immediately downstream (+8), i.e., in the 3′ direction.
[0110] (7) a guide strand comprising a 5′ terminal modification;
[0111] (8) a passenger strand in combination with one or more of the aforementioned guide strands, comprising one or more backbone chiral centers in Rp or Sp configuration;
[0112] (9) a passenger strand in combination with one or more of the aforementioned guide strands, comprising one or more backbone phosphoryl guanidine chiral centers in the Rp configuration between the +7 nucleotide and the immediately downstream (+8) nucleotide, i.e., in the 3′ direction;
[0113] (10) a passenger strand in combination with one or more of the aforementioned guide strands, comprising one or more backbone phosphoryl guanidine chiral centers in the Rp configuration between the +15 nucleotide and the immediately downstream (+16) nucleotide, i.e., in the 3′ direction; and
[0114] (11) a passenger strand in combination with one or more of the aforementioned guide strands, comprising backbone phosphorothioate chiral centers in the Sp configuration between the 5′ terminal (+1) nucleotide and the immediately downstream, i.e., in the 3′ direction, (+2) nucleotide and between the 3′ terminal nucleotide and the penultimate (N-1) nucleotide;
   wherein the ds oligonucleotide further comprises one or more of:
[0115] (1) a guide strand where one or both of the 5′ and 3′ terminal dinucleotides are not linked by non-negatively charged internucleotidic linkages, i.e., the guide strand comprises one more Rp, Sp, or stereorandom non-negatively charged internucleotidic linkages downstream, i.e., in the 3′ direction, relative to the linkage between the 5′ terminal dinucleotide and/or upstream, i.e., in the 5′ direction, relative to the linkage between the 3′ terminal dinucleotide;
[0116] (2) a guide strand where one or more Rp, Sp, or stereorandom non-negatively charged internucleotidic linkage occurs between any two adjacent nucleotides between the second (+2) nucleotide relative to the 5′ terminal nucleotide of the guide strand and the penultimate 3′ (N-1) nucleotide of the guide strand, where N is the 3′ terminal nucleotide;
[0117] (3) a guide strand where an Rp, Sp, or stereorandom non-negatively charged internucleotidic linkage occurs between the tenth (+10) and eleventh (+11) nucleotides, relative to the 5′ terminal nucleotide;
[0118] (4) a guide strand where an Rp, Sp, or stereorandom non-negatively charged internucleotidic linkage occurs between the seventh (+7) and eighth (+8) nucleotides, relative to the 5′ terminal nucleotide;
[0119] (5) a guide strand comprising one or more backbone phosphorothioate chiral centers in Rp or Sp configuration where linkage occurs between any two adjacent nucleotides between the penultimate 3′ nucleotide of the guide strand, where N is the 3′ terminal nucleotide, and the upstream N-10 nucleotide;
[0120] (6) a passenger strand where one or more Rp, Sp, or stereorandom non-negatively charged internucleotidic linkage occurs upstream, i.e., in the 5′ direction, relative to the central nucleotide of the passenger strand;
[0121] (7) a passenger strand where one or more Rp, Sp, or stereorandom non-negatively charged internucleotidic linkage occurs downstream, i.e., in the 3′ direction, relative to the central nucleotide of the passenger strand;
[0122] (8) a passenger strand where one or more backbone phosphorothioate chiral centers in Rp or Sp configuration internucleotidic linkage occurs upstream, i.e., in the 5′ direction, relative to the central nucleotide of the passenger strand;
[0123] (9) a passenger strand where one or more backbone phosphorothioate chiral centers in Rp or Sp configuration internucleotidic linkage internucleotidic linkage occurs downstream, i.e., in the 3′ direction, relative to the central nucleotide of the passenger strand; and
[0124] (10) a passenger strand comprising one or more modified sugars, e.g. Homo-DNA, between the 5′ terminal (+1) nucleotide and the penultimate (N-1) nucleotide.

[0125] In certain embodiments, the ds oligonucleotides comprising a guide strand backbone phosphoryl guanidine chiral center in the Sp configuration between the +3 nucleotide and the immediately downstream (+4) nucleotide, i.e., in the 3′ direction, comprise a (s)-GNA modification of the 5′ terminal (+1) nucleotide, second (+2) nucleotide, third (+3) nucleotide, fourth (+4) nucleotide, fifth (+5) nucleotide, sixth (+6) nucleotide, seventh (+7) nucleotide, and/or eighth (+8) nucleotide. In certain embodiments, the ds oligonucleotides comprising a guide strand backbone phosphoryl guanidine chiral center in the Sp configuration between the +3 nucleotide and the immediately downstream (+4) nucleotide, i.e., in the 3′ direction, comprise a (s)-GNA modification of the 5′ terminal (+1) nucleotide. In certain embodiments, the ds oligonucleotides comprising a guide strand backbone phosphoryl guanidine chiral center in the Sp configuration between the +3 nucleotide and the immediately downstream (+4) nucleotide, i.e., in the 3′ direction, comprise a (s)-GNA modification of the second (+2) nucleotide. In certain embodiments, the ds oligonucleotides comprising a guide strand backbone phosphoryl guanidine chiral center in the Sp configuration between the +3 nucleotide and the immediately downstream (+4) nucleotide, i.e., in the 3′ direction, comprise a (s)-GNA modification of the third (+3) nucleotide. In certain embodiments, the ds oligonucleotides comprising a guide strand backbone phosphoryl guanidine chiral center in the Sp configuration between the +3 nucleotide and the immediately downstream (+4) nucleotide, i.e., in the 3′ direction, comprise a (s)-GNA modification of the fourth (+4) nucleotide. In certain embodiments, the ds oligonucleotides comprising a guide strand backbone phosphoryl guanidine chiral center in the Sp configuration between the +3 nucleotide and the immediately downstream (+4) nucleotide, i.e., in the 3′ direction, comprise a (s)-GNA modification of the fifth (+5) nucleotide. In certain embodiments, the ds oligonucleotides comprising a guide strand backbone phosphoryl guanidine chiral center in the Sp configuration between the +3 nucleotide and the immediately downstream (+4) nucleotide, i.e., in the 3′ direction, comprise a (s)-GNA modification of the sixth (+6) nucleotide. In certain embodiments, the ds oligonucleotides comprising a guide strand backbone phosphoryl guanidine chiral center in the Sp configuration between the +3 nucleotide and the immediately downstream (+4) nucleotide, i.e., in the 3′ direction, comprise a (s)-GNA modification of the seventh (+7) nucleotide. In certain embodiments, the ds oligonucleotides comprising a guide strand backbone phosphoryl guanidine chiral center in the Sp configuration between the +3 nucleotide and the immediately downstream (+4) nucleotide, i.e., in the 3′ direction, comprise a (s)-GNA modification of the eighth (+8) nucleotide.

[0126] In certain embodiments, the ds oligonucleotides comprising a guide strand backbone phosphoryl guanidine chiral center in the Sp configuration between the +3 nucleotide and the immediately downstream (+4) nucleotide, i.e., in the 3′ direction, further comprises one or more of.
[0127] (1) a guide strand comprising backbone phosphorothioate chiral centers in Sp configuration between the 3′ terminal nucleotide and the penultimate (N-1) nucleotide and as between the penultimate (N-1) nucleotide and the immediately upstream, i.e., in the 5′ direction, (N-2) nucleotide;
[0128] (2) a guide strand comprising backbone phosphorothioate chiral centers in Rp, Sp, or alternating configurations between the 5′ terminal (+1) nucleotide and the immediately downstream, i.e., in the 3′ direction, (+2) nucleotide and between the +2 nucleotide and the immediately downstream (+3) nucleotide;
[0129] (3) a guide strand comprising one or more backbone phosphorothioate chiral centers upstream, i.e., in the 5′ direction, relative to backbone phosphorothioate chiral centers in Sp configuration between the 3′ terminal nucleotide and the penultimate (N-1) nucleotide and as between the penultimate (N-1) nucleotide and the immediately upstream (N-2) nucleotide, where the upstream backbone phosphorothioate chiral centers are in Rp or Sp configuration;
[0130] (4) a guide strand comprising one or more backbone phosphorothioate chiral centers in Rp or Sp configuration between the 5′ terminal (+1) nucleotide and the immediately downstream (+2) nucleotide; and between the +2 nucleotide and the immediately downstream (+3) nucleotide;
[0131] (5) a guide strand comprising one or more backbone phosphorothioate chiral centers in Rp or Sp configuration where linkage occurs between any two adjacent nucleotides between the penultimate 3′ nucleotide of the guide strand, where N is the 3′ terminal nucleotide, and the upstream N-10 nucleotide;
[0132] (6) a guide strand comprising one or more backbone phosphoryl guanidine chiral centers in the Sp configuration between the +7 and the immediately downstream (+8), i.e., in the 3′ direction.
[0133] (7) a guide strand comprising a 5′ terminal modification;
[0134] (8) a passenger strand in combination with one or more of the aforementioned guide strands, comprising one or more backbone chiral centers in Rp or Sp configuration;
[0135] (9) a passenger strand in combination with one or more of the aforementioned guide strands, comprising one or more backbone phosphoryl guanidine chiral centers in the Rp configuration between the +7 nucleotide and the immediately downstream (+8) nucleotide, i.e., in the 3′ direction;
[0136] (10) a passenger strand in combination with one or more of the aforementioned guide strands, comprising one or more backbone phosphoryl guanidine chiral centers in the Rp configuration between the +15 nucleotide and the immediately downstream (+16) nucleotide, i.e., in the 3′ direction; and
[0137] (11) a passenger strand in combination with one or more of the aforementioned guide strands, comprising backbone phosphorothioate chiral centers in the Sp configuration between the 5′ terminal (+1) nucleotide and the immediately downstream, i.e., in the 3′ direction, (+2) nucleotide and between the 3′ terminal nucleotide and the penultimate (N-1) nucleotide;
   wherein the ds oligonucleotide further comprises one or more of.
[0138] (1) a guide strand where one or both of the 5′ and 3′ terminal dinucleotides are not linked by a Rp, Sp, or stereorandom non-negatively charged internucleotidic linkages, i.e., the guide strand comprises one or more Rp, Sp, or stereorandom non-negatively charged internucleotidic linkages downstream, i.e., in the 3′ direction, relative to the linkage between the 5′ terminal dinucleotide and/or upstream, i.e., in the 5′ direction, relative to the linkage between the 3′ terminal dinucleotide;
[0139] (2) a guide strand where one or more Rp, Sp, or stereorandom non-negatively charged internucleotidic linkage occurs between any two adjacent nucleotides between the second (+2) nucleotide relative to the 5′ terminal nucleotide of the guide strand and the penultimate 3′ (N-1) nucleotide of the guide strand, where N is the 3′ terminal nucleotide;
[0140] (3) a guide strand where an Rp, Sp, or stereorandom non-negatively charged internucleotidic linkage occurs between the tenth (+10) and eleventh (+11) nucleotides, relative to the 5′ terminal nucleotide;
[0141] (4) a guide strand where an Rp, Sp, or stereorandom non-negatively charged internucleotidic linkage occurs between the seventh (+7) and eighth (+8) nucleotides, relative to the 5′ terminal nucleotide;
[0142] (5) a guide strand comprising one or more backbone phosphorothioate chiral centers in Rp or Sp configuration where linkage occurs between any two adjacent nucleotides between the penultimate 3′ nucleotide of the guide strand, where N is the 3′ terminal nucleotide, and the upstream N-10 nucleotide;
[0143] (6) a passenger strand where one or more Rp, Sp, or stereorandom non-negatively charged internucleotidic linkage occurs upstream, i.e., in the 5′ direction, relative to the central nucleotide of the passenger strand; and
[0144] (7) a passenger strand where one or more Rp, Sp, or stereorandom non-negatively charged internucleotidic linkage occurs downstream, i.e., in the 3′ direction, relative to the central nucleotide of the passenger strand.
[0145] (8) a passenger strand where one or more backbone phosphorothioate chiral centers in Rp or Sp configuration internucleotidic linkage occurs upstream, i.e., in the 5′ direction, relative to the central nucleotide of the passenger strand;
[0146] (9) a passenger strand where one or more backbone phosphorothioate chiral centers in Rp or Sp configuration internucleotidic linkage internucleotidic linkage occurs downstream, i.e., in the 3′ direction, relative to the central nucleotide of the passenger strand; and
[0147] (10) a passenger strand comprising one or more modified sugars, e.g. Homo-DNA, between the 5′ terminal (+1) nucleotide and the penultimate (N-1) nucleotide.
   In certain embodiments, the ds oligonucleotide further comprises a 2′ modification, e.g., a 2′ F modification, of the 3′ nucleotide of a nucleotide pair linked by a Rp, Sp, or stereorandom non-negatively charged internucleotidic linkage. In certain embodiments, the one or more Rp, Sp, or stereorandom non-negatively charged internucleotidic linkage incorporated into the guide or passenger strand is an Rp non-negatively charged internucleotidic linkage. In certain embodiments, the one or more Rp, Sp, or stereorandom non-negatively charged internucleotidic linkage is an Sp non-negatively charged internucleotidic linkage. In certain embodiments, the one or more Rp, Sp, or stereorandom non-negatively charged internucleotidic linkage is a stereorandom non-negatively charged internucleotidic linkage.

[0148] In certain embodiments, the ds oligonucleotides comprising a guide strand backbone phosphoryl guanidine chiral center in the Sp configuration between the +3 nucleotide and the immediately downstream (+4) nucleotide, i.e., in the 3′ direction, further comprise one or a plurality of modified sugars. In certain embodiments, the ds oligonucleotides comprising a guide strand backbone phosphoryl guanidine chiral center in the Sp configuration between the +3 nucleotide and the immediately downstream (+4) nucleotide, i.e., in the 3′ direction, comprise a modified sugar at the 5′ terminal (+1) nucleotide, second (+2) nucleotide, third (+3) nucleotide, fourth (+4) nucleotide, fifth (+5) nucleotide, sixth (+6) nucleotide, seventh (+7) nucleotide, eighth (+8), ninth (+9) nucleotide, tenth (+10) nucleotide, twelfth (+12) nucleotide, sixteenth (+16) nucleotide, seventeenth (+17) nucleotide, eighteenth (+18) nucleotide, nineteenth (+19) nucleotide, twentieth (+20) nucleotide, twenty-first (+21) nucleotide, twenty-second (+22), and/or twenty-third (+23), the 3′ terminal, nucleotide. In certain embodiments, the ds oligonucleotides comprising a guide strand backbone phosphoryl guanidine chiral center in the Sp configuration between the +3 nucleotide and the immediately downstream (+4) nucleotide, i.e., in the 3′ direction, comprise a modified sugar at the 5′ terminal (+1) nucleotide. In certain embodiments, the ds oligonucleotides comprising a guide strand backbone phosphoryl guanidine chiral center in the Sp configuration between the +3 nucleotide and the immediately downstream (+4) nucleotide, i.e., in the 3′ direction, comprise a modified sugar at the second (+2) nucleotide. In certain embodiments, the ds oligonucleotides comprising a guide strand backbone phosphoryl guanidine chiral center in the Sp configuration between the +3 nucleotide and the immediately downstream (+4) nucleotide, i.e., in the 3′ direction, comprise a modified sugar at the third (+3) nucleotide. In certain embodiments, the ds oligonucleotides comprising a guide strand backbone phosphoryl guanidine chiral center in the Sp configuration between the +3 nucleotide and the immediately downstream (+4) nucleotide, i.e., in the 3′ direction, comprise a modified sugar at the fourth (+4) nucleotide. In certain embodiments, the ds oligonucleotides comprising a guide strand backbone phosphoryl guanidine chiral center in the Sp configuration between the +3 nucleotide and the immediately downstream (+4) nucleotide, i.e., in the 3′ direction, comprise a modified sugar at the fifth (+5) nucleotide. In certain embodiments, the ds oligonucleotides comprising a guide strand backbone phosphoryl guanidine chiral center in the Sp configuration between the +3 nucleotide and the immediately downstream (+4) nucleotide, i.e., in the 3′ direction, comprise a modified sugar at the sixth (+6) nucleotide. In certain embodiments, the ds oligonucleotides comprising a guide strand backbone phosphoryl guanidine chiral center in the Sp configuration between the +3 nucleotide and the immediately downstream (+4) nucleotide, i.e., in the 3′ direction, comprise a modified sugar of the seventh (+7) nucleotide. In certain embodiments, the ds oligonucleotides comprising a guide strand backbone phosphoryl guanidine chiral center in the Sp configuration between the +3 nucleotide and the immediately downstream (+4) nucleotide, i.e., in the 3′ direction, comprise a modified sugar of the eighth (+8) nucleotide. In certain embodiments, the ds oligonucleotides comprising a guide strand backbone phosphoryl guanidine chiral center in the Sp configuration between the +3 nucleotide and the immediately downstream (+4) nucleotide, i.e., in the 3′ direction, comprise a modified sugar of the ninth (+9) nucleotide. In certain embodiments, the ds oligonucleotides comprising a guide strand backbone phosphoryl guanidine chiral center in the Sp configuration between the +3 nucleotide and the immediately downstream (+4) nucleotide, i.e., in the 3′ direction, comprise a modified sugar of the tenth (+10) nucleotide. In certain embodiments, the ds oligonucleotides comprising a guide strand backbone phosphoryl guanidine chiral center in the Sp configuration between the +3 nucleotide and the immediately downstream (+4) nucleotide, i.e., in the 3′ direction, comprise a modified sugar of the twelfth (+12) nucleotide. In certain embodiments, the ds oligonucleotides comprising a guide strand backbone phosphoryl guanidine chiral center in the Sp configuration between the +3 nucleotide and the immediately downstream (+4) nucleotide, i.e., in the 3′ direction, comprise a modified sugar of the sixteenth (+16) nucleotide. In certain embodiments, the ds oligonucleotides comprising a guide strand backbone phosphoryl guanidine chiral center in the Sp configuration between the +3 nucleotide and the immediately downstream (+4) nucleotide, i.e., in the 3′ direction, comprise a modified sugar of the seventeenth (+17) nucleotide. In certain embodiments, the ds oligonucleotides comprising a guide strand backbone phosphoryl guanidine chiral center in the Sp configuration between the +3 nucleotide and the immediately downstream (+4) nucleotide, i.e., in the 3′ direction, comprise a modified sugar of the eighteenth (+18) nucleotide. In certain embodiments, the ds oligonucleotides comprising a guide strand backbone phosphoryl guanidine chiral center in the Sp configuration between the +3 nucleotide and the immediately downstream (+4) nucleotide, i.e., in the 3′ direction, comprise a modified sugar of the nineteenth (+19) nucleotide. In certain embodiments, the ds oligonucleotides comprising a guide strand backbone phosphoryl guanidine chiral center in the Sp configuration between the +3 nucleotide and the immediately downstream (+4) nucleotide, i.e., in the 3′ direction, comprise a modified sugar of the twentieth (+20) nucleotide. In certain embodiments, the ds oligonucleotides comprising a guide strand backbone phosphoryl guanidine chiral center in the Sp configuration between the +3 nucleotide and the immediately downstream (+4) nucleotide, i.e., in the 3′ direction, comprise a modified sugar of the twenty-first (+21) nucleotide. In certain embodiments, the ds oligonucleotides comprising a guide strand backbone phosphoryl guanidine chiral center in the Sp configuration between the +3 nucleotide and the immediately downstream (+4) nucleotide, i.e., in the 3′ direction, comprise a modified sugar of the twenty-second (+22) nucleotide. In certain embodiments, the ds oligonucleotides comprising a guide strand backbone phosphoryl guanidine chiral center in the Sp configuration between the +3 nucleotide and the immediately downstream (+4)nucleotide, i.e., in the 3′ direction, comprise a modified sugar of the twenty-third (+23), the 3′ terminal, nucleotide.

[0149] In certain embodiments, the modified sugar comprises a 2′-F modification, 2′-H modification, 2′-OH modification, 2′-O-alkyl modification, e.g., 2′-O-methyl (OMe) modification, 2′-methoxyethyl (MOE) modification, 5′-alkyl modification, e.g., 5′-(R)-methyl or 5′-(S)-methyl, DNA, locked nucleic acid (LNA), unlocked nucleic acid (UNA), glycol nucleic acid (GNA), or Homo-DNA.

[0150] In certain embodiments, the ds oligonucleotides comprising a guide strand backbone phosphoryl guanidine chiral center in the Sp configuration between the +3 nucleotide and the immediately downstream (+4) nucleotide, i.e., in the 3′ direction, comprise one or a plurality of a 2′-F modifications. In certain embodiments, the ds oligonucleotides comprising a guide strand backbone phosphoryl guanidine chiral center in the Sp configuration between the +3 nucleotide and the immediately downstream (+4) nucleotide, i.e., in the 3′ direction, comprise a 2′-F modification of the 5′ terminal (+1) nucleotide, second (+2) nucleotide, third (+3) nucleotide, fourth (+4) nucleotide, fifth (+5) nucleotide, and/or sixth (+6) nucleotide. In certain embodiments, the ds oligonucleotides comprising a guide strand backbone phosphoryl guanidine chiral center in the Sp configuration between the +3 nucleotide and the immediately downstream (+4) nucleotide, i.e., in the 3′ direction, comprise a 2′-F modification of the 5′ terminal (+1) nucleotide. In certain embodiments, the ds oligonucleotides comprising a guide strand backbone phosphoryl guanidine chiral center in the Sp configuration between the +3 nucleotide and the immediately downstream (+4) nucleotide, i.e., in the 3′ direction, comprise a 2′-F modification of the second (+2) nucleotide. In certain embodiments, the ds oligonucleotides comprising a guide strand backbone phosphoryl guanidine chiral center in the Sp configuration between the +3 nucleotide and the immediately downstream (+4) nucleotide, i.e., in the 3′ direction, comprise a 2′-F modification of the third (+3) nucleotide. In certain embodiments, the ds oligonucleotides comprising a guide strand backbone phosphoryl guanidine chiral center in the Sp configuration between the +3 nucleotide and the immediately downstream (+4) nucleotide, i.e., in the 3′ direction, comprise a 2′-F modification of the fourth (+4) nucleotide. In certain embodiments, the ds oligonucleotides comprising a guide strand backbone phosphoryl guanidine chiral center in the Sp configuration between the +3 nucleotide and the immediately downstream (+4) nucleotide, i.e., in the 3′ direction, comprise a 2′-F modification of the fifth (+5) nucleotide. In certain embodiments, the ds oligonucleotides comprising a guide strand backbone phosphoryl guanidine chiral center in the Sp configuration between the +3 nucleotide and the immediately downstream (+4) nucleotide, i.e., in the 3′ direction, comprise a 2′-F modification of the sixth (+6) nucleotide.

[0151] In certain embodiments, the ds oligonucleotides comprising a guide strand backbone phosphoryl guanidine chiral center in the Sp configuration between the +3 nucleotide and the immediately downstream (+4) nucleotide, i.e., in the 3′ direction, comprise one or a plurality of Homo-DNA modifications. In certain embodiments, the ds oligonucleotides comprising a guide strand backbone phosphoryl guanidine chiral center in the Sp configuration between the +3 nucleotide and the immediately downstream (+4) nucleotide, i.e., in the 3′ direction, comprise a Homo-DNA modification of the 5′ terminal (+1) nucleotide, sixth (+6) nucleotide, ninth (+9) nucleotide, tenth (+10) nucleotide, twelfth (+12)nucleotide, sixteenth (+16) nucleotide, seventeenth (+17) nucleotide, eighteenth (+18) nucleotide, nineteenth (+19) nucleotide, twentieth (+20) nucleotide, twenty-first (+21) nucleotide, twenty-second (+22), and/or twenty-third (+23), the 3′ terminal, nucleotide. In certain embodiments, the ds oligonucleotides comprising a guide strand backbone phosphoryl guanidine chiral center in the Sp configuration between the +3 nucleotide and the immediately downstream (+4) nucleotide, i.e., in the 3′ direction, comprise a Homo-DNA modification of the 5′ terminal (+1) nucleotide. In certain embodiments, the ds oligonucleotides comprising a guide strand backbone phosphoryl guanidine chiral center in the Sp configuration between the +3 nucleotide and the immediately downstream (+4) nucleotide, i.e., in the 3′ direction, comprise a Homo-DNA modification of the sixth (+6) nucleotide. In certain embodiments, the ds oligonucleotides comprising a guide strand backbone phosphoryl guanidine chiral center in the Sp configuration between the +3 nucleotide and the immediately downstream (+4) nucleotide, i.e., in the 3′ direction, comprise a Homo-DNA modification of the ninth (+9) nucleotide. In certain embodiments, the ds oligonucleotides comprising a guide strand backbone phosphoryl guanidine chiral center in the Sp configuration between the +3 nucleotide and the immediately downstream (+4) nucleotide, i.e., in the 3′ direction, comprise a Homo-DNA modification of the tenth (+10) nucleotide. In certain embodiments, the ds oligonucleotides comprising a guide strand backbone phosphoryl guanidine chiral center in the Sp configuration between the +3 nucleotide and the immediately downstream (+4) nucleotide, i.e., in the 3′ direction, comprise a Homo-DNA modification of the twelfth (+12) nucleotide. In certain embodiments, the ds oligonucleotides comprising a guide strand backbone phosphoryl guanidine chiral center in the Sp configuration between the +3 nucleotide and the immediately downstream (+4) nucleotide, i.e., in the 3′ direction, comprise a Homo-DNA modification of the sixteenth (+16) nucleotide. In certain embodiments, the ds oligonucleotides comprising a guide strand backbone phosphoryl guanidine chiral center in the Sp configuration between the +3 nucleotide and the immediately downstream (+4) nucleotide, i.e., in the 3′ direction, comprise a Homo-DNA modification of the seventeenth (+17) nucleotide. In certain embodiments, the ds oligonucleotides comprising a guide strand backbone phosphoryl guanidine chiral center in the Sp configuration between the +3 nucleotide and the immediately downstream (+4) nucleotide, i.e., in the 3′ direction, comprise a Homo-DNA modification of the eighteenth (+18) nucleotide. In certain embodiments, the ds oligonucleotides comprising a guide strand backbone phosphoryl guanidine chiral center in the Sp configuration between the +3 nucleotide and the immediately downstream (+4) nucleotide, i.e., in the 3′ direction, comprise a Homo-DNA modification of the nineteenth (+19) nucleotide. In certain embodiments, the ds oligonucleotides comprising a guide strand backbone phosphoryl guanidine chiral center in the Sp configuration between the +3 nucleotide and the immediately downstream (+4) nucleotide, i.e., in the 3′ direction, comprise a Homo-DNA modification of the twentieth (+20) nucleotide. In certain embodiments, the ds oligonucleotides comprising a guide strand backbone phosphoryl guanidine chiral center in the Sp configuration between the +3 nucleotide and the immediately downstream (+4) nucleotide, i.e., in the 3′ direction, comprise a Homo-DNA modification of the twenty-first (+21) nucleotide. In certain embodiments, the ds oligonucleotides comprising a guide strand backbone phosphoryl guanidine chiral center in the Sp configuration between the +3 nucleotide and the immediately downstream (+4) nucleotide, i.e., in the 3′ direction, comprise a Homo-DNA modification of the twenty-second (+22) nucleotide. In certain embodiments, the ds oligonucleotides comprising a guide strand backbone phosphoryl guanidine chiral center in the Sp configuration between the +3 nucleotide and the immediately downstream (+4) nucleotide, i.e., in the 3′ direction, comprise a Homo-DNA modification of the twenty-third (+23), the 3′ terminal, nucleotide.

[0152] In certain embodiments, the ds oligonucleotides comprising a guide strand backbone phosphoryl guanidine chiral center in the Sp configuration between the +3 nucleotide and the immediately downstream (+4) nucleotide, i.e., in the 3′ direction, comprise a 5′-alkyl modification of the third (+3) nucleotide and/or fourth (+4) nucleotide. In certain embodiments, the ds oligonucleotides comprising a guide strand backbone phosphoryl guanidine chiral center in the Sp configuration between the +3 nucleotide and the immediately downstream (+4) nucleotide, i.e., in the 3′ direction, comprise a 5′-methyl modification of the third (+3) nucleotide and/or fourth (+4) nucleotide In certain embodiments, the ds oligonucleotides comprising a guide strand backbone phosphoryl guanidine chiral center in the Sp configuration between the +3 nucleotide and the immediately downstream (+4) nucleotide, i.e., in the 3′ direction, comprise a 5′-alkyl modification of the third (+3) nucleotide. In certain embodiments, the ds oligonucleotides comprising a guide strand backbone phosphoryl guanidine chiral center in the Sp configuration between the +3 nucleotide and the immediately downstream (+4) nucleotide, i.e., in the 3′ direction, comprise a 5′-methyl modification of the third (+3) nucleotide. In certain embodiments, the ds oligonucleotides comprising a guide strand backbone phosphoryl guanidine chiral center in the Sp configuration between the +3 nucleotide and the immediately downstream (+4) nucleotide, i.e., in the 3′ direction, comprise a 5′-alkyl modification of the fourth (+4) nucleotide. In certain embodiments, the ds oligonucleotides comprising a guide strand backbone phosphoryl guanidine chiral center in the Sp configuration between the +3 nucleotide and the immediately downstream (+4) nucleotide, i.e., in the 3′ direction, comprise a 5′-methyl modification of the fourth (+4) nucleotide. In certain embodiments, the ds oligonucleotides comprising a guide strand backbone phosphoryl guanidine chiral center in the Sp configuration between the +3 nucleotide and the immediately downstream (+4) nucleotide, i.e., in the 3′ direction, comprise a 5′-alkyl modification of the third (+3) nucleotide and fourth (+4) nucleotide. In certain embodiments, the ds oligonucleotides comprising a guide strand backbone phosphoryl guanidine chiral center in the Sp configuration between the +3 nucleotide and the immediately downstream (+4) nucleotide, i.e., in the 3′ direction, comprise a 5′-methyl modification of the third (+3) nucleotide and fourth (+4) nucleotide

[0153] In certain embodiments, the ds oligonucleotides comprising a guide strand backbone phosphoryl guanidine chiral center in the Sp configuration between the +3 nucleotide and the immediately downstream (+4) nucleotide, i.e., in the 3′ direction, comprise one or a plurality of LNA modifications. In certain embodiments, the ds oligonucleotides comprising a guide strand backbone phosphoryl guanidine chiral center in the Sp configuration between the +3 nucleotide and the immediately downstream (+4) nucleotide, i.e., in the 3′ direction, comprise one or a plurality of LNA modifications. In certain embodiments, the ds oligonucleotides comprising a guide strand backbone phosphoryl guanidine chiral center in the Sp configuration between the +3 nucleotide and the immediately downstream (+4) nucleotide, i.e., in the 3′ direction, comprise a LNA modification of the 5′ terminal (+1) nucleotide, second (+2) nucleotide, third (+3) nucleotide, fourth (+4) nucleotide, fifth (+5) nucleotide, sixth (+6) nucleotide, seventh (+7) nucleotide, and/or eighth (+8) nucleotide. In certain embodiments, the ds oligonucleotides comprising a guide strand backbone phosphoryl guanidine chiral center in the Sp configuration between the +3 nucleotide and the immediately downstream (+4) nucleotide, i.e., in the 3′ direction, comprise a LNA modification of the 5′ terminal (+1) nucleotide. In certain embodiments, the ds oligonucleotides comprising a guide strand backbone phosphoryl guanidine chiral center in the Sp configuration between the +3 nucleotide and the immediately downstream (+4) nucleotide, i.e., in the 3′ direction, comprise a LNA modification of the second (+2) nucleotide. In certain embodiments, the ds oligonucleotides comprising a guide strand backbone phosphoryl guanidine chiral center in the Sp configuration between the +3 nucleotide and the immediately downstream (+4) nucleotide, i.e., in the 3′ direction, comprise a LNA modification of the third (+3) nucleotide. In certain embodiments, the ds oligonucleotides comprising a guide strand backbone phosphoryl guanidine chiral center in the Sp configuration between the +3 nucleotide and the immediately downstream (+4) nucleotide, i.e., in the 3′ direction, comprise a LNA modification of the fourth (+4) nucleotide. In certain embodiments, the ds oligonucleotides comprising a guide strand backbone phosphoryl guanidine chiral center in the Sp configuration between the +3 nucleotide and the immediately downstream (+4) nucleotide, i.e., in the 3′ direction, comprise a LNA modification of the fifth (+5) nucleotide. In certain embodiments, the ds oligonucleotides comprising a guide strand backbone phosphoryl guanidine chiral center in the Sp configuration between the +3 nucleotide and the immediately downstream (+4) nucleotide, i.e., in the 3′ direction, comprise a LNA modification of the sixth (+6) nucleotide. In certain embodiments, the ds oligonucleotides comprising a guide strand backbone phosphoryl guanidine chiral center in the Sp configuration between the +3 nucleotide and the immediately downstream (+4) nucleotide, i.e., in the 3′ direction, comprise a LNA modification of the seventh (+7) nucleotide. In certain embodiments, the ds oligonucleotides comprising a guide strand backbone phosphoryl guanidine chiral center in the Sp configuration between the +3 nucleotide and the immediately downstream (+4) nucleotide, i.e., in the 3′ direction, comprise a LNA modification of the eighth (+8) nucleotide.

[0154] In certain embodiments, the ds oligonucleotides comprising a guide strand backbone phosphoryl guanidine chiral center in the Sp configuration between the +3 nucleotide and the immediately downstream (+4) nucleotide, i.e., in the 3′ direction, comprise one or a plurality of 2′-o-alkyl modifications. In certain embodiments, the ds oligonucleotides comprising a guide strand backbone phosphoryl guanidine chiral center in the Sp configuration between the +3 nucleotide and the immediately downstream (+4) nucleotide, i.e., in the 3′ direction, comprise a 2′-O-alkyl modification of the 5′ terminal (+1) nucleotide, second (+2) nucleotide, third (+3) nucleotide, fourth (+4) nucleotide, fifth (+5) nucleotide, sixth (+6) nucleotide, seventh (+7) nucleotide, and/or eighth (+8) nucleotide. In certain embodiments, the ds oligonucleotides comprising a guide strand backbone phosphoryl guanidine chiral center in the Sp configuration between the +3 nucleotide and the immediately downstream (+4) nucleotide, i.e., in the 3′ direction, comprise a 2′-O-alkyl modification of the 5′ terminal (+1) nucleotide. In certain embodiments, the ds oligonucleotides comprising a guide strand backbone phosphoryl guanidine chiral center in the Sp configuration between the +3 nucleotide and the immediately downstream (+4) nucleotide, i.e., in the 3′ direction, comprise a 2′-O-alkyl modification of the second (+2) nucleotide. In certain embodiments, the ds oligonucleotides comprising a guide strand backbone phosphoryl guanidine chiral center in the Sp configuration between the +3 nucleotide and the immediately downstream (+4) nucleotide, i.e., in the 3′ direction, comprise a 2′-O-alkyl modification of the third (+3) nucleotide. In certain embodiments, the ds oligonucleotides comprising a guide strand backbone phosphoryl guanidine chiral center in the Sp configuration between the +3 nucleotide and the immediately downstream (+4) nucleotide, i.e., in the 3′ direction, comprise a 2′-O-alkyl modification of the fourth (+4) nucleotide. In certain embodiments, the ds oligonucleotides comprising a guide strand backbone phosphoryl guanidine chiral center in the Sp configuration between the +3 nucleotide and the immediately downstream (+4) nucleotide, i.e., in the 3′ direction, comprise a 2′-O-alkyl modification of the fifth (+5) nucleotide. In certain embodiments, the ds oligonucleotides comprising a guide strand backbone phosphoryl guanidine chiral center in the Sp configuration between the +3 nucleotide and the immediately downstream (+4) nucleotide, i.e., in the 3′ direction, comprise a 2′-O-alkyl modification of the sixth (+6) nucleotide. In certain embodiments, the ds oligonucleotides comprising a guide strand backbone phosphoryl guanidine chiral center in the Sp configuration between the +3 nucleotide and the immediately downstream (+4) nucleotide, i.e., in the 3′ direction, comprise a 2′-O-alkyl modification of the seventh (+7) nucleotide. In certain embodiments, the ds oligonucleotides comprising a guide strand backbone phosphoryl guanidine chiral center in the Sp configuration between the +3 nucleotide and the immediately downstream (+4) nucleotide, i.e., in the 3′ direction, comprise a 2′-O-alkyl modification of the eighth (+8) nucleotide.

[0155] In certain embodiments, the ds oligonucleotides comprising a guide strand backbone phosphoryl guanidine chiral center in the Sp configuration between the +3 nucleotide and the immediately downstream (+4) nucleotide, i.e., in the 3′ direction, comprise one or a plurality of DNA modifications. In certain embodiments, the ds oligonucleotides comprising a guide strand backbone phosphoryl guanidine chiral center in the Sp configuration between the +3 nucleotide and the immediately downstream (+4) nucleotide, i.e., in the 3′ direction, comprise a DNA modification of the 5′ terminal (+1) nucleotide, second (+2) nucleotide, third (+3) nucleotide, fourth (+4) nucleotide, fifth (+5) nucleotide, sixth (+6) nucleotide, seventh (+7) nucleotide, and/or eighth (+8) nucleotide. In certain embodiments, the ds oligonucleotides comprising a guide strand backbone phosphoryl guanidine chiral center in the Sp configuration between the +3 nucleotide and the immediately downstream (+4) nucleotide, i.e., in the 3′ direction, comprise a DNA modification of the 5′ terminal (+1) nucleotide. In certain embodiments, the ds oligonucleotides comprising a guide strand backbone phosphoryl guanidine chiral center in the Sp configuration between the +3 nucleotide and the immediately downstream (+4) nucleotide, i.e., in the 3′ direction, comprise a DNA modification of the second (+2) nucleotide. In certain embodiments, the ds oligonucleotides comprising a guide strand backbone phosphoryl guanidine chiral center in the Sp configuration between the +3 nucleotide and the immediately downstream (+4) nucleotide, i.e., in the 3′ direction, comprise a DNA modification of the third (+3) nucleotide. In certain embodiments, the ds oligonucleotides comprising a guide strand backbone phosphoryl guanidine chiral center in the Sp configuration between the +3 nucleotide and the immediately downstream (+4) nucleotide, i.e., in the 3′ direction, comprise a DNA modification of the fourth (+4) nucleotide. In certain embodiments, the ds oligonucleotides comprising a guide strand backbone phosphoryl guanidine chiral center in the Sp configuration between the +3 nucleotide and the immediately downstream (+4) nucleotide, i.e., in the 3′ direction, comprise a DNA modification of the fifth (+5) nucleotide. In certain embodiments, the ds oligonucleotides comprising a guide strand backbone phosphoryl guanidine chiral center in the Sp configuration between the +3 nucleotide and the immediately downstream (+4) nucleotide, i.e., in the 3′ direction, comprise a DNA modification of the sixth (+6) nucleotide. In certain embodiments, the ds oligonucleotides comprising a guide strand backbone phosphoryl guanidine chiral center in the Sp configuration between the +3 nucleotide and the immediately downstream (+4) nucleotide, i.e., in the 3′ direction, comprise a DNA modification of the seventh (+7) nucleotide. In certain embodiments, the ds oligonucleotides comprising a guide strand backbone phosphoryl guanidine chiral center in the Sp configuration between the +3 nucleotide and the immediately downstream (+4) nucleotide, i.e., in the 3′ direction, comprise a DNA modification of the eighth (+8) nucleotide.

[0156] In certain embodiments, the ds oligonucleotides comprising a guide strand backbone phosphoryl guanidine chiral center in the Sp configuration between the +3 nucleotide and the immediately downstream (+4) nucleotide, i.e., in the 3′ direction, comprise one or a plurality of GNA modifications. In certain embodiments, the ds oligonucleotides comprising a guide strand backbone phosphoryl guanidine chiral center in the Sp configuration between the +3 nucleotide and the immediately downstream (+4) nucleotide, i.e., in the 3′ direction, comprise a GNA modification of the 5′ terminal (+1) nucleotide, second (+2) nucleotide, third (+3) nucleotide, fourth (+4) nucleotide, fifth (+5) nucleotide, sixth (+6) nucleotide, seventh (+7) nucleotide, and/or eighth (+8) nucleotide. In certain embodiments, the ds oligonucleotides comprising a guide strand backbone phosphoryl guanidine chiral center in the Sp configuration between the +3 nucleotide and the immediately downstream (+4) nucleotide, i.e., in the 3′ direction, comprise a GNA modification of the 5′ terminal (+1) nucleotide. In certain embodiments, the ds oligonucleotides comprising a guide strand backbone phosphoryl guanidine chiral center in the Sp configuration between the +3 nucleotide and the immediately downstream (+4) nucleotide, i.e., in the 3′ direction, comprise a GNA modification of the second (+2) nucleotide. In certain embodiments, the ds oligonucleotides comprising a guide strand backbone phosphoryl guanidine chiral center in the Sp configuration between the +3 nucleotide and the immediately downstream (+4) nucleotide, i.e., in the 3′ direction, comprise a GNA modification of the third (+3) nucleotide. In certain embodiments, the ds oligonucleotides comprising a guide strand backbone phosphoryl guanidine chiral center in the Sp configuration between the +3 nucleotide and the immediately downstream (+4) nucleotide, i.e., in the 3′ direction, comprise a GNA modification of the fourth (+4) nucleotide. In certain embodiments, the ds oligonucleotides comprising a guide strand backbone phosphoryl guanidine chiral center in the Sp configuration between the +3 nucleotide and the immediately downstream (+4) nucleotide, i.e., in the 3′ direction, comprise a GNA modification of the fifth (+5) nucleotide. In certain embodiments, the ds oligonucleotides comprising a guide strand backbone phosphoryl guanidine chiral center in the Sp configuration between the +3 nucleotide and the immediately downstream (+4) nucleotide, i.e., in the 3′ direction, comprise a GNA modification of the sixth (+6) nucleotide. In certain embodiments, the ds oligonucleotides comprising a guide strand backbone phosphoryl guanidine chiral center in the Sp configuration between the +3 nucleotide and the immediately downstream (+4) nucleotide, i.e., in the 3′ direction, comprise a GNA modification of the seventh (+7) nucleotide. In certain embodiments, the ds oligonucleotides comprising a guide strand backbone phosphoryl guanidine chiral center in the Sp configuration between the +3 nucleotide and the immediately downstream (+4) nucleotide, i.e., in the 3′ direction, comprise a GNA modification of the eighth (+8) nucleotide.

[0157] In certain embodiments, the ds oligonucleotides comprising a guide strand backbone phosphoryl guanidine chiral center in the Sp configuration between the +3 nucleotide and the immediately downstream (+4) nucleotide, i.e., in the 3′ direction, comprise one or a plurality of (s)-GNA modifications. In certain embodiments, the ds oligonucleotides comprising a guide strand backbone phosphoryl guanidine chiral center in the Sp configuration between the +3 nucleotide and the immediately downstream (+4) nucleotide, i.e., in the 3′ direction, comprise a (s)-GNA modification of the 5′ terminal (+1) nucleotide, second (+2) nucleotide, third (+3) nucleotide, fourth (+4) nucleotide, fifth (+5) nucleotide, sixth (+6) nucleotide, seventh (+7) nucleotide, and/or eighth (+8) nucleotide. In certain embodiments, the ds oligonucleotides comprising a guide strand backbone phosphoryl guanidine chiral center in the Sp configuration between the +3 nucleotide and the immediately downstream (+4) nucleotide, i.e., in the 3′ direction, comprise a (s)-GNA modification of the 5′ terminal (+1) nucleotide. In certain embodiments, the ds oligonucleotides comprising a guide strand backbone phosphoryl guanidine chiral center in the Sp configuration between the +3 nucleotide and the immediately downstream (+4) nucleotide, i.e., in the 3′ direction, comprise a (s)-GNA modification of the second (+2) nucleotide. In certain embodiments, the ds oligonucleotides comprising a guide strand backbone phosphoryl guanidine chiral center in the Sp configuration between the +3 nucleotide and the immediately downstream (+4) nucleotide, i.e., in the 3′ direction, comprise a (s)-GNA modification of the third (+3) nucleotide. In certain embodiments, the ds oligonucleotides comprising a guide strand backbone phosphoryl guanidine chiral center in the Sp configuration between the +3 nucleotide and the immediately downstream (+4) nucleotide, i.e., in the 3′ direction, comprise a (s)-GNA modification of the fourth (+4) nucleotide. In certain embodiments, the ds oligonucleotides comprising a guide strand backbone phosphoryl guanidine chiral center in the Sp configuration between the +3 nucleotide and the immediately downstream (+4) nucleotide, i.e., in the 3′ direction, comprise a (s)-GNA modification of the fifth (+5) nucleotide. In certain embodiments, the ds oligonucleotides comprising a guide strand backbone phosphoryl guanidine chiral center in the Sp configuration between the +3 nucleotide and the immediately downstream (+4) nucleotide, i.e., in the 3′ direction, comprise a (s)-GNA modification of the sixth (+6) nucleotide. In certain embodiments, the ds oligonucleotides comprising a guide strand backbone phosphoryl guanidine chiral center in the Sp configuration between the +3 nucleotide and the immediately downstream (+4) nucleotide, i.e., in the 3′ direction, comprise a (s)-GNA modification of the seventh (+7) nucleotide. In certain embodiments, the ds oligonucleotides comprising a guide strand backbone phosphoryl guanidine chiral center in the Sp configuration between the +3 nucleotide and the immediately downstream (+4) nucleotide, i.e., in the 3′ direction, comprise a (s)-GNA modification of the eighth (+8) nucleotide.

[0158] In certain embodiments, the present disclosure encompasses the recognition that stereochemistry, e.g., stereochemistry of chiral centers at a 5′ terminal modification of guide strands, can unexpectedly maintain or improve properties of the ds oligonucleotides described herein. For example, but not by way of limitation, the instant disclosure relates, in part, to ds oligonucleotides comprising a guide stranding comprising one or more of: (1) a backbone phosphoryl guanidine chiral center in the Sp configuration between the +3 nucleotide and the immediately downstream (+4) nucleotide; (2) a phosphorothioate chiral center in Rp or Sp configuration; (3) an Rp, Sp, or stereorandom non-negatively charged internucleotidic linkage where the 3′ nucleotide of a nucleotide pair linked by an Rp, Sp, or stereorandom non-negatively charged internucleotidic linkage comprises a 2′ modification, e.g., a 2′ F or a 2′-OMe; (4) a modified sugar selected from a 2′-F modification, 2′-H modification, 2′-OH modification, 2′-O-alkyl modification, e.g., 2′-O-methyl (OMe) modification, 2′-methoxyethyl (MOE) modification, 5′-alkyl modification, e.g., 5′-(R)-methyl or 5′-(S)-methyl, DNA, locked nucleic acid (LNA), unlocked nucleic acid (UNA), glycol nucleic acid (GNA), or Homo-DNA; and (5) a 5′ terminal modification selected from:
[0159] (a) 5′ PO modifications, such as, but not limited to:

[chemical structure]

[0160] (b) 5′ VP modifications, such as, but not limited to:

[chemical structure]

[0161] (c) 5′ MeP modifications, such as, but not limited to:

[chemical structure]

[0162] (d) 5′ PN and 5′ Triazole-P modifications, such as, but not limited to:

[chemical structure]

Wherein Base is selected from A, C, G, T, U, abasic and modified nucleobases;
R¹ is selected from an alkyl, methyl, ethyl, isopropyl, propyl, cyclohexyl, benzyl, phenyl, tolyl, xylyl, aryl, or arene group.
R^{2′} is selected from H, OH, O-alkyl, 0-Me, F, MOE, locked nucleic acid (LNA) bridges and bridged nucleic acid (BNA) bridges to the 4′ C, such as, but not limited to:

[chemical structure]

In certain embodiments, the one or more Rp, Sp, or stereorandom non-negatively charged internucleotidic linkage incorporated into the guide strand is an Rp non-negatively charged internucleotidic linkage. In certain embodiments, the one or more Rp, Sp, or stereorandom non-negatively charged internucleotidic linkage is an Sp non-negatively charged internucleotidic linkage. In certain embodiments, the one or more Rp, Sp, or stereorandom non-negatively charged internucleotidic linkage is a stereorandom non-negatively charged internucleotidic linkage.

[0163] In certain embodiments, the guide strand comprises, a backbone phosphorothioate chiral center in Sp configuration between the 5′ terminal (+1) nucleotide and the immediately downstream, i.e., in the 3′ direction, (+2) nucleotide, and a backbone phosphorothioate chiral center in the Rp configuration between the +2 nucleotide and the immediately downstream (+3) nucleotide. In certain embodiments, the 5′ terminal modification is

[chemical structure]

In some embodiments, the 5′ terminal modification is

[chemical structure]

In certain embodiments, the 5′ terminal modification is

[chemical structure]

In certain embodiments, the guide strand comprises a 5′ terminal modification selected from, but not limited to, 5′ MeP modifications and 5′ Triazole-P modifications. In certain embodiments, the guide strand comprises the 5′ MeP modification

[chemical structure]

a backbone phosphorothioate chiral center in Sp configuration between the 5′ terminal (+1) nucleotide and the immediately downstream, i.e., in the 3′ direction, (+2) nucleotide, and a backbone phosphorothioate chiral center in the Rp configuration between the +2 nucleotide and the immediately downstream (+3) nucleotide.

[0164] In certain other embodiments, the present disclosure encompasses the recognition that stereochemistry, e.g., stereochemistry of chiral centers at the 5′ terminal nucleotide of guide strands, can unexpectedly maintain or improve properties of ds oligonucleotides wherein the guide strand of the ds oligonucleotide also comprises a phosphorothioate chiral center in Rp or Sp configuration. For example, but not by way of limitation, the instant disclosure relates, in part, to ds oligonucleotides comprising a guide stranding comprising: (1) a phosphorothioate chiral center in Rp or Sp configuration; (2) an Rp, Sp, or stereorandom non-negatively charged internucleotidic linkage where the 3′ nucleotide of a nucleotide pair linked by an Rp, Sp, or stereorandomnon-negatively charged internucleotidic linkage comprises a 2′ modification, e.g., a 2′ F or a 2′-OMe; and (3) a 5′ terminal modification selected from:
[0165] (a) 5′ PO nucleotides, such as, but not limited to:

[chemical structure]

[0166] (b) 5′ VP nucleotides, such as, but not limited to:

[chemical structure]

[0167] (c) 5′ MeP nucleotides, such as, but not limited to:

[chemical structure]

[0168] (d) 5′ PN and 5′ Triazole-P nucleotides, such as, but not limited to:

[chemical structure]

[chemical structure]

[0169] (e) 5′ abasic VP and 5′ abasic MeP nucleotides, such as, but not limited to.

[chemical structure]

In certain embodiments, the one or more Rp, Sp, or stereorandom non-negatively charged internucleotidic linkage incorporated into the guide strand is an Rp non-negatively charged internucleotidic linkage. In certain embodiments, the one or more Rp, Sp, or stereorandom non-negatively charged internucleotidic linkage is an Sp non-negatively charged internucleotidic linkage. In certain embodiments, the one or more Rp, Sp, or stereorandom non-negatively charged internucleotidic linkage is a stereorandom non-negatively charged internucleotidic linkage.

[0170] In certain other embodiments, the present disclosure encompasses the recognition that stereochemistry, e.g., stereochemistry of chiral centers at the 5′ terminal nucleotide of guide strands, can unexpectedly maintain or improve properties of ds oligonucleotides wherein the guide strand of the ds oligonucleotide also comprises a phosphorothioate chiral center in Rp or Sp configuration. For example, but not by way of limitation, the instant disclosure relates, in part, to ds oligonucleotides comprising a guide stranding comprising: (1) a backbone phosphoryl guanidine chiral center in the Sp configuration between the +3 nucleotide and the immediately downstream (+4) nucleotide; (2) a backbone phosphoryl guanidine chiral center in the Rp configuration between the +7 nucleotide and the immediately downstream (+8) nucleotide; (3) a phosphorothioate chiral center in Rp or Sp configuration; and (4) a protected phosphonate selected from:

[chemical structure]

In certain embodiments, the one or more Rp, Sp, or stereorandom non-negatively charged internucleotidic linkage incorporated into the guide strand is an Rp non-negatively charged internucleotidic linkage. In certain embodiments, the one or more Rp, Sp, or stereorandom non-negatively charged internucleotidic linkage is an Sp non-negatively charged internucleotidic linkage. In certain embodiments, the one or more Rp, Sp, or stereorandom non-negatively charged internucleotidic linkage is a stereorandom non-negatively charged internucleotidic linkage.

[0171] In certain embodiments, the present disclosure encompasses the recognition that non-naturally occurring internucleotidic linkages, e.g., neutral internucleotidic linkages, can, in certain embodiments, be used to link one or more molecules to the double-stranded oligonucleotides described herein. In certain embodiments, such linked molecules can facilitate targeting and/or delivery of the double-stranded oligonucleotide. For example, but not limitation, such linked molecules an include lipophilic molecules. In certain embodiments, the linked molecule is a molecule comprising one or more GalNAc moieties. In certain embodiments, the linked molecule is a receptor. In certain embodiments, the linked molecule is a receptor ligand.

[0172] In certain embodiments, the present disclosure provides technologies for incorporating various additional chemical moieties into ds oligonucleotides. In certain embodiments, the present disclosure provides, for example, reagents and methods for introducing additional chemical moieties through nucleobases (e.g., by covalent linkage, optionally via a linker, to a site on a nucleobase).

[0173] In certain embodiments, the present disclosure provides technologies, e.g., ds oligonucleotide compositions and methods thereof, that achieve allele-specific suppression, wherein transcripts from one allele of a particular target gene is selectively knocked down relative to at least one other allele of the same gene.

[0174] Among other things, the present disclosure provides structural elements, technologies and/or features that can be incorporated into ds oligonucleotides and can impart or tune one or more properties thereof (e.g., relative to an otherwise identical ds oligonucleotide lacking the relevant technology or feature). In certain embodiments, the present disclosure documents that one or more provided technologies and/or features can usefully be incorporated into ds oligonucleotides of various sequences.

[0175] In certain embodiments, the present disclosure demonstrates that certain provided structural elements, technologies and/or features are particularly useful for ds oligonucleotides that participate in and/or direct RNAi mechanisms (e.g., RNAi agents). Regardless, however, the teachings of the present disclosure are not limited to ds oligonucleotides that participate in or operate via any particular mechanism. In certain embodiments, the present disclosure pertains to any ds oligonucleotide, useful for any purpose, which operates through any mechanism, and which comprises any sequence, structure or format (or portion thereof) described herein. In certain embodiments, the present disclosure provides a ds oligonucleotide, useful for any purpose, which operates through any mechanism, and which comprises any sequence, structure or format (or portion thereof) described herein, comprising a guide strand comprising backbone phosphoryl guanidine chiral centers in Sp configuration.

[0176] In certain embodiments, the guide strand comprises a backbone phosphoryl guanidine chiral center in the Sp configuration between the +3 nucleotide and the immediately downstream (+4) nucleotide, i.e., in the 3′ direction.

[0177] In certain embodiments, the ds oligonucleotides comprising a guide strand backbone phosphoryl guanidine chiral center in the Sp configuration between the +3 nucleotide and the immediately downstream (+4) nucleotide, i.e., in the 3′ direction, further comprise a phosphoryl guanidine chiral center in the Sp configuration between the +7 and the immediately downstream (+8) nucleotide, between the +10 nucleotide and the immediately downstream (+11) nucleotide, between the +18 nucleotide and the immediately downstream (+19) nucleotide, or combinations thereof.

[0178] In certain embodiments, the ds oligonucleotides comprising a guide strand backbone phosphoryl guanidine chiral center in the Sp configuration between the +3 nucleotide and the immediately downstream (+4) nucleotide, i.e., in the 3′ direction, further comprise one or a plurality of modified sugars. In certain embodiments, the ds oligonucleotides comprising a guide strand backbone phosphoryl guanidine chiral center in the Sp configuration between the +3 nucleotide and the immediately downstream (+4) nucleotide, i.e., in the 3′ direction, comprise a modified sugar at the 5′ terminal (+1) nucleotide, second (+2) nucleotide, third (+3) nucleotide, fourth (+4) nucleotide, fifth (+5) nucleotide, seventh (+7) nucleotide, eighth (+8) nucleotide, ninth (+9) nucleotide, tenth (+10) nucleotide, twelfth (+12) nucleotide, sixteenth (+16) nucleotide, seventeenth (+17) nucleotide, eighteenth (+18) nucleotide, nineteenth (+19) nucleotide, twentieth (+20) nucleotide, twenty-first (+21) nucleotide, twenty-second (+22), and/or twenty-third (+23), the 3′ terminal, nucleotide. In certain embodiments, the ds oligonucleotides comprising a guide strand backbone phosphoryl guanidine chiral center in the Sp configuration between the +3 nucleotide and the immediately downstream (+4) nucleotide, i.e., in the 3′ direction, comprise a modified sugar at the 5′ terminal (+1) nucleotide. In certain embodiments, the ds oligonucleotides comprising a guide strand backbone phosphoryl guanidine chiral center in the Sp configuration between the +3 nucleotide and the immediately downstream (+4) nucleotide, i.e., in the 3′ direction, comprise a modified at the second (+2) nucleotide. In certain embodiments, the ds oligonucleotides comprising a guide strand backbone phosphoryl guanidine chiral center in the Sp configuration between the +3 nucleotide and the immediately downstream (+4) nucleotide, i.e., in the 3′ direction, comprise a modified sugar at the third (+3) nucleotide. In certain embodiments, the ds oligonucleotides comprising a guide strand backbone phosphoryl guanidine chiral center in the Sp configuration between the +3 nucleotide and the immediately downstream (+4) nucleotide, i.e., in the 3′ direction, comprise a modified sugar at the fourth (+4) nucleotide. In certain embodiments, the ds oligonucleotides comprising a guide strand backbone phosphoryl guanidine chiral center in the Sp configuration between the +3 nucleotide and the immediately downstream (+4) nucleotide, i.e., in the 3′ direction, comprise a modified sugar at the fifth (+5) nucleotide. In certain embodiments, the ds oligonucleotides comprising a guide strand backbone phosphoryl guanidine chiral center in the Sp configuration between the +3 nucleotide and the immediately downstream (+4) nucleotide, i.e., in the 3′ direction, comprise a modified sugar of the sixth (+6) nucleotide. In certain embodiments, the ds oligonucleotides comprising a guide strand backbone phosphoryl guanidine chiral center in the Sp configuration between the +3 nucleotide and the immediately downstream (+4) nucleotide, i.e., in the 3′ direction, comprise a modified sugar of the seventh (+7) nucleotide. In certain embodiments, the ds oligonucleotides comprising a guide strand backbone phosphoryl guanidine chiral center in the Sp configuration between the +3 nucleotide and the immediately downstream (+4) nucleotide, i.e., in the 3′ direction, comprise a modified sugar of the eighth (+8) nucleotide. In certain embodiments, the ds oligonucleotides comprising a guide strand backbone phosphoryl guanidine chiral center in the Sp configuration between the +3 nucleotide and the immediately downstream (+4) nucleotide, i.e., in the 3′ direction, comprise a modified sugar of the ninth (+9) nucleotide. In certain embodiments, the ds oligonucleotides comprising a guide strand backbone phosphoryl guanidine chiral center in the Sp configuration between the +3 nucleotide and the immediately downstream (+4) nucleotide, i.e., in the 3′ direction, comprise a modified sugar of the tenth (+10) nucleotide. In certain embodiments, the ds oligonucleotides comprising a guide strand backbone phosphoryl guanidine chiral center in the Sp configuration between the +3 nucleotide and the immediately downstream (+4) nucleotide, i.e., in the 3′ direction, comprise a modified sugar of the twelfth (+12) nucleotide. In certain embodiments, the ds oligonucleotides comprising a guide strand backbone phosphoryl guanidine chiral center in the Sp configuration between the +3 nucleotide and the immediately downstream (+4) nucleotide, i.e., in the 3′ direction, comprise a modified sugar of the sixteenth (+16) nucleotide. In certain embodiments, the ds oligonucleotides comprising a guide strand backbone phosphoryl guanidine chiral center in the Sp configuration between the +3 nucleotide and the immediately downstream (+4) nucleotide, i.e., in the 3′ direction, comprise a modified sugar of the seventeenth (+17) nucleotide. In certain embodiments, the ds oligonucleotides comprising a guide strand backbone phosphoryl guanidine chiral center in the Sp configuration between the +3 nucleotide and the immediately downstream (+4) nucleotide, i.e., in the 3′ direction, comprise a modified sugar of the eighteenth (+18) nucleotide. In certain embodiments, the ds oligonucleotides comprising a guide strand backbone phosphoryl guanidine chiral center in the Sp configuration between the +3 nucleotide and the immediately downstream (+4) nucleotide, i.e., in the 3′ direction, comprise a modified sugar of the nineteenth (+19) nucleotide. In certain embodiments, the ds oligonucleotides comprising a guide strand backbone phosphoryl guanidine chiral center in the Sp configuration between the +3 nucleotide and the immediately downstream (+4) nucleotide, i.e., in the 3′ direction, comprise a modified sugar of the twentieth (+20) nucleotide. In certain embodiments, the ds oligonucleotides comprising a guide strand backbone phosphoryl guanidine chiral center in the Sp configuration between the +3 nucleotide and the immediately downstream (+4) nucleotide, i.e., in the 3′ direction, comprise a modified sugar of the twenty-first (+21) nucleotide. In certain embodiments, the ds oligonucleotides comprising a guide strand backbone phosphoryl guanidine chiral center in the Sp configuration between the +3 nucleotide and the immediately downstream (+4) nucleotide, i.e., in the 3′ direction, comprise a modified sugar of the twenty-second (+22) nucleotide. In certain embodiments, the ds oligonucleotides comprising a guide strand backbone phosphoryl guanidine chiral center in the Sp configuration between the +3 nucleotide and the immediately downstream (+4) nucleotide, i.e., in the 3′ direction, comprise a modified sugar of the twenty-third (+23), the 3′ terminal, nucleotide. In certain embodiments, the modified sugar comprises a 2′-F modification, 2′-H modification, 2′-OH modification, 2′-O-alkyl modification, e.g., 2′-O-methyl (OMe) modification, 2′-O—C16 lipid modification, 2′-methoxyethyl (MOE) modification, 5′-alkyl modification, e.g., 5′-(R)-methyl or 5′-(S)-methyl, DNA, locked nucleic acid (LNA), unlocked nucleic acid (UNA), glycol nucleic acid (GNA), or Homo-DNA.

[0179] In certain embodiments, the ds oligonucleotides comprising a guide strand backbone phosphoryl guanidine chiral center in the Sp configuration between the +3 nucleotide and the immediately downstream (+4) nucleotide, i.e., in the 3′ direction, comprise a 2′-F modification of the 5′ terminal (+1) nucleotide, second (+2) nucleotide, third (+3) nucleotide, fourth (+4) nucleotide, fifth (+5) nucleotide, and/or sixth (+6) nucleotide. In certain embodiments, the ds oligonucleotides comprising a guide strand backbone phosphoryl guanidine chiral center in the Sp configuration between the +3 nucleotide and the immediately downstream (+4) nucleotide, i.e., in the 3′ direction, comprise a 2′-F modification of the 5′ terminal (+1) nucleotide. In certain embodiments, the ds oligonucleotides comprising a guide strand backbone phosphoryl guanidine chiral center in the Sp configuration between the +3 nucleotide and the immediately downstream (+4) nucleotide, i.e., in the 3′ direction, comprise a 2′-F modification of the second (+2) nucleotide. In certain embodiments, the ds oligonucleotides comprising a guide strand backbone phosphoryl guanidine chiral center in the Sp configuration between the +3 nucleotide and the immediately downstream (+4) nucleotide, i.e., in the 3′ direction, comprise a 2′-F modification of the third (+3) nucleotide. In certain embodiments, the ds oligonucleotides comprising a guide strand backbone phosphoryl guanidine chiral center in the Sp configuration between the +3 nucleotide and the immediately downstream (+4) nucleotide, i.e., in the 3′ direction, comprise a 2′-F modification of the fourth (+4) nucleotide. In certain embodiments, the ds oligonucleotides comprising a guide strand backbone phosphoryl guanidine chiral center in the Sp configuration between the +3 nucleotide and the immediately downstream (+4) nucleotide, i.e., in the 3′ direction, comprise a 2′-F modification of the fifth (+5) nucleotide. In certain embodiments, the ds oligonucleotides comprising a guide strand backbone phosphoryl guanidine chiral center in the Sp configuration between the +3 nucleotide and the immediately downstream (+4) nucleotide, i.e., in the 3′ direction, comprise a 2′-F modification of the sixth (+6) nucleotide.

[0180] In certain embodiments, the present disclosure provides a ds oligonucleotide, useful for any purpose, which operates through any mechanism, and which comprises comprising a guide strand backbone phosphoryl guanidine chiral center in the Sp configuration between the +3 nucleotide and the immediately downstream (+4) nucleotide, i.e., in the 3′ direction, which further comprises:
[0181] (1) a guide strand comprising backbone phosphorothioate chiral centers in Sp configuration between the 3′ terminal nucleotide and the penultimate (N-1) nucleotide and as between the penultimate (N-1) nucleotide and the immediately upstream, i.e., in the 5′ direction, (N-2) nucleotide;
[0182] (2) a guide strand comprising backbone phosphorothioate chiral centers in Rp, Sp, or alternating configurations between the 5′ terminal (+1) nucleotide and the immediately downstream, i.e., in the 3′ direction, (+2) nucleotide and between the +2 nucleotide and the immediately downstream (+3) nucleotide;
[0183] (3) a guide strand comprising one or more backbone phosphorothioate chiral centers upstream, i.e., in the 5′ direction, relative to backbone phosphorothioate chiral centers in Sp configuration between the 3′ terminal nucleotide and the penultimate (N-1) nucleotide and as between the penultimate (N-1) nucleotide and the immediately upstream (N-2) nucleotide, where the upstream backbone phosphorothioate chiral centers are in Rp or Sp configuration;
[0184] (4) a guide strand comprising one or more backbone phosphorothioate chiral centers in Rp or Sp configuration between the 5′ terminal (+1) nucleotide and the immediately downstream (+2) nucleotide; and between the +2 nucleotide and the immediately downstream (+3) nucleotide;
[0185] (5) a guide strand comprising one or more backbone phosphorothioate chiral centers in Rp or Sp configuration where linkage occurs between any two adjacent nucleotides between the penultimate 3′ nucleotide of the guide strand, where N is the 3′ terminal nucleotide, and the upstream N-10 nucleotide;
[0186] (6) a guide strand comprising one or more backbone phosphoryl guanidine chiral centers in the Sp configuration between the +7 and the immediately downstream (+8), i.e., in the 3′ direction.
[0187] (7) a guide strand comprising a 5′ terminal modification;
[0188] (8) a passenger strand in combination with one or more of the aforementioned guide strands, comprising one or more backbone chiral centers in Rp or Sp configuration;
[0189] (9) a passenger strand in combination with one or more of the aforementioned guide strands, comprising one or more backbone phosphoryl guanidine chiral centers in the Rp configuration between the +7 nucleotide and the immediately downstream (+8) nucleotide, i.e., in the 3′ direction;
[0190] (10) a passenger strand in combination with one or more of the aforementioned guide strands, comprising one or more backbone phosphoryl guanidine chiral centers in the Rp configuration between the +15 nucleotide and the immediately downstream (+16) nucleotide, i.e., in the 3′ direction; and
[0191] (11) a passenger strand in combination with one or more of the aforementioned guide strands, comprising backbone phosphorothioate chiral centers in the Sp configuration between the 5′ terminal (+1) nucleotide and the immediately downstream, i.e., in the 3′ direction, (+2) nucleotide and between the 3′ terminal nucleotide and the penultimate (N-1) nucleotide;
   wherein the ds oligonucleotide further comprises one or more of:
[0192] (1) a guide strand where one or both of the 5′ and 3′ terminal dinucleotides are not linked by non-negatively charged internucleotidic linkages, i.e., the guide strand comprises one more Rp, Sp, or stereorandom non-negatively charged internucleotidic linkages downstream, i.e., in the 3′ direction, relative to the linkage between the 5′ terminal dinucleotide and/or upstream, i.e., in the 5′ direction, relative to the linkage between the 3′ terminal dinucleotide;
[0193] (2) a guide strand where one or more Rp, Sp, or stereorandom non-negatively charged internucleotidic linkage occurs between any two adjacent nucleotides between the second (+2) nucleotide relative to the 5′ terminal nucleotide of the guide strand and the penultimate 3′ (N-1) nucleotide of the guide strand, where N is the 3′ terminal nucleotide;
[0194] (3) a guide strand where an Rp, Sp, or stereorandom non-negatively charged internucleotidic linkage occurs between the tenth (+10) and eleventh (+11) nucleotides, relative to the 5′ terminal nucleotide;
[0195] (4) a guide strand where an Rp, Sp, or stereorandom non-negatively charged internucleotidic linkage occurs between the seventh (+7) and eighth (+8) nucleotides, relative to the 5′ terminal nucleotide;
[0196] (5) a guide strand comprising one or more backbone phosphorothioate chiral centers in Rp or Sp configuration where linkage occurs between any two adjacent nucleotides between the penultimate 3′ nucleotide of the guide strand, where N is the 3′ terminal nucleotide, and the upstream N-10 nucleotide;
[0197] (6) a passenger strand where one or more Rp, Sp, or stereorandom non-negatively charged internucleotidic linkage occurs upstream, i.e., in the 5′ direction, relative to the central nucleotide of the passenger strand;
[0198] (7) a passenger strand where one or more Rp, Sp, or stereorandom non-negatively charged internucleotidic linkage occurs downstream, i.e., in the 3′ direction, relative to the central nucleotide of the passenger strand;
[0199] (8) a passenger strand where one or more backbone phosphorothioate chiral centers in Rp or Sp configuration internucleotidic linkage occurs upstream, i.e., in the 5′ direction, relative to the central nucleotide of the passenger strand;
[0200] (9) a passenger strand where one or more backbone phosphorothioate chiral centers in Rp or Sp configuration internucleotidic linkage internucleotidic linkage occurs downstream, i.e., in the 3′ direction, relative to the central nucleotide of the passenger strand; and
[0201] (10) a passenger strand comprising one or more modified sugars, e.g. Homo-DNA, between the 5′ terminal (+1) nucleotide and the penultimate (N-1) nucleotide.

[0202] In certain embodiments, the ds oligonucleotides comprising a guide strand backbone phosphoryl guanidine chiral center in the Sp configuration between the +3 nucleotide and the immediately downstream (+4) nucleotide, i.e., in the 3′ direction, comprise a Homo-DNA modification of the 5′ terminal (+1) nucleotide, sixth (+6) nucleotide, ninth (+9) nucleotide, tenth (+10) nucleotide, twelfth (+12) nucleotide, sixteenth (+16) nucleotide, seventeenth (+17) nucleotide, eighteenth (+18) nucleotide, nineteenth (+19) nucleotide, twentieth (+20) nucleotide, twenty-first (+21) nucleotide, twenty-second (+22), and/or twenty-third (+23), the 3′ terminal, nucleotide. In certain embodiments, the ds oligonucleotides comprising a guide strand backbone phosphoryl guanidine chiral center in the Sp configuration between the +3 nucleotide and the immediately downstream (+4) nucleotide, i.e., in the 3′ direction, comprise a Homo-DNA modification of the 5′ terminal (+1) nucleotide. In certain embodiments, the ds oligonucleotides comprising a guide strand backbone phosphoryl guanidine chiral center in the Sp configuration between the +3 nucleotide and the immediately downstream (+4) nucleotide, i.e., in the 3′ direction, comprise a Homo-DNA modification of the sixth (+6) nucleotide. In certain embodiments, the ds oligonucleotides comprising a guide strand backbone phosphoryl guanidine chiral center in the Sp configuration between the +3 nucleotide and the immediately downstream (+4) nucleotide, i.e., in the 3′ direction, comprise a Homo-DNA modification of the ninth (+9) nucleotide. In certain embodiments, the ds oligonucleotides comprising a guide strand backbone phosphoryl guanidine chiral center in the Sp configuration between the +3 nucleotide and the immediately downstream (+4) nucleotide, i.e., in the 3′ direction, comprise a Homo-DNA modification of the tenth (+10) nucleotide. In certain embodiments, the ds oligonucleotides comprising a guide strand backbone phosphoryl guanidine chiral center in the Sp configuration between the +3 nucleotide and the immediately downstream (+4) nucleotide, i.e., in the 3′ direction, comprise a Homo-DNA modification of the twelfth (+12) nucleotide. In certain embodiments, the ds oligonucleotides comprising a guide strand backbone phosphoryl guanidine chiral center in the Sp configuration between the +3 nucleotide and the immediately downstream (+4) nucleotide, i.e., in the 3′ direction, comprise a Homo-DNA modification of the sixteenth (+16) nucleotide. In certain embodiments, the ds oligonucleotides comprising a guide strand backbone phosphoryl guanidine chiral center in the Sp configuration between the +3 nucleotide and the immediately downstream (+4) nucleotide, i.e., in the 3′ direction, comprise a Homo-DNA modification of the seventeenth (+17) nucleotide. In certain embodiments, the ds oligonucleotides comprising a guide strand backbone phosphoryl guanidine chiral center in the Sp configuration between the +3 nucleotide and the immediately downstream (+4) nucleotide, i.e., in the 3′ direction, comprise a Homo-DNA modification of the eighteenth (+18) nucleotide. In certain embodiments, the ds oligonucleotides comprising a guide strand backbone phosphoryl guanidine chiral center in the Sp configuration between the +3 nucleotide and the immediately downstream (+4) nucleotide, i.e., in the 3′ direction, comprise a Homo-DNA modification of the nineteenth (+19) nucleotide. In certain embodiments, the ds oligonucleotides comprising a guide strand backbone phosphoryl guanidine chiral center in the Sp configuration between the +3 nucleotide and the immediately downstream (+4) nucleotide, i.e., in the 3′ direction, comprise a Homo-DNA modification of the twentieth (+20) nucleotide. In certain embodiments, the ds oligonucleotides comprising a guide strand backbone phosphoryl guanidine chiral center in the Sp configuration between the +3 nucleotide and the immediately downstream (+4) nucleotide, i.e., in the 3′ direction, comprise a Homo-DNA modification of the twenty-first (+21) nucleotide. In certain embodiments, the ds oligonucleotides comprising a guide strand backbone phosphoryl guanidine chiral center in the Sp configuration between the +3 nucleotide and the immediately downstream (+4) nucleotide, i.e., in the 3′ direction, comprise a Homo-DNA modification of the twenty-second (+22) nucleotide. In certain embodiments, the ds oligonucleotides comprising a guide strand backbone phosphoryl guanidine chiral center in the Sp configuration between the +3 nucleotide and the immediately downstream (+4) nucleotide, i.e., in the 3′ direction, comprise a Homo-DNA modification of the twenty-third (+23), the 3′ terminal, nucleotide

[0203] In certain embodiments, the present disclosure provides a ds oligonucleotide, useful for any purpose, which operates through any mechanism, and which comprises comprising a guide strand backbone phosphoryl guanidine chiral center in the Sp configuration between the +3 nucleotide and the immediately downstream (+4) nucleotide, i.e., in the 3′ direction, which further comprises:
[0204] (1) a guide strand comprising backbone phosphorothioate chiral centers in Sp configuration between the 3′ terminal nucleotide and the penultimate (N-1) nucleotide and as between the penultimate (N-1) nucleotide and the immediately upstream, i.e., in the 5′ direction, (N-2) nucleotide;
[0205] (2) a guide strand comprising backbone phosphorothioate chiral centers in Rp, Sp, or alternating configurations between the 5′ terminal (+1) nucleotide and the immediately downstream, i.e., in the 3′ direction, (+2) nucleotide and between the +2 nucleotide and the immediately downstream (+3) nucleotide;
[0206] (3) a guide strand comprising one or more backbone phosphorothioate chiral centers upstream, i.e., in the 5′ direction, relative to backbone phosphorothioate chiral centers in Sp configuration between the 3′ terminal nucleotide and the penultimate (N-1) nucleotide and as between the penultimate (N-1) nucleotide and the immediately upstream (N-2) nucleotide, where the upstream backbone phosphorothioate chiral centers are in Rp or Sp configuration;
[0207] (4) a guide strand comprising one or more backbone phosphorothioate chiral centers in Rp or Sp configuration between the 5′ terminal (+1) nucleotide and the immediately downstream (+2) nucleotide; and between the +2 nucleotide and the immediately downstream (+3) nucleotide;
[0208] (5) a guide strand comprising one or more backbone phosphorothioate chiral centers in Rp or Sp configuration where linkage occurs between any two adjacent nucleotides between the penultimate 3′ nucleotide of the guide strand, where N is the 3′ terminal nucleotide, and the upstream N-10 nucleotide;
[0209] (6) a guide strand comprising one or more backbone phosphoryl guanidine chiral centers in the Sp configuration between the +7 and the immediately downstream (+8), i.e., in the 3′ direction.
[0210] (7) a guide strand comprising a 5′ terminal modification;
[0211] (8) a passenger strand in combination with one or more of the aforementioned guide strands, comprising one or more backbone chiral centers in Rp or Sp configuration;
[0212] (9) a passenger strand in combination with one or more of the aforementioned guide strands, comprising one or more backbone phosphoryl guanidine chiral centers in the Rp configuration between the +7 nucleotide and the immediately downstream (+8) nucleotide, i.e., in the 3′ direction;
[0213] (10) a passenger strand in combination with one or more of the aforementioned guide strands, comprising one or more backbone phosphoryl guanidine chiral centers in the Rp configuration between the +15 nucleotide and the immediately downstream (+16) nucleotide, i.e., in the 3′ direction; and
[0214] (11) a passenger strand in combination with one or more of the aforementioned guide strands, comprising backbone phosphorothioate chiral centers in the Sp configuration between the 5′ terminal (+1) nucleotide and the immediately downstream, i.e., in the 3′ direction, (+2) nucleotide and between the 3′ terminal nucleotide and the penultimate (N-1) nucleotide;
   wherein the ds oligonucleotide further comprises one or more of:
[0215] (1) a guide strand where one or both of the 5′ and 3′ terminal dinucleotides are not linked by non-negatively charged internucleotidic linkages, i.e., the guide strand comprises one more Rp, Sp, or stereorandom non-negatively charged internucleotidic linkages downstream, i.e., in the 3′ direction, relative to the linkage between the 5′ terminal dinucleotide and/or upstream, i.e., in the 5′ direction, relative to the linkage between the 3′ terminal dinucleotide;
[0216] (2) a guide strand where one or more Rp, Sp, or stereorandom non-negatively charged internucleotidic linkage occurs between any two adjacent nucleotides between the second (+2) nucleotide relative to the 5′ terminal nucleotide of the guide strand and the penultimate 3′ (N-1) nucleotide of the guide strand, where N is the 3′ terminal nucleotide;
[0217] (3) a guide strand where an Rp, Sp, or stereorandom non-negatively charged internucleotidic linkage occurs between the tenth (+10) and eleventh (+11) nucleotides, relative to the 5′ terminal nucleotide;
[0218] (4) a guide strand where an Rp, Sp, or stereorandom non-negatively charged internucleotidic linkage occurs between the seventh (+7) and eighth (+8) nucleotides, relative to the 5′ terminal nucleotide;
[0219] (5) a guide strand comprising one or more backbone phosphorothioate chiral centers in Rp or Sp configuration where linkage occurs between any two adjacent nucleotides between the penultimate 3′ nucleotide of the guide strand, where N is the 3′ terminal nucleotide, and the upstream N-10 nucleotide;
[0220] (6) a passenger strand where one or more Rp, Sp, or stereorandom non-negatively charged internucleotidic linkage occurs upstream, i.e., in the 5′ direction, relative to the central nucleotide of the passenger strand;
[0221] (7) a passenger strand where one or more Rp, Sp, or stereorandom non-negatively charged internucleotidic linkage occurs downstream, i.e., in the 3′ direction, relative to the central nucleotide of the passenger strand;
[0222] (8) a passenger strand where one or more backbone phosphorothioate chiral centers in Rp or Sp configuration internucleotidic linkage occurs upstream, i.e., in the 5′ direction, relative to the central nucleotide of the passenger strand;
[0223] (9) a passenger strand where one or more backbone phosphorothioate chiral centers in Rp or Sp configuration internucleotidic linkage internucleotidic linkage occurs downstream, i.e., in the 3′ direction, relative to the central nucleotide of the passenger strand; and
[0224] (10) a passenger strand comprising one or more modified sugars, e.g. Homo-DNA, between the 5′ terminal (+1) nucleotide and the penultimate (N-1) nucleotide.

[0225] In certain embodiments, the ds oligonucleotides comprising a guide strand backbone phosphoryl guanidine chiral center in the Sp configuration between the +3 nucleotide and the immediately downstream (+4) nucleotide, i.e., in the 3′ direction, comprise a LNA modification of the 5′ terminal (+1) nucleotide, second (+2) nucleotide, third (+3) nucleotide, fourth (+4) nucleotide, fifth (+5) nucleotide, sixth (+6) nucleotide, seventh (+7) nucleotide, and/or eighth (+8) nucleotide. In certain embodiments, the ds oligonucleotides comprising a guide strand backbone phosphoryl guanidine chiral center in the Sp configuration between the +3 nucleotide and the immediately downstream (+4) nucleotide, i.e., in the 3′ direction, comprise a LNA modification of the 5′ terminal (+1) nucleotide. In certain embodiments, the ds oligonucleotides comprising a guide strand backbone phosphoryl guanidine chiral center in the Sp configuration between the +3 nucleotide and the immediately downstream (+4) nucleotide, i.e., in the 3′ direction, comprise a LNA modification of the second (+2) nucleotide. In certain embodiments, the ds oligonucleotides comprising a guide strand backbone phosphoryl guanidine chiral center in the Sp configuration between the +3 nucleotide and the immediately downstream (+4) nucleotide, i.e., in the 3′ direction, comprise a LNA modification of the third (+3) nucleotide. In certain embodiments, the ds oligonucleotides comprising a guide strand backbone phosphoryl guanidine chiral center in the Sp configuration between the +3 nucleotide and the immediately downstream (+4) nucleotide, i.e., in the 3′ direction, comprise a LNA modification of the fourth (+4) nucleotide. In certain embodiments, the ds oligonucleotides comprising a guide strand backbone phosphoryl guanidine chiral center in the Sp configuration between the +3 nucleotide and the immediately downstream (+4) nucleotide, i.e., in the 3′ direction, comprise a LNA modification of the fifth (+5) nucleotide. In certain embodiments, the ds oligonucleotides comprising a guide strand backbone phosphoryl guanidine chiral center in the Sp configuration between the +3 nucleotide and the immediately downstream (+4) nucleotide, i.e., in the 3′ direction, comprise a LNA modification of the sixth (+6) nucleotide. In certain embodiments, the ds oligonucleotides comprising a guide strand backbone phosphoryl guanidine chiral center in the Sp configuration between the +3 nucleotide and the immediately downstream (+4) nucleotide, i.e., in the 3′ direction, comprise a LNA modification of the seventh (+7) nucleotide. In certain embodiments, the ds oligonucleotides comprising a guide strand backbone phosphoryl guanidine chiral center in the Sp configuration between the +3 nucleotide and the immediately downstream (+4) nucleotide, i.e., in the 3′ direction, comprise a LNA modification of the eighth (+8) nucleotide. In certain embodiments, the ds oligonucleotides comprising a guide strand backbone phosphoryl guanidine chiral center in the Sp configuration between the +3 nucleotide and the immediately downstream (+4) nucleotide, i.e., in the 3′ direction, comprise a 2′-O-alkyl modification of the 5′ terminal (+1) nucleotide, second (+2) nucleotide, third (+3) nucleotide, fourth (+4) nucleotide, fifth (+5) nucleotide, sixth (+6) nucleotide, seventh (+7) nucleotide, and/or eighth (+8) nucleotide. In certain embodiments, the ds oligonucleotides comprising a guide strand backbone phosphoryl guanidine chiral center in the Sp configuration between the +3 nucleotide and the immediately downstream (+4) nucleotide, i.e., in the 3′ direction, comprise a 2′-O-alkyl modification of the 5′ terminal (+1) nucleotide. In certain embodiments, the ds oligonucleotides comprising a guide strand backbone phosphoryl guanidine chiral center in the Sp configuration between the +3 nucleotide and the immediately downstream (+4) nucleotide, i.e., in the 3′ direction, comprise a 2′-O-alkyl modification of the second (+2) nucleotide. In certain embodiments, the ds oligonucleotides comprising a guide strand backbone phosphoryl guanidine chiral center in the Sp configuration between the +3 nucleotide and the immediately downstream (+4) nucleotide, i.e., in the 3′ direction, comprise a 2′-O-alkyl modification of the third (+3) nucleotide. In certain embodiments, the ds oligonucleotides comprising a guide strand backbone phosphoryl guanidine chiral center in the Sp configuration between the +3 nucleotide and the immediately downstream (+4) nucleotide, i.e., in the 3′ direction, comprise a 2′-O-alkyl modification of the fourth (+4) nucleotide. In certain embodiments, the ds oligonucleotides comprising a guide strand backbone phosphoryl guanidine chiral center in the Sp configuration between the +3 nucleotide and the immediately downstream (+4) nucleotide, i.e., in the 3′ direction, comprise a 2′-O-alkyl modification of the fifth (+5) nucleotide. In certain embodiments, the ds oligonucleotides comprising a guide strand backbone phosphoryl guanidine chiral center in the Sp configuration between the +3 nucleotide and the immediately downstream (+4) nucleotide, i.e., in the 3′ direction, comprise a 2′-O-alkyl modification of the sixth (+6) nucleotide. In certain embodiments, the ds oligonucleotides comprising a guide strand backbone phosphoryl guanidine chiral center in the Sp configuration between the +3 nucleotide and the immediately downstream (+4) nucleotide, i.e., in the 3′ direction, comprise a 2′-O-alkyl modification of the seventh (+7) nucleotide. In certain embodiments, the ds oligonucleotides comprising a guide strand backbone phosphoryl guanidine chiral center in the Sp configuration between the +3 nucleotide and the immediately downstream (+4) nucleotide, i.e., in the 3′ direction, comprise a 2′-O-alkyl modification of the eighth (+8) nucleotide.

[0226] In certain embodiments, the present disclosure provides a ds oligonucleotide, useful for any purpose, which operates through any mechanism, and which comprises comprising a guide strand backbone phosphoryl guanidine chiral center in the Sp configuration between the +3 nucleotide and the immediately downstream (+4) nucleotide, i.e., in the 3′ direction, which further comprises:
[0227] (1) a guide strand comprising backbone phosphorothioate chiral centers in Sp configuration between the 3′ terminal nucleotide and the penultimate (N-1) nucleotide and as between the penultimate (N-1) nucleotide and the immediately upstream, i.e., in the 5′ direction, (N-2) nucleotide;
[0228] (2) a guide strand comprising backbone phosphorothioate chiral centers in Rp, Sp, or alternating configurations between the 5′ terminal (+1) nucleotide and the immediately downstream, i.e., in the 3′ direction, (+2) nucleotide and between the +2 nucleotide and the immediately downstream (+3) nucleotide;
[0229] (3) a guide strand comprising one or more backbone phosphorothioate chiral centers upstream, i.e., in the 5′ direction, relative to backbone phosphorothioate chiral centers in Sp configuration between the 3′ terminal nucleotide and the penultimate (N-1) nucleotide and as between the penultimate (N-1) nucleotide and the immediately upstream (N-2) nucleotide, where the upstream backbone phosphorothioate chiral centers are in Rp or Sp configuration;
[0230] (4) a guide strand comprising one or more backbone phosphorothioate chiral centers in Rp or Sp configuration between the 5′ terminal (+1) nucleotide and the immediately downstream (+2) nucleotide; and between the +2 nucleotide and the immediately downstream (+3) nucleotide;
[0231] (5) a guide strand comprising one or more backbone phosphorothioate chiral centers in Rp or Sp configuration where linkage occurs between any two adjacent nucleotides between the penultimate 3′ nucleotide of the guide strand, where N is the 3′ terminal nucleotide, and the upstream N-10 nucleotide;
[0232] (6) a guide strand comprising one or more backbone phosphoryl guanidine chiral centers in the Sp configuration between the +7 and the immediately downstream (+8), i.e., in the 3′ direction.
[0233] (7) a guide strand comprising a 5′ terminal modification;
[0234] (8) a passenger strand in combination with one or more of the aforementioned guide strands, comprising one or more backbone chiral centers in Rp or Sp configuration;
[0235] (9) a passenger strand in combination with one or more of the aforementioned guide strands, comprising one or more backbone phosphoryl guanidine chiral centers in the Rp configuration between the +7 nucleotide and the immediately downstream (+8) nucleotide, i.e., in the 3′ direction;
[0236] (10) a passenger strand in combination with one or more of the aforementioned guide strands, comprising one or more backbone phosphoryl guanidine chiral centers in the Rp configuration between the +15 nucleotide and the immediately downstream (+16) nucleotide, i.e., in the 3′ direction; and
[0237] (11) a passenger strand in combination with one or more of the aforementioned guide strands, comprising backbone phosphorothioate chiral centers in the Sp configuration between the 5′ terminal (+1) nucleotide and the immediately downstream, i.e., in the 3′ direction, (+2) nucleotide and between the 3′ terminal nucleotide and the penultimate (N-1) nucleotide;
   wherein the ds oligonucleotide further comprises one or more of:
[0238] (1) a guide strand where one or both of the 5′ and 3′ terminal dinucleotides are not linked by non-negatively charged internucleotidic linkages, i.e., the guide strand comprises one more Rp, Sp, or stereorandom non-negatively charged internucleotidic linkages downstream, i.e., in the 3′ direction, relative to the linkage between the 5′ terminal dinucleotide and/or upstream, i.e., in the 5′ direction, relative to the linkage between the 3′ terminal dinucleotide;
[0239] (2) a guide strand where one or more Rp, Sp, or stereorandom non-negatively charged internucleotidic linkage occurs between any two adjacent nucleotides between the second (+2) nucleotide relative to the 5′ terminal nucleotide of the guide strand and the penultimate 3′ (N-1) nucleotide of the guide strand, where N is the 3′ terminal nucleotide;
[0240] (3) a guide strand where an Rp, Sp, or stereorandom non-negatively charged internucleotidic linkage occurs between the tenth (+10) and eleventh (+11) nucleotides, relative to the 5′ terminal nucleotide;
[0241] (4) a guide strand where an Rp, Sp, or stereorandom non-negatively charged internucleotidic linkage occurs between the seventh (+7) and eighth (+8) nucleotides, relative to the 5′ terminal nucleotide;
[0242] (5) a guide strand comprising one or more backbone phosphorothioate chiral centers in Rp or Sp configuration where linkage occurs between any two adjacent nucleotides between the penultimate 3′ nucleotide of the guide strand, where N is the 3′ terminal nucleotide, and the upstream N-10 nucleotide;
[0243] (6) a passenger strand where one or more Rp, Sp, or stereorandom non-negatively charged internucleotidic linkage occurs upstream, i.e., in the 5′ direction, relative to the central nucleotide of the passenger strand;
[0244] (7) a passenger strand where one or more Rp, Sp, or stereorandom non-negatively charged internucleotidic linkage occurs downstream, i.e., in the 3′ direction, relative to the central nucleotide of the passenger strand;
[0245] (8) a passenger strand where one or more backbone phosphorothioate chiral centers in Rp or Sp configuration internucleotidic linkage occurs upstream, i.e., in the 5′ direction, relative to the central nucleotide of the passenger strand;
[0246] (9) a passenger strand where one or more backbone phosphorothioate chiral centers in Rp or Sp configuration internucleotidic linkage internucleotidic linkage occurs downstream, i.e., in the 3′ direction, relative to the central nucleotide of the passenger strand; and
[0247] (10) a passenger strand comprising one or more modified sugars, e.g. Homo-DNA, between the 5′ terminal (+1) nucleotide and the penultimate (N-1) nucleotide.

[0248] In certain embodiments, the ds oligonucleotides comprising a guide strand backbone phosphoryl guanidine chiral center in the Sp configuration between the +3 nucleotide and the immediately downstream (+4) nucleotide, i.e., in the 3′ direction, comprise a DNA modification of the 5′ terminal (+1) nucleotide, second (+2) nucleotide, third (+3) nucleotide, fourth (+4) nucleotide, fifth (+5) nucleotide, sixth (+6) nucleotide, seventh (+7) nucleotide, and/or eighth (+8) nucleotide. In certain embodiments, the ds oligonucleotides comprising a guide strand backbone phosphoryl guanidine chiral center in the Sp configuration between the +3 nucleotide and the immediately downstream (+4) nucleotide, i.e., in the 3′ direction, comprise a DNA modification of the 5′ terminal (+1) nucleotide. In certain embodiments, the ds oligonucleotides comprising a guide strand backbone phosphoryl guanidine chiral center in the Sp configuration between the +3 nucleotide and the immediately downstream (+4) nucleotide, i.e., in the 3′ direction, comprise a DNA modification of the second (+2) nucleotide. In certain embodiments, the ds oligonucleotides comprising a guide strand backbone phosphoryl guanidine chiral center in the Sp configuration between the +3 nucleotide and the immediately downstream (+4) nucleotide, i.e., in the 3′ direction, comprise a DNA modification of the third (+3) nucleotide. In certain embodiments, the ds oligonucleotides comprising a guide strand backbone phosphoryl guanidine chiral center in the Sp configuration between the +3 nucleotide and the immediately downstream (+4) nucleotide, i.e., in the 3′ direction, comprise a DNA modification of the fourth (+4) nucleotide. In certain embodiments, the ds oligonucleotides comprising a guide strand backbone phosphoryl guanidine chiral center in the Sp configuration between the +3 nucleotide and the immediately downstream (+4) nucleotide, i.e., in the 3′ direction, comprise a DNA modification of the fifth (+5) nucleotide. In certain embodiments, the ds oligonucleotides comprising a guide strand backbone phosphoryl guanidine chiral center in the Sp configuration between the +3 nucleotide and the immediately downstream (+4) nucleotide, i.e., in the 3′ direction, comprise a DNA modification of the sixth (+6) nucleotide. In certain embodiments, the ds oligonucleotides comprising a guide strand backbone phosphoryl guanidine chiral center in the Sp configuration between the +3 nucleotide and the immediately downstream (+4) nucleotide, i.e., in the 3′ direction, comprise a DNA modification of the seventh (+7) nucleotide. In certain embodiments, the ds oligonucleotides comprising a guide strand backbone phosphoryl guanidine chiral center in the Sp configuration between the +3 nucleotide and the immediately downstream (+4) nucleotide, i.e., in the 3′ direction, comprise a DNA modification of the eighth (+8) nucleotide.

[0249] In certain embodiments, the present disclosure provides a ds oligonucleotide, useful for any purpose, which operates through any mechanism, and which comprises comprising a guide strand backbone phosphoryl guanidine chiral center in the Sp configuration between the +3 nucleotide and the immediately downstream (+4) nucleotide, i.e., in the 3′ direction, which further comprises:
[0250] (1) a guide strand comprising backbone phosphorothioate chiral centers in Sp configuration between the 3′ terminal nucleotide and the penultimate (N-1) nucleotide and as between the penultimate (N-1) nucleotide and the immediately upstream, i.e., in the 5′ direction, (N-2) nucleotide;
[0251] (2) a guide strand comprising backbone phosphorothioate chiral centers in Rp, Sp, or alternating configurations between the 5′ terminal (+1) nucleotide and the immediately downstream, i.e., in the 3′ direction, (+2) nucleotide and between the +2 nucleotide and the immediately downstream (+3) nucleotide;
[0252] (3) a guide strand comprising one or more backbone phosphorothioate chiral centers upstream, i.e., in the 5′ direction, relative to backbone phosphorothioate chiral centers in Sp configuration between the 3′ terminal nucleotide and the penultimate (N-1) nucleotide and as between the penultimate (N-1) nucleotide and the immediately upstream (N-2) nucleotide, where the upstream backbone phosphorothioate chiral centers are in Rp or Sp configuration;
[0253] (4) a guide strand comprising one or more backbone phosphorothioate chiral centers in Rp or Sp configuration between the 5′ terminal (+1) nucleotide and the immediately downstream (+2) nucleotide; and between the +2 nucleotide and the immediately downstream (+3) nucleotide;
[0254] (5) a guide strand comprising one or more backbone phosphorothioate chiral centers in Rp or Sp configuration where linkage occurs between any two adjacent nucleotides between the penultimate 3′ nucleotide of the guide strand, where N is the 3′ terminal nucleotide, and the upstream N-10 nucleotide;
[0255] (6) a guide strand comprising one or more backbone phosphoryl guanidine chiral centers in the Sp configuration between the +7 and the immediately downstream (+8), i.e., in the 3′ direction.
[0256] (7) a guide strand comprising a 5′ terminal modification;
[0257] (8) a passenger strand in combination with one or more of the aforementioned guide strands, comprising one or more backbone chiral centers in Rp or Sp configuration;
[0258] (9) a passenger strand in combination with one or more of the aforementioned guide strands, comprising one or more backbone phosphoryl guanidine chiral centers in the Rp configuration between the +7 nucleotide and the immediately downstream (+8) nucleotide, i.e., in the 3′ direction;
[0259] (10) a passenger strand in combination with one or more of the aforementioned guide strands, comprising one or more backbone phosphoryl guanidine chiral centers in the Rp configuration between the +15 nucleotide and the immediately downstream (+16) nucleotide, i.e., in the 3′ direction; and
[0260] (11) a passenger strand in combination with one or more of the aforementioned guide strands, comprising backbone phosphorothioate chiral centers in the Sp configuration between the 5′ terminal (+1) nucleotide and the immediately downstream, i.e., in the 3′ direction, (+2) nucleotide and between the 3′ terminal nucleotide and the penultimate (N-1) nucleotide;
   wherein the ds oligonucleotide further comprises one or more of.
[0261] (1) a guide strand where one or both of the 5′ and 3′ terminal dinucleotides are not linked by non-negatively charged internucleotidic linkages, i.e., the guide strand comprises one more Rp, Sp, or stereorandom non-negatively charged internucleotidic linkages downstream, i.e., in the 3′ direction, relative to the linkage between the 5′ terminal dinucleotide and/or upstream, i.e., in the 5′ direction, relative to the linkage between the 3′ terminal dinucleotide;
[0262] (2) a guide strand where one or more Rp, Sp, or stereorandom non-negatively charged internucleotidic linkage occurs between any two adjacent nucleotides between the second (+2) nucleotide relative to the 5′ terminal nucleotide of the guide strand and the penultimate 3′ (N-1) nucleotide of the guide strand, where N is the 3′ terminal nucleotide;
[0263] (3) a guide strand where an Rp, Sp, or stereorandom non-negatively charged internucleotidic linkage occurs between the tenth (+10) and eleventh (+11) nucleotides, relative to the 5′ terminal nucleotide;
[0264] (4) a guide strand where an Rp, Sp, or stereorandom non-negatively charged internucleotidic linkage occurs between the seventh (+7) and eighth (+8) nucleotides, relative to the 5′ terminal nucleotide;
[0265] (5) a guide strand comprising one or more backbone phosphorothioate chiral centers in Rp or Sp configuration where linkage occurs between any two adjacent nucleotides between the penultimate 3′ nucleotide of the guide strand, where N is the 3′ terminal nucleotide, and the upstream N-10 nucleotide;
[0266] (6) a passenger strand where one or more Rp, Sp, or stereorandom non-negatively charged internucleotidic linkage occurs upstream, i.e., in the 5′ direction, relative to the central nucleotide of the passenger strand;
[0267] (7) a passenger strand where one or more Rp, Sp, or stereorandom non-negatively charged internucleotidic linkage occurs downstream, i.e., in the 3′ direction, relative to the central nucleotide of the passenger strand;
[0268] (8) a passenger strand where one or more backbone phosphorothioate chiral centers in Rp or Sp configuration internucleotidic linkage occurs upstream, i.e., in the 5′ direction, relative to the central nucleotide of the passenger strand;
[0269] (9) a passenger strand where one or more backbone phosphorothioate chiral centers in Rp or Sp configuration internucleotidic linkage internucleotidic linkage occurs downstream, i.e., in the 3′ direction, relative to the central nucleotide of the passenger strand; and
[0270] (10) a passenger strand comprising one or more modified sugars, e.g. Homo-DNA, between the 5′ terminal (+1) nucleotide and the penultimate (N-1) nucleotide.

[0271] In certain embodiments, the ds oligonucleotides comprising a guide strand backbone phosphoryl guanidine chiral center in the Sp configuration between the +3 nucleotide and the immediately downstream (+4) nucleotide, i.e., in the 3′ direction, comprise a GNA modification of the 5′ terminal (+1) nucleotide, second (+2) nucleotide, third (+3) nucleotide, fourth (+4) nucleotide, fifth (+5) nucleotide, sixth (+6) nucleotide, seventh (+7) nucleotide, and/or eighth (+8) nucleotide. In certain embodiments, the ds oligonucleotides comprising a guide strand backbone phosphoryl guanidine chiral center in the Sp configuration between the +3 nucleotide and the immediately downstream (+4) nucleotide, i.e., in the 3′ direction, comprise a GNA modification of the 5′ terminal (+1) nucleotide. In certain embodiments, the ds oligonucleotides comprising a guide strand backbone phosphoryl guanidine chiral center in the Sp configuration between the +3 nucleotide and the immediately downstream (+4) nucleotide, i.e., in the 3′ direction, comprise a GNA modification of the second (+2) nucleotide. In certain embodiments, the ds oligonucleotides comprising a guide strand backbone phosphoryl guanidine chiral center in the Sp configuration between the +3 nucleotide and the immediately downstream (+4) nucleotide, i.e., in the 3′ direction, comprise a GNA modification of the third (+3) nucleotide. In certain embodiments, the ds oligonucleotides comprising a guide strand backbone phosphoryl guanidine chiral center in the Sp configuration between the +3 nucleotide and the immediately downstream (+4) nucleotide, i.e., in the 3′ direction, comprise a GNA modification of the fourth (+4) nucleotide. In certain embodiments, the ds oligonucleotides comprising a guide strand backbone phosphoryl guanidine chiral center in the Sp configuration between the +3 nucleotide and the immediately downstream (+4) nucleotide, i.e., in the 3′ direction, comprise a GNA modification of the fifth (+5) nucleotide. In certain embodiments, the ds oligonucleotides comprising a guide strand backbone phosphoryl guanidine chiral center in the Sp configuration between the +3 nucleotide and the immediately downstream (+4) nucleotide, i.e., in the 3′ direction, comprise a GNA modification of the sixth (+6) nucleotide. In certain embodiments, the ds oligonucleotides comprising a guide strand backbone phosphoryl guanidine chiral center in the Sp configuration between the +3 nucleotide and the immediately downstream (+4) nucleotide, i.e., in the 3′ direction, comprise a GNA modification of the seventh (+7) nucleotide. In certain embodiments, the ds oligonucleotides comprising a guide strand backbone phosphoryl guanidine chiral center in the Sp configuration between the +3 nucleotide and the immediately downstream (+4) nucleotide, i.e., in the 3′ direction, comprise a GNA modification of the eighth (+8) nucleotide.

[0272] In certain embodiments, the present disclosure provides a ds oligonucleotide, useful for any purpose, which operates through any mechanism, and which comprises comprising a guide strand backbone phosphoryl guanidine chiral center in the Sp configuration between the +3 nucleotide and the immediately downstream (+4) nucleotide, i.e., in the 3′ direction, which further comprises:
[0273] (1) a guide strand comprising backbone phosphorothioate chiral centers in Sp configuration between the 3′ terminal nucleotide and the penultimate (N-1) nucleotide and as between the penultimate (N-1) nucleotide and the immediately upstream, i.e., in the 5′ direction, (N-2) nucleotide;
[0274] (2) a guide strand comprising backbone phosphorothioate chiral centers in Rp, Sp, or alternating configurations between the 5′ terminal (+1) nucleotide and the immediately downstream, i.e., in the 3′ direction, (+2) nucleotide and between the +2 nucleotide and the immediately downstream (+3) nucleotide;
[0275] (3) a guide strand comprising one or more backbone phosphorothioate chiral centers upstream, i.e., in the 5′ direction, relative to backbone phosphorothioate chiral centers in Sp configuration between the 3′ terminal nucleotide and the penultimate (N-1) nucleotide and as between the penultimate (N-1) nucleotide and the immediately upstream (N-2) nucleotide, where the upstream backbone phosphorothioate chiral centers are in Rp or Sp configuration;
[0276] (4) a guide strand comprising one or more backbone phosphorothioate chiral centers in Rp or Sp configuration between the 5′ terminal (+1) nucleotide and the immediately downstream (+2) nucleotide; and between the +2 nucleotide and the immediately downstream (+3) nucleotide;
[0277] (5) a guide strand comprising one or more backbone phosphorothioate chiral centers in Rp or Sp configuration where linkage occurs between any two adjacent nucleotides between the penultimate 3′ nucleotide of the guide strand, where N is the 3′ terminal nucleotide, and the upstream N-10 nucleotide;
[0278] (6) a guide strand comprising one or more backbone phosphoryl guanidine chiral centers in the Sp configuration between the +7 and the immediately downstream (+8), i.e., in the 3′ direction.
[0279] (7) a guide strand comprising a 5′ terminal modification;
[0280] (8) a passenger strand in combination with one or more of the aforementioned guide strands, comprising one or more backbone chiral centers in Rp or Sp configuration;
[0281] (9) a passenger strand in combination with one or more of the aforementioned guide strands, comprising one or more backbone phosphoryl guanidine chiral centers in the Rp configuration between the +7 nucleotide and the immediately downstream (+8) nucleotide, i.e., in the 3′ direction;
[0282] (10) a passenger strand in combination with one or more of the aforementioned guide strands, comprising one or more backbone phosphoryl guanidine chiral centers in the Rp configuration between the +15 nucleotide and the immediately downstream (+16) nucleotide, i.e., in the 3′ direction; and
[0283] (11) a passenger strand in combination with one or more of the aforementioned guide strands, comprising backbone phosphorothioate chiral centers in the Sp configuration between the 5′ terminal (+1) nucleotide and the immediately downstream, i.e., in the 3′ direction, (+2) nucleotide and between the 3′ terminal nucleotide and the penultimate (N-1) nucleotide;
   wherein the ds oligonucleotide further comprises one or more of.
[0284] (1) a guide strand where one or both of the 5′ and 3′ terminal dinucleotides are not linked by non-negatively charged internucleotidic linkages, i.e., the guide strand comprises one more Rp, Sp, or stereorandom non-negatively charged internucleotidic linkages downstream, i.e., in the 3′ direction, relative to the linkage between the 5′ terminal dinucleotide and/or upstream, i.e., in the 5′ direction, relative to the linkage between the 3′ terminal dinucleotide;
[0285] (2) a guide strand where one or more Rp, Sp, or stereorandom non-negatively charged internucleotidic linkage occurs between any two adjacent nucleotides between the second (+2) nucleotide relative to the 5′ terminal nucleotide of the guide strand and the penultimate 3′ (N-1) nucleotide of the guide strand, where N is the 3′ terminal nucleotide;
[0286] (3) a guide strand where an Rp, Sp, or stereorandom non-negatively charged internucleotidic linkage occurs between the tenth (+10) and eleventh (+11) nucleotides, relative to the 5′ terminal nucleotide;
[0287] (4) a guide strand where an Rp, Sp, or stereorandom non-negatively charged internucleotidic linkage occurs between the seventh (+7) and eighth (+8) nucleotides, relative to the 5′ terminal nucleotide;
[0288] (5) a guide strand comprising one or more backbone phosphorothioate chiral centers in Rp or Sp configuration where linkage occurs between any two adjacent nucleotides between the penultimate 3′ nucleotide of the guide strand, where N is the 3′ terminal nucleotide, and the upstream N-10 nucleotide;
[0289] (6) a passenger strand where one or more Rp, Sp, or stereorandom non-negatively charged internucleotidic linkage occurs upstream, i.e., in the 5′ direction, relative to the central nucleotide of the passenger strand;
[0290] (7) a passenger strand where one or more Rp, Sp, or stereorandom non-negatively charged internucleotidic linkage occurs downstream, i.e., in the 3′ direction, relative to the central nucleotide of the passenger strand;
[0291] (8) a passenger strand where one or more backbone phosphorothioate chiral centers in Rp or Sp configuration internucleotidic linkage occurs upstream, i.e., in the 5′ direction, relative to the central nucleotide of the passenger strand;
[0292] (9) a passenger strand where one or more backbone phosphorothioate chiral centers in Rp or Sp configuration internucleotidic linkage internucleotidic linkage occurs downstream, i.e., in the 3′ direction, relative to the central nucleotide of the passenger strand; and
[0293] (10) a passenger strand comprising one or more modified sugars, e.g. Homo-DNA, between the 5′ terminal (+1) nucleotide and the penultimate (N-1) nucleotide.

[0294] In certain embodiments, the ds oligonucleotides comprising a guide strand backbone phosphoryl guanidine chiral center in the Sp configuration between the +3 nucleotide and the immediately downstream (+4) nucleotide, i.e., in the 3′ direction, comprise a (s)-GNA modification of the 5′ terminal (+1) nucleotide, second (+2) nucleotide, third (+3) nucleotide, fourth (+4) nucleotide, fifth (+5) nucleotide, sixth (+6) nucleotide, seventh (+7) nucleotide, and/or eighth (+8) nucleotide. In certain embodiments, the ds oligonucleotides comprising a guide strand backbone phosphoryl guanidine chiral center in the Sp configuration between the +3 nucleotide and the immediately downstream (+4) nucleotide, i.e., in the 3′ direction, comprise a (s)-GNA modification of the 5′ terminal (+1) nucleotide. In certain embodiments, the ds oligonucleotides comprising a guide strand backbone phosphoryl guanidine chiral center in the Sp configuration between the +3 nucleotide and the immediately downstream (+4) nucleotide, i.e., in the 3′ direction, comprise a (s)-GNA modification of the second (+2) nucleotide. In certain embodiments, the ds oligonucleotides comprising a guide strand backbone phosphoryl guanidine chiral center in the Sp configuration between the +3 nucleotide and the immediately downstream (+4) nucleotide, i.e., in the 3′ direction, comprise a (s)-GNA modification of the third (+3) nucleotide. In certain embodiments, the ds oligonucleotides comprising a guide strand backbone phosphoryl guanidine chiral center in the Sp configuration between the +3 nucleotide and the immediately downstream (+4) nucleotide, i.e., in the 3′ direction, comprise a (s)-GNA modification of the fourth (+4) nucleotide. In certain embodiments, the ds oligonucleotides comprising a guide strand backbone phosphoryl guanidine chiral center in the Sp configuration between the +3 nucleotide and the immediately downstream (+4) nucleotide, i.e., in the 3′ direction, comprise a (s)-GNA modification of the fifth (+5) nucleotide. In certain embodiments, the ds oligonucleotides comprising a guide strand backbone phosphoryl guanidine chiral center in the Sp configuration between the +3 nucleotide and the immediately downstream (+4) nucleotide, i.e., in the 3′ direction, comprise a (s)-GNA modification of the sixth (+6) nucleotide. In certain embodiments, the ds oligonucleotides comprising a guide strand backbone phosphoryl guanidine chiral center in the Sp configuration between the +3 nucleotide and the immediately downstream (+4) nucleotide, i.e., in the 3′ direction, comprise a (s)-GNA modification of the seventh (+7) nucleotide. In certain embodiments, the ds oligonucleotides comprising a guide strand backbone phosphoryl guanidine chiral center in the Sp configuration between the +3 nucleotide and the immediately downstream (+4) nucleotide, i.e., in the 3′ direction, comprise a (s)-GNA modification of the eighth (+8) nucleotide.

[0295] In certain embodiments, the present disclosure provides a ds oligonucleotide, useful for any purpose, which operates through any mechanism, and which comprises comprising a guide strand backbone phosphoryl guanidine chiral center in the Sp configuration between the +3 nucleotide and the immediately downstream (+4) nucleotide, i.e., in the 3′ direction, which further comprises:
[0296] (1) a guide strand comprising backbone phosphorothioate chiral centers in Sp configuration between the 3′ terminal nucleotide and the penultimate (N-1) nucleotide and as between the penultimate (N-1) nucleotide and the immediately upstream, i.e., in the 5′ direction, (N-2) nucleotide;
[0297] (2) a guide strand comprising backbone phosphorothioate chiral centers in Rp, Sp, or alternating configurations between the 5′ terminal (+1) nucleotide and the immediately downstream, i.e., in the 3′ direction, (+2) nucleotide and between the +2 nucleotide and the immediately downstream (+3) nucleotide;
[0298] (3) a guide strand comprising one or more backbone phosphorothioate chiral centers upstream, i.e., in the 5′ direction, relative to backbone phosphorothioate chiral centers in Sp configuration between the 3′ terminal nucleotide and the penultimate (N-1) nucleotide and as between the penultimate (N-1) nucleotide and the immediately upstream (N-2) nucleotide, where the upstream backbone phosphorothioate chiral centers are in Rp or Sp configuration;
[0299] (4) a guide strand comprising one or more backbone phosphorothioate chiral centers in Rp or Sp configuration between the 5′ terminal (+1) nucleotide and the immediately downstream (+2) nucleotide; and between the +2 nucleotide and the immediately downstream (+3) nucleotide;
[0300] (5) a guide strand comprising one or more backbone phosphorothioate chiral centers in Rp or Sp configuration where linkage occurs between any two adjacent nucleotides between the penultimate 3′ nucleotide of the guide strand, where N is the 3′ terminal nucleotide, and the upstream N-10 nucleotide;
[0301] (6) a guide strand comprising one or more backbone phosphoryl guanidine chiral centers in the Sp configuration between the +7 and the immediately downstream (+8), i.e., in the 3′ direction.
[0302] (7) a guide strand comprising a 5′ terminal modification;
[0303] (8) a passenger strand in combination with one or more of the aforementioned guide strands, comprising one or more backbone chiral centers in Rp or Sp configuration;
[0304] (9) a passenger strand in combination with one or more of the aforementioned guide strands, comprising one or more backbone phosphoryl guanidine chiral centers in the Rp configuration between the +7 nucleotide and the immediately downstream (+8) nucleotide, i.e., in the 3′ direction;
[0305] (10) a passenger strand in combination with one or more of the aforementioned guide strands, comprising one or more backbone phosphoryl guanidine chiral centers in the Rp configuration between the +15 nucleotide and the immediately downstream (+16) nucleotide, i.e., in the 3′ direction; and
[0306] (11) a passenger strand in combination with one or more of the aforementioned guide strands, comprising backbone phosphorothioate chiral centers in the Sp configuration between the 5′ terminal (+1) nucleotide and the immediately downstream, i.e., in the 3′ direction, (+2) nucleotide and between the 3′ terminal nucleotide and the penultimate (N-1) nucleotide;
   wherein the ds oligonucleotide further comprises one or more of:
[0307] (1) a guide strand where one or both of the 5′ and 3′ terminal dinucleotides are not linked by non-negatively charged internucleotidic linkages, i.e., the guide strand comprises one more Rp, Sp, or stereorandom non-negatively charged internucleotidic linkages downstream, i.e., in the 3′ direction, relative to the linkage between the 5′ terminal dinucleotide and/or upstream, i.e., in the 5′ direction, relative to the linkage between the 3′ terminal dinucleotide;
[0308] (2) a guide strand where one or more Rp, Sp, or stereorandom non-negatively charged internucleotidic linkage occurs between any two adjacent nucleotides between the second (+2) nucleotide relative to the 5′ terminal nucleotide of the guide strand and the penultimate 3′ (N-1) nucleotide of the guide strand, where N is the 3′ terminal nucleotide;
[0309] (3) a guide strand where an Rp, Sp, or stereorandom non-negatively charged internucleotidic linkage occurs between the tenth (+10) and eleventh (+11) nucleotides, relative to the 5′ terminal nucleotide;
[0310] (4) a guide strand where an Rp, Sp, or stereorandom non-negatively charged internucleotidic linkage occurs between the seventh (+7) and eighth (+8) nucleotides, relative to the 5′ terminal nucleotide;
[0311] (5) a guide strand comprising one or more backbone phosphorothioate chiral centers in Rp or Sp configuration where linkage occurs between any two adjacent nucleotides between the penultimate 3′ nucleotide of the guide strand, where N is the 3′ terminal nucleotide, and the upstream N-10 nucleotide;
[0312] (6) a passenger strand where one or more Rp, Sp, or stereorandom non-negatively charged internucleotidic linkage occurs upstream, i.e., in the 5′ direction, relative to the central nucleotide of the passenger strand;
[0313] (7) a passenger strand where one or more Rp, Sp, or stereorandom non-negatively charged internucleotidic linkage occurs downstream, i.e., in the 3′ direction, relative to the central nucleotide of the passenger strand;
[0314] (8) a passenger strand where one or more backbone phosphorothioate chiral centers in Rp or Sp configuration internucleotidic linkage occurs upstream, i.e., in the 5′ direction, relative to the central nucleotide of the passenger strand;
[0315] (9) a passenger strand where one or more backbone phosphorothioate chiral centers in Rp or Sp configuration internucleotidic linkage internucleotidic linkage occurs downstream, i.e., in the 3′ direction, relative to the central nucleotide of the passenger strand; and
[0316] (10) a passenger strand comprising one or more modified sugars, e.g. Homo-DNA, between the 5′ terminal (+1) nucleotide and the penultimate (N-1) nucleotide.

[0317] In certain embodiments, the ds oligonucleotide further comprises a 2′ modification, e.g., a 2′ F modification, of the 3′ nucleotide of a nucleotide pair linked by an Rp, Sp, or stereorandom non-negatively charged internucleotidic linkage. In certain embodiments, the one or more Rp, Sp, or stereorandom non-negatively charged internucleotidic linkage incorporated into the guide or passenger strand is an Rp non-negatively charged internucleotidic linkage. In certain embodiments, the one or more Rp, Sp, or stereorandom non-negatively charged internucleotidic linkage is an Sp non-negatively charged internucleotidic linkage. In certain embodiments, the one or more Rp, Sp, or stereorandom non-negatively charged internucleotidic linkage is a stereorandom non-negatively charged internucleotidic linkage. In certain embodiments, the ds oligonucleotides comprising a guide strand backbone phosphoryl guanidine chiral center in the Sp configuration between the +3 nucleotide and the immediately downstream (+4) nucleotide, i.e., in the 3′ direction, further comprise one or a plurality of modified sugars. In certain embodiments, the ds oligonucleotides comprising a guide strand backbone phosphoryl guanidine chiral center in the Sp configuration between the +3 nucleotide and the immediately downstream (+4) nucleotide, i.e., in the 3′ direction, comprise a modified sugar at the 5′ terminal (+1) nucleotide, second (+2) nucleotide, third (+3) nucleotide, fourth (+4) nucleotide, fifth (+5) nucleotide, sixth (+6) nucleotide, seventh (+7) nucleotide, eighth (+8) nucleotide, ninth (+9) nucleotide, tenth (+10) nucleotide, twelfth (+12) nucleotide, sixteenth (+16) nucleotide, seventeenth (+17) nucleotide, eighteenth (+18) nucleotide, nineteenth (+19) nucleotide, twentieth (+20) nucleotide, twenty-first (+21) nucleotide, twenty-second (+22), and/or twenty-third (+23), the 3′ terminal, nucleotide. In certain embodiments, the ds oligonucleotides comprising a guide strand backbone phosphoryl guanidine chiral center in the Sp configuration between the +3 nucleotide and the immediately downstream (+4) nucleotide, i.e., in the 3′ direction, comprise a modified sugar at the 5′ terminal (+1) nucleotide. In certain embodiments, the ds oligonucleotides comprising a guide strand backbone phosphoryl guanidine chiral center in the Sp configuration between the +3 nucleotide and the immediately downstream (+4) nucleotide, i.e., in the 3′ direction, comprise a modified sugar at the second (+2) nucleotide. In certain embodiments, the ds oligonucleotides comprising a guide strand backbone phosphoryl guanidine chiral center in the Sp configuration between the +3 nucleotide and the immediately downstream (+4) nucleotide, i.e., in the 3′ direction, comprise a modified sugar at the third (+3) nucleotide. In certain embodiments, the ds oligonucleotides comprising a guide strand backbone phosphoryl guanidine chiral center in the Sp configuration between the +3 nucleotide and the immediately downstream (+4) nucleotide, i.e., in the 3′ direction, comprise a modified sugar at the fourth (+4) nucleotide. In certain embodiments, the ds oligonucleotides comprising a guide strand backbone phosphoryl guanidine chiral center in the Sp configuration between the +3 nucleotide and the immediately downstream (+4) nucleotide, i.e., in the 3′ direction, comprise a modified sugar at the fifth (+5) nucleotide. In certain embodiments, the ds oligonucleotides comprising a guide strand backbone phosphoryl guanidine chiral center in the Sp configuration between the +3 nucleotide and the immediately downstream (+4) nucleotide, i.e., in the 3′ direction, comprise a modified sugar at the sixth (+6) nucleotide.

[0318] In certain embodiments, the modified sugar comprises a 2′-F modification, 2′-H modification, 2′-OH modification, 2′-O-alkyl modification, e.g., 2′-O-methyl (OMe) modification, 2′-methoxyethyl (MOE) modification, 5′-alkyl modification, e.g., 5′-(R)-methyl or 5′-(S)-methyl, DNA, locked nucleic acid (LNA), unlocked nucleic acid (UNA), glycol nucleic acid (GNA), or Homo-DNA.

[0319] In certain embodiments, the ds oligonucleotides comprising a guide strand backbone phosphoryl guanidine chiral center in the Sp configuration between the +3 nucleotide and the immediately downstream (+4) nucleotide, i.e., in the 3′ direction, comprise a 2′-F modification of the 5′ terminal (+1) nucleotide, second (+2) nucleotide, third (+3) nucleotide, fourth (+4) nucleotide, fifth (+5) nucleotide, and/or sixth (+6) nucleotide. In certain embodiments, the ds oligonucleotides comprising a guide strand backbone phosphoryl guanidine chiral center in the Sp configuration between the +3 nucleotide and the immediately downstream (+4) nucleotide, i.e., in the 3′ direction, comprise a 2′-F modification of the 5′ terminal (+1) nucleotide. In certain embodiments, the ds oligonucleotides comprising a guide strand backbone phosphoryl guanidine chiral center in the Sp configuration between the +3 nucleotide and the immediately downstream (+4) nucleotide, i.e., in the 3′ direction, comprise a 2′-F modification of the second (+2) nucleotide. In certain embodiments, the ds oligonucleotides comprising a guide strand backbone phosphoryl guanidine chiral center in the Sp configuration between the +3 nucleotide and the immediately downstream (+4) nucleotide, i.e., in the 3′ direction, comprise a 2′-F modification of the third (+3) nucleotide. In certain embodiments, the ds oligonucleotides comprising a guide strand backbone phosphoryl guanidine chiral center in the Sp configuration between the +3 nucleotide and the immediately downstream (+4) nucleotide, i.e., in the 3′ direction, comprise a 2′-F modification of the fourth (+4) nucleotide. In certain embodiments, the ds oligonucleotides comprising a guide strand backbone phosphoryl guanidine chiral center in the Sp configuration between the +3 nucleotide and the immediately downstream (+4) nucleotide, i.e., in the 3′ direction, comprise a 2′-F modification of the fifth (+5) nucleotide. In certain embodiments, the ds oligonucleotides comprising a guide strand backbone phosphoryl guanidine chiral center in the Sp configuration between the +3 nucleotide and the immediately downstream (+4) nucleotide, i.e., in the 3′ direction, comprise a 2′-F modification of the sixth (+6) nucleotide.

[0320] In certain embodiments, the provided ds oligonucleotides may participate in (e.g., direct) RNAi mechanisms. In certain embodiments, provided ds oligonucleotides may participate in RNase H (ribonuclease H) mechanisms. In certain embodiments, provided ds oligonucleotides may act as translational inhibitors (e.g., may provide steric blocks of translation).

[0321] In certain embodiments, the ds oligonucleotide comprises a guide strand backbone phosphoryl guanidine chiral center in the Sp configuration between the +3 nucleotide and the immediately downstream (+4) nucleotide, i.e., in the 3′ direction, and the guide strand further comprises backbone phosphorothioate chiral centers in Sp configuration between the 3′ terminal nucleotide and the penultimate (N-1) nucleotide and as between the penultimate (N-1) nucleotide and the immediately upstream (N-2) nucleotide, and one or more of:
[0322] (1) a guide strand where one or both of the 5′ and 3′ terminal dinucleotides are not linked by non-negatively charged internucleotidic linkages, i.e., the guide strand comprises one more non-negatively charged internucleotidic linkages downstream, i.e., in the 3′ direction, relative to the linkage between the 5′ terminal dinucleotide and/or upstream, i.e., in the 5′ direction, relative to the linkage between the 3′ terminal dinucleotide;
[0323] (2) a guide strand where one or more Rp, Sp, or stereorandom non-negatively charged internucleotidic linkage occurs between any two adjacent nucleotides between the second (+2) nucleotide relative to the 5′ terminal nucleotide of the guide strand and the penultimate 3′ (N-1) nucleotide of the guide strand, where N is the 3′ terminal nucleotide;
[0324] (4) a guide strand where an Rp, Sp, or stereorandom non-negatively charged internucleotidic linkage occurs between the seventh (+7) and eighth (+8) nucleotides, relative to the 5′ terminal nucleotide;
[0325] (5) a guide strand comprising one or more backbone phosphorothioate chiral centers in Rp or Sp configuration where linkage occurs between any two adjacent nucleotides between the penultimate 3′ nucleotide of the guide strand, where N is the 3′ terminal nucleotide, and the upstream N-10 nucleotide;
[0326] (6) a passenger strand where one or more Rp, Sp, or stereorandom non-negatively charged internucleotidic linkage occurs upstream, i.e., in the 5′ direction, relative to the central nucleotide of the passenger strand;
[0327] (7) a passenger strand where one or more Rp, Sp, or stereorandom non-negatively charged internucleotidic linkage occurs downstream, i.e., in the 3′ direction, relative to the central nucleotide of the passenger strand;
[0328] (8) a passenger strand where one or more backbone phosphorothioate chiral centers in Rp or Sp configuration internucleotidic linkage occurs upstream, i.e., in the 5′ direction, relative to the central nucleotide of the passenger strand;
[0329] (9) a passenger strand where one or more backbone phosphorothioate chiral centers in Rp or Sp configuration internucleotidic linkage internucleotidic linkage occurs downstream, i.e., in the 3′ direction, relative to the central nucleotide of the passenger strand; and
[0330] (10) a passenger strand comprising one or more modified sugars, e.g. Homo-DNA, between the 5′ terminal (+1) nucleotide and the penultimate (N-1) nucleotide.
   In certain embodiments, the ds oligonucleotide further comprises a 2′ modification, e.g., a 2′ F modification, of the 3′ nucleotide of a nucleotide pair linked by an Rp, Sp, or stereorandom non-negatively charged internucleotidic linkage, and the passenger strand comprises 0-n Rp, Sp, or stereorandom non-negatively charged internucleotidic linkages, where n is about 1 to 49.

[0331] In certain embodiments, the ds oligonucleotides comprising a guide strand backbone phosphoryl guanidine chiral center in the Sp configuration between the +3 nucleotide and the immediately downstream (+4) nucleotide, i.e., in the 3′ direction, further comprise one or a plurality of modified sugars. In certain embodiments, the ds oligonucleotides comprising a guide strand backbone phosphoryl guanidine chiral center in the Sp configuration between the +3 nucleotide and the immediately downstream (+4) nucleotide, i.e., in the 3′ direction, comprise a modified sugar at the 5′ terminal (+1) nucleotide, second (+2) nucleotide, third (+3) nucleotide, fourth (+4) nucleotide, fifth (+5) nucleotide, sixth (+6) nucleotide, seventh (+7) nucleotide, eighth (+8) nucleotide, ninth (+9) nucleotide, tenth (+10) nucleotide, twelfth (+12) nucleotide, sixteenth (+16) nucleotide, seventeenth (+17) nucleotide, eighteenth (+18) nucleotide, nineteenth (+19) nucleotide, twentieth (+20) nucleotide, twenty-first (+21) nucleotide, twenty-second (+22), and/or twenty-third (+23), the 3′ terminal, nucleotide. In certain embodiments, the ds oligonucleotides comprising a guide strand backbone phosphoryl guanidine chiral center in the Sp configuration between the +3 nucleotide and the immediately downstream (+4) nucleotide, i.e., in the 3′ direction, comprise a modified sugar at the 5′ terminal (+1) nucleotide. In certain embodiments, the ds oligonucleotides comprising a guide strand backbone phosphoryl guanidine chiral center in the Sp configuration between the +3 nucleotide and the immediately downstream (+4) nucleotide, i.e., in the 3′ direction, comprise a modified sugar at the second (+2) nucleotide. In certain embodiments, the ds oligonucleotides comprising a guide strand backbone phosphoryl guanidine chiral center in the Sp configuration between the +3 nucleotide and the immediately downstream (+4) nucleotide, i.e., in the 3′ direction, comprise a modified sugar at the third (+3) nucleotide. In certain embodiments, the ds oligonucleotides comprising a guide strand backbone phosphoryl guanidine chiral center in the Sp configuration between the +3 nucleotide and the immediately downstream (+4) nucleotide, i.e., in the 3′ direction, comprise a modified sugar at the fourth (+4) nucleotide. In certain embodiments, the ds oligonucleotides comprising a guide strand backbone phosphoryl guanidine chiral center in the Sp configuration between the +3 nucleotide and the immediately downstream (+4) nucleotide, i.e., in the 3′ direction, comprise a modified sugar at the fifth (+5) nucleotide. In certain embodiments, the ds oligonucleotides comprising a guide strand backbone phosphoryl guanidine chiral center in the Sp configuration between the +3 nucleotide and the immediately downstream (+4) nucleotide, i.e., in the 3′ direction, comprise a modified sugar at the sixth (+6) nucleotide.

[0332] In certain embodiments, the modified sugar comprises a 2′-F modification, 2′-H modification, 2′-OH modification, 2′-O-alkyl modification, e.g., 2′-O-methyl (OMe) modification, 2′-methoxyethyl (MOE) modification, 5′-alkyl modification, e.g., 5′-(R)-methyl or 5′-(S)-methyl, DNA, locked nucleic acid (LNA), unlocked nucleic acid (UNA), glycol nucleic acid (GNA), or Homo-DNA. In certain embodiments, the ds oligonucleotides comprising a guide strand backbone phosphoryl guanidine chiral center in the Sp configuration between the +3 nucleotide and the immediately downstream (+4) nucleotide, i.e., in the 3′ direction, comprise a 2′-F modification of the 5′ terminal (+1) nucleotide, second (+2) nucleotide, third (+3) nucleotide, fourth (+4) nucleotide, fifth (+5) nucleotide, and/or sixth (+6) nucleotide. In certain embodiments, the ds oligonucleotides comprising a guide strand backbone phosphoryl guanidine chiral center in the Sp configuration between the +3 nucleotide and the immediately downstream (+4) nucleotide, i.e., in the 3′ direction, comprise a 2′-F modification of the 5′ terminal (+1) nucleotide. In certain embodiments, the ds oligonucleotides comprising a guide strand backbone phosphoryl guanidine chiral center in the Sp configuration between the +3 nucleotide and the immediately downstream (+4) nucleotide, i.e., in the 3′ direction, comprise a 2′-F modification of the second (+2) nucleotide. In certain embodiments, the ds oligonucleotides comprising a guide strand backbone phosphoryl guanidine chiral center in the Sp configuration between the +3 nucleotide and the immediately downstream (+4) nucleotide, i.e., in the 3′ direction, comprise a 2′-F modification of the third (+3) nucleotide. In certain embodiments, the ds oligonucleotides comprising a guide strand backbone phosphoryl guanidine chiral center in the Sp configuration between the +3 nucleotide and the immediately downstream (+4) nucleotide, i.e., in the 3′ direction, comprise a 2′-F modification of the fourth (+4) nucleotide. In certain embodiments, the ds oligonucleotides comprising a guide strand backbone phosphoryl guanidine chiral center in the Sp configuration between the +3 nucleotide and the immediately downstream (+4) nucleotide, i.e., in the 3′ direction, comprise a 2′-F modification of the fifth (+5) nucleotide. In certain embodiments, the ds oligonucleotides comprising a guide strand backbone phosphoryl guanidine chiral center in the Sp configuration between the +3 nucleotide and the immediately downstream (+4) nucleotide, i.e., in the 3′ direction, comprise a 2′-F modification of the sixth (+6) nucleotide.

[0333] In certain embodiments, the passenger strand comprises an Sp backbone phosphorothioate chiral center between the 5′ terminal (+1) nucleotide and the immediately downstream (+2) nucleotide and an Sp backbone phosphorothioate chiral center between the penultimate (N-1) nucleotide and the 3′ terminal (N) nucleotide.

[0334] In certain embodiments, the ds oligonucleotide comprises a guide strand backbone phosphoryl guanidine chiral center in the Sp configuration between the +3 nucleotide and the immediately downstream (+4) nucleotide, i.e., in the 3′ direction, and the guide strand further comprises backbone phosphorothioate chiral centers in Rp, Sp, or alternating configurations between the 5′ terminal (+1) nucleotide and the immediately downstream (+2) nucleotide and between the +2 nucleotide and the immediately downstream (+3) nucleotide, and one or more of
[0335] (1) a guide strand where one or both of the 5′ and 3′ terminal dinucleotides are not linked by non-negatively charged internucleotidic linkages, i.e., the guide strand comprises one more non-negatively charged internucleotidic linkages downstream, i.e., in the 3′ direction, relative to the linkage between the 5′ terminal dinucleotide and/or upstream, i.e., in the 5′ direction, relative to the linkage between the 3′ terminal dinucleotide;
[0336] (2) a guide strand where one or more Rp, Sp, or stereorandom non-negatively charged internucleotidic linkage occurs between any two adjacent nucleotides between the second (+2) nucleotide relative to the 5′ terminal nucleotide of the guide strand and the penultimate 3′ (N-1) nucleotide of the guide strand, where N is the 3′ terminal nucleotide;
[0337] (3) a guide strand where an Rp, Sp, or stereorandom non-negatively charged internucleotidic linkage occurs between the tenth (+10) and eleventh (+11) nucleotides, relative to the 5′ terminal nucleotide; (4) a guide strand where an Rp, Sp, or stereorandom non-negatively charged internucleotidic linkage occurs between the seventh (+7) and eighth (+8) nucleotides, relative to the 5′ terminal nucleotide;
[0338] (5) a guide strand comprising one or more backbone phosphorothioate chiral centers in Rp or Sp configuration where linkage occurs between any two adjacent nucleotides between the penultimate 3′ nucleotide of the guide strand, where N is the 3′ terminal nucleotide, and the upstream N-10 nucleotide;
[0339] (6) a passenger strand where one or more Rp, Sp, or stereorandom non-negatively charged internucleotidic linkage occurs upstream, i.e., in the 5′ direction, relative to the central nucleotide of the passenger strand;
[0340] (7) a passenger strand where one or more Rp, Sp, or stereorandom non-negatively charged internucleotidic linkage occurs downstream, i.e., in the 3′ direction, relative to the central nucleotide of the passenger strand;
[0341] (8) a passenger strand where one or more backbone phosphorothioate chiral centers in Rp or Sp configuration internucleotidic linkage occurs upstream, i.e., in the 5′ direction, relative to the central nucleotide of the passenger strand;
[0342] (9) a passenger strand where one or more backbone phosphorothioate chiral centers in Rp or Sp configuration internucleotidic linkage internucleotidic linkage occurs downstream, i.e., in the 3′ direction, relative to the central nucleotide of the passenger strand; and
[0343] (10) a passenger strand comprising one or more modified sugars, e.g. Homo-DNA, between the 5′ terminal (+1) nucleotide and the penultimate (N-1) nucleotide.
   In certain embodiments, the ds oligonucleotide further comprises a 2′ modification, e.g., a 2′ F modification, of the 3′ nucleotide of a nucleotide pair linked by an Rp, Sp, or stereorandom non-negatively charged internucleotidic linkage, and the passenger strand comprises 0-n Rp, Sp, or stereorandom non-negatively charged internucleotidic linkages, where n is about 1 to 49.

[0344] In certain embodiments, the ds oligonucleotides comprising a guide strand backbone phosphoryl guanidine chiral center in the Sp configuration between the +3 nucleotide and the immediately downstream (+4) nucleotide, i.e., in the 3′ direction, further comprise a modified sugar. In certain embodiments, the ds oligonucleotides comprising a guide strand backbone phosphoryl guanidine chiral center in the Sp configuration between the +3 nucleotide and the immediately downstream (+4) nucleotide, i.e., in the 3′ direction, comprise a modified sugar at the 5′ terminal (+1) nucleotide, second (+2) nucleotide, third (+3) nucleotide, fourth (+4) nucleotide, fifth (+5) nucleotide, sixth (+6) nucleotide, seventh (+7) nucleotide, eighth (+8) nucleotide, ninth (+9) nucleotide, tenth (+10) nucleotide, twelfth (+12) nucleotide, sixteenth (+16) nucleotide, seventeenth (+17) nucleotide, eighteenth (+18) nucleotide, nineteenth (+19) nucleotide, twentieth (+20) nucleotide, twenty-first (+21) nucleotide, twenty-second (+22), and/or twenty-third (+23), the 3′ terminal, nucleotide. In certain embodiments, the ds oligonucleotides comprising a guide strand backbone phosphoryl guanidine chiral center in the Sp configuration between the +3 nucleotide and the immediately downstream (+4) nucleotide, i.e., in the 3′ direction, comprise a modified sugar at the 5′ terminal (+1) nucleotide. In certain embodiments, the ds oligonucleotides comprising a guide strand backbone phosphoryl guanidine chiral center in the Sp configuration between the +3 nucleotide and the immediately downstream (+4) nucleotide, i.e., in the 3′ direction, comprise a modified sugar at the second (+2) nucleotide. In certain embodiments, the ds oligonucleotides comprising a guide strand backbone phosphoryl guanidine chiral center in the Sp configuration between the +3 nucleotide and the immediately downstream (+4) nucleotide, i.e., in the 3′ direction, comprise a modified sugar at the third (+3) nucleotide. In certain embodiments, the ds oligonucleotides comprising a guide strand backbone phosphoryl guanidine chiral center in the Sp configuration between the +3 nucleotide and the immediately downstream (+4) nucleotide, i.e., in the 3′ direction, comprise a modified sugar at the fourth (+4) nucleotide. In certain embodiments, the ds oligonucleotides comprising a guide strand backbone phosphoryl guanidine chiral center in the Sp configuration between the +3 nucleotide and the immediately downstream (+4) nucleotide, i.e., in the 3′ direction, comprise a modified sugar at the fifth (+5) nucleotide. In certain embodiments, the ds oligonucleotides comprising a guide strand backbone phosphoryl guanidine chiral center in the Sp configuration between the +3 nucleotide and the immediately downstream (+4) nucleotide, i.e., in the 3′ direction, comprise a modified sugar at the sixth (+6) nucleotide.

[0345] In certain embodiments, the modified sugar comprises a 2′-F modification, 2′-H modification, 2′-OH modification, 2′-O-alkyl modification, e.g., 2′-O-methyl (OMe) modification, 2′-methoxyethyl (MOE) modification, 5′-alkyl modification, e.g., 5′-(R)-methyl or 5′-(S)-methyl, DNA, locked nucleic acid (LNA), unlocked nucleic acid (UNA), glycol nucleic acid (GNA), or Homo-DNA.

[0346] In certain embodiments, the ds oligonucleotides comprising a guide strand backbone phosphoryl guanidine chiral center in the Sp configuration between the +3 nucleotide and the immediately downstream (+4) nucleotide, i.e., in the 3′ direction, comprise a 2′-F modification of the 5′ terminal (+1) nucleotide, second (+2) nucleotide, third (+3) nucleotide, fourth (+4) nucleotide, fifth (+5) nucleotide, and/or sixth (+6) nucleotide. In certain embodiments, the ds oligonucleotides comprising a guide strand backbone phosphoryl guanidine chiral center in the Sp configuration between the +3 nucleotide and the immediately downstream (+4) nucleotide, i.e., in the 3′ direction, comprise a 2′-F modification of the 5′ terminal (+1) nucleotide. In certain embodiments, the ds oligonucleotides comprising a guide strand backbone phosphoryl guanidine chiral center in the Sp configuration between the +3 nucleotide and the immediately downstream (+4) nucleotide, i.e., in the 3′ direction, comprise a 2′-F modification of the second (+2) nucleotide. In certain embodiments, the ds oligonucleotides comprising a guide strand backbone phosphoryl guanidine chiral center in the Sp configuration between the +3 nucleotide and the immediately downstream (+4) nucleotide, i.e., in the 3′ direction, comprise a 2′-F modification of the third (+3) nucleotide. In certain embodiments, the ds oligonucleotides comprising a guide strand backbone phosphoryl guanidine chiral center in the Sp configuration between the +3 nucleotide and the immediately downstream (+4) nucleotide, i.e., in the 3′ direction, comprise a 2′-F modification of the fourth (+4) nucleotide. In certain embodiments, the ds oligonucleotides comprising a guide strand backbone phosphoryl guanidine chiral center in the Sp configuration between the +3 nucleotide and the immediately downstream (+4) nucleotide, i.e., in the 3′ direction, comprise a 2′-F modification of the fifth (+5) nucleotide. In certain embodiments, the ds oligonucleotides comprising a guide strand backbone phosphoryl guanidine chiral center in the Sp configuration between the +3 nucleotide and the immediately downstream (+4) nucleotide, i.e., in the 3′ direction, comprise a 2′-F modification of the sixth (+6) nucleotide.

[0347] In certain embodiments, the one or more Rp, Sp, or stereorandom non-negatively charged internucleotidic linkage incorporated into the guide or passenger strand is an Rp non-negatively charged internucleotidic linkage. In certain embodiments, the one or more Rp, Sp, or stereorandom non-negatively charged internucleotidic linkage is an Sp non-negatively charged internucleotidic linkage. In certain embodiments, the one or more Rp, Sp, or stereorandom non-negatively charged internucleotidic linkage is a stereorandom non-negatively charged internucleotidic linkage. In certain embodiments, the passenger strand comprises an Sp backbone phosphorothioate chiral center between the 5′ terminal (+1) nucleotide and the immediately downstream (+2) nucleotide and an Sp backbone phosphorothioate chiral center between the penultimate (N-1) nucleotide and the 3′ terminal (N) nucleotide.

[0348] In certain embodiments, the ds oligonucleotide comprises a guide strand backbone phosphoryl guanidine chiral center in the Sp configuration between the +3 nucleotide and the immediately downstream (+4) nucleotide, i.e., in the 3′ direction, and the guide strand further comprises one or more backbone phosphorothioate chiral centers in Rp or Sp configuration upstream of backbone phosphorothioate chiral centers in Sp configuration between the 3′ terminal nucleotide and the penultimate (N-1) nucleotide and as between the penultimate (N-1) nucleotide and the immediately upstream (N-2) nucleotide, and one or more of
[0349] (1) a guide strand where one or both of the 5′ and 3′ terminal dinucleotides are not linked by non-negatively charged internucleotidic linkages, i.e., the guide strand comprises one more non-negatively charged internucleotidic linkages downstream, i.e., in the 3′ direction, relative to the linkage between the 5′ terminal dinucleotide and/or upstream, i.e., in the 5′ direction, relative to the linkage between the 3′ terminal dinucleotide;
[0350] (2) a guide strand where one or more Rp, Sp, or stereorandom non-negatively charged internucleotidic linkage occurs between any two adjacent nucleotides between the second (+2) nucleotide relative to the 5′ terminal nucleotide of the guide strand and the penultimate 3′ (N-1) nucleotide of the guide strand, where N is the 3′ terminal nucleotide;
[0351] (3) a guide strand where an Rp, Sp, or stereorandom non-negatively charged internucleotidic linkage occurs between the tenth (+10) and eleventh (+11) nucleotides, relative to the 5′ terminal nucleotide;
[0352] (4) a guide strand where an Rp, Sp, or stereorandom non-negatively charged internucleotidic linkage occurs between the seventh (+7) and eighth (+8) nucleotides, relative to the 5′ terminal nucleotide;
[0353] (5) a guide strand comprising one or more backbone phosphorothioate chiral centers in Rp or Sp configuration where linkage occurs between any two adjacent nucleotides between the penultimate 3′ nucleotide of the guide strand, where N is the 3′ terminal nucleotide, and the upstream N-10 nucleotide;
[0354] (6) a passenger strand where one or more Rp, Sp, or stereorandom non-negatively charged internucleotidic linkage occurs upstream, i.e., in the 5′ direction, relative to the central nucleotide of the passenger strand;
[0355] (7) a passenger strand where one or more Rp, Sp, or stereorandom non-negatively charged internucleotidic linkage occurs downstream, i.e., in the 3′ direction, relative to the central nucleotide of the passenger strand;
[0356] (8) a passenger strand where one or more backbone phosphorothioate chiral centers in Rp or Sp configuration internucleotidic linkage occurs upstream, i.e., in the 5′ direction, relative to the central nucleotide of the passenger strand;
[0357] (9) a passenger strand where one or more backbone phosphorothioate chiral centers in Rp or Sp configuration internucleotidic linkage internucleotidic linkage occurs downstream, i.e., in the 3′ direction, relative to the central nucleotide of the passenger strand; and
[0358] (10) a passenger strand comprising one or more modified sugars, e.g. Homo-DNA, between the 5′ terminal (+1) nucleotide and the penultimate (N-1) nucleotide.
   In certain embodiments, the ds oligonucleotide further comprises a 2′ modification, e.g., a 2′ F modification, of the 3′ nucleotide of a nucleotide pair linked by an Rp, Sp, or stereorandom non-negatively charged internucleotidic linkage, and the passenger strand comprises 0-n Rp, Sp, or stereorandom non-negatively charged internucleotidic linkages, where n is about 1 to 49.

[0359] In certain embodiments, the ds oligonucleotides comprising a guide strand backbone phosphoryl guanidine chiral center in the Sp configuration between the +3 nucleotide and the immediately downstream (+4) nucleotide, i.e., in the 3′ direction, further comprise one or a plurality of modified sugars. In certain embodiments, the ds oligonucleotides comprising a guide strand backbone phosphoryl guanidine chiral center in the Sp configuration between the +3 nucleotide and the immediately downstream (+4) nucleotide, i.e., in the 3′ direction, comprise a modified sugar at the 5′ terminal (+1) nucleotide, second (+2) nucleotide, third (+3) nucleotide, fourth (+4) nucleotide, fifth (+5) nucleotide, sixth (+6) nucleotide, seventh (+7)nucleotide, eighth (+8) nucleotide, ninth (+9) nucleotide, tenth (+10) nucleotide, twelfth (+12) nucleotide, sixteenth (+16) nucleotide, seventeenth (+17) nucleotide, eighteenth (+18) nucleotide, nineteenth (+19) nucleotide, twentieth (+20) nucleotide, twenty-first (+21) nucleotide, twenty-second (+22), and/or twenty-third (+23), the 3′ terminal, nucleotide. In certain embodiments, the ds oligonucleotides comprising a guide strand backbone phosphoryl guanidine chiral center in the Sp configuration between the +3 nucleotide and the immediately downstream (+4) nucleotide, i.e., in the 3′ direction, comprise a modified sugar at the 5′ terminal (+1) nucleotide. In certain embodiments, the ds oligonucleotides comprising a guide strand backbone phosphoryl guanidine chiral center in the Sp configuration between the +3 nucleotide and the immediately downstream (+4) nucleotide, i.e., in the 3′ direction, comprise a modified sugar at the second (+2) nucleotide. In certain embodiments, the ds oligonucleotides comprising a guide strand backbone phosphoryl guanidine chiral center in the Sp configuration between the +3 nucleotide and the immediately downstream (+4) nucleotide, i.e., in the 3′ direction, comprise a modified sugar at the third (+3) nucleotide. In certain embodiments, the ds oligonucleotides comprising a guide strand backbone phosphoryl guanidine chiral center in the Sp configuration between the +3 nucleotide and the immediately downstream (+4) nucleotide, i.e., in the 3′ direction, comprise a modified sugar at the fourth (+4) nucleotide. In certain embodiments, the ds oligonucleotides comprising a guide strand backbone phosphoryl guanidine chiral center in the Sp configuration between the +3 nucleotide and the immediately downstream (+4) nucleotide, i.e., in the 3′ direction, comprise a modified sugar at the fifth (+5) nucleotide. In certain embodiments, the ds oligonucleotides comprising a guide strand backbone phosphoryl guanidine chiral center in the Sp configuration between the +3 nucleotide and the immediately downstream (+4) nucleotide, i.e., in the 3′ direction, comprise a modified sugar at the sixth (+6) nucleotide.

[0360] In certain embodiments, the modified sugar comprises a 2′-F modification, 2′-H modification, 2′-OH modification, 2′-O-alkyl modification, e.g., 2′-O-methyl (OMe) modification, 2′-methoxyethyl (MOE) modification, 5′-alkyl modification, e.g., 5′-(R)-methyl or 5′-(S)-methyl, DNA, locked nucleic acid (LNA), unlocked nucleic acid (UNA), glycol nucleic acid (GNA), or Homo-DNA. In certain embodiments, the ds oligonucleotides comprising a guide strand backbone phosphoryl guanidine chiral center in the Sp configuration between the +3 nucleotide and the immediately downstream (+4) nucleotide, i.e., in the 3′ direction, comprise a 2′-F modification of the 5′ terminal (+1) nucleotide, second (+2) nucleotide, third (+3) nucleotide, fourth (+4) nucleotide, fifth (+5) nucleotide, and/or sixth (+6) nucleotide. In certain embodiments, the ds oligonucleotides comprising a guide strand backbone phosphoryl guanidine chiral center in the Sp configuration between the +3 nucleotide and the immediately downstream (+4) nucleotide, i.e., in the 3′ direction, comprise a 2′-F modification of the 5′ terminal (+1) nucleotide. In certain embodiments, the ds oligonucleotides comprising a guide strand backbone phosphoryl guanidine chiral center in the Sp configuration between the +3 nucleotide and the immediately downstream (+4) nucleotide, i.e., in the 3′ direction, comprise a 2′-F modification of the second (+2) nucleotide. In certain embodiments, the ds oligonucleotides comprising a guide strand backbone phosphoryl guanidine chiral center in the Sp configuration between the +3 nucleotide and the immediately downstream (+4) nucleotide, i.e., in the 3′ direction, comprise a 2′-F modification of the third (+3) nucleotide. In certain embodiments, the ds oligonucleotides comprising a guide strand backbone phosphoryl guanidine chiral center in the Sp configuration between the +3 nucleotide and the immediately downstream (+4) nucleotide, i.e., in the 3′ direction, comprise a 2′-F modification of the fourth (+4) nucleotide. In certain embodiments, the ds oligonucleotides comprising a guide strand backbone phosphoryl guanidine chiral center in the Sp configuration between the +3 nucleotide and the immediately downstream (+4) nucleotide, i.e., in the 3′ direction, comprise a 2′-F modification of the fifth (+5) nucleotide. In certain embodiments, the ds oligonucleotides comprising a guide strand backbone phosphoryl guanidine chiral center in the Sp configuration between the +3 nucleotide and the immediately downstream (+4) nucleotide, i.e., in the 3′ direction, comprise a 2′-F modification of the sixth (+6) nucleotide.

[0361] In certain embodiments, the one or more Rp, Sp, or stereorandom non-negatively charged internucleotidic linkage incorporated into the guide or passenger strand is an Rp non-negatively charged internucleotidic linkage. In certain embodiments, the one or more Rp, Sp, or stereorandom non-negatively charged internucleotidic linkage is an Sp non-negatively charged internucleotidic linkage. In certain embodiments, the one or more Rp, Sp, or stereorandom non-negatively charged internucleotidic linkage is a stereorandom non-negatively charged internucleotidic linkage. In certain further embodiments, the passenger strand comprises an Sp backbone phosphorothioate chiral center between the 5′ terminal (+1) nucleotide and the immediately downstream (+2) nucleotide and an Sp backbone phosphorothioate chiral center between the penultimate (N-1) nucleotide and the 3′ terminal (N) nucleotide.

[0362] In certain embodiments, the ds oligonucleotide comprises a guide strand backbone phosphoryl guanidine chiral center in the Sp configuration between the +3 nucleotide and the immediately downstream (+4) nucleotide, i.e., in the 3′ direction, and the guide strand further comprises one or more Rp, Sp, or stereorandom non-negatively charged internucleotidic linkage occurs between the second (+2) and third (+3) nucleotides, relative to the 5′ terminal nucleotide, of the guide strand and the internucleotidic linkage to the penultimate 3′ (N-1) nucleotide, and one or more of.
[0363] (1) a guide strand where one or both of the 5′ and 3′ terminal dinucleotides are not linked by non-negatively charged internucleotidic linkages, i.e., the guide strand comprises one more non-negatively charged internucleotidic linkages downstream, i.e., in the 3′ direction, relative to the linkage between the 5′ terminal dinucleotide and/or upstream, i.e., in the 5′ direction, relative to the linkage between the 3′ terminal dinucleotide;
[0364] (2) a guide strand where one or more Rp, Sp, or stereorandom non-negatively charged internucleotidic linkage occurs between any two adjacent nucleotides between the second (+2) nucleotide relative to the 5′ terminal nucleotide of the guide strand and the penultimate 3′ (N-1) nucleotide of the guide strand, where N is the 3′ terminal nucleotide;
[0365] (3) a guide strand where an Rp, Sp, or stereorandom non-negatively charged internucleotidic linkage occurs between the tenth (+10) and eleventh (+11) nucleotides, relative to the 5′ terminal nucleotide;
[0366] (4) a guide strand where an Rp, Sp, or stereorandom non-negatively charged internucleotidic linkage occurs between the seventh (+7) and eighth (+8) nucleotides, relative to the 5′ terminal nucleotide;
[0367] (5) a guide strand comprising one or more backbone phosphorothioate chiral centers in Rp or Sp configuration where linkage occurs between any two adjacent nucleotides between the penultimate 3′ nucleotide of the guide strand, where N is the 3′ terminal nucleotide, and the upstream N-10 nucleotide;
[0368] (6) a passenger strand where one or more Rp, Sp, or stereorandom non-negatively charged internucleotidic linkage occurs upstream, i.e., in the 5′ direction, relative to the central nucleotide of the passenger strand;
[0369] (7) a passenger strand where one or more Rp, Sp, or stereorandom non-negatively charged internucleotidic linkage occurs downstream, i.e., in the 3′ direction, relative to the central nucleotide of the passenger strand;
[0370] (8) a passenger strand where one or more backbone phosphorothioate chiral centers in Rp or Sp configuration internucleotidic linkage occurs upstream, i.e., in the 5′ direction, relative to the central nucleotide of the passenger strand;
[0371] (9) a passenger strand where one or more backbone phosphorothioate chiral centers in Rp or Sp configuration internucleotidic linkage internucleotidic linkage occurs downstream, i.e., in the 3′ direction, relative to the central nucleotide of the passenger strand; and
[0372] (10) a passenger strand comprising one or more modified sugars, e.g. Homo-DNA, between the 5′ terminal (+1) nucleotide and the penultimate (N-1) nucleotide.
   In certain embodiments, the ds oligonucleotide further comprises a 2′ modification, e.g., a 2′ F modification, of the 3′ nucleotide of a nucleotide pair linked by an Rp, Sp, or stereorandom non-negatively charged internucleotidic linkage, and the passenger strand comprises 0-n Rp, Sp, or stereorandom non-negatively charged internucleotidic linkages, where n is about 1 to 49.

[0373] In certain embodiments, the ds oligonucleotides comprising a guide strand backbone phosphoryl guanidine chiral center in the Sp configuration between the +3 nucleotide and the immediately downstream (+4) nucleotide, i.e., in the 3′ direction, further comprise one or a plurality of modified sugars. In certain embodiments, the ds oligonucleotides comprising a guide strand backbone phosphoryl guanidine chiral center in the Sp configuration between the +3 nucleotide and the immediately downstream (+4) nucleotide, i.e., in the 3′ direction, comprise a modified sugar at the 5′ terminal (+1) nucleotide, second (+2) nucleotide, third (+3) nucleotide, fourth (+4) nucleotide, fifth (+5) nucleotide, sixth (+6) nucleotide, seventh (+7) nucleotide, eighth (+8) nucleotide, ninth (+9) nucleotide, tenth (+10) nucleotide, twelfth (+12) nucleotide, sixteenth (+16) nucleotide, seventeenth (+17) nucleotide, eighteenth (+18) nucleotide, nineteenth (+19) nucleotide, twentieth (+20) nucleotide, twenty-first (+21) nucleotide, twenty-second (+22), and/or twenty-third (+23), the 3′ terminal, nucleotide. In certain embodiments, the ds oligonucleotides comprising a guide strand backbone phosphoryl guanidine chiral center in the Sp configuration between the +3 nucleotide and the immediately downstream (+4) nucleotide, i.e., in the 3′ direction, comprise a modified sugar at the 5′ terminal (+1) nucleotide. In certain embodiments, the ds oligonucleotides comprising a guide strand backbone phosphoryl guanidine chiral center in the Sp configuration between the +3 nucleotide and the immediately downstream (+4) nucleotide, i.e., in the 3′ direction, comprise a modified sugar at the second (+2) nucleotide. In certain embodiments, the ds oligonucleotides comprising a guide strand backbone phosphoryl guanidine chiral center in the Sp configuration between the +3 nucleotide and the immediately downstream (+4) nucleotide, i.e., in the 3′ direction, comprise a modified sugar at the third (+3) nucleotide. In certain embodiments, the ds oligonucleotides comprising a guide strand backbone phosphoryl guanidine chiral center in the Sp configuration between the +3 nucleotide and the immediately downstream (+4) nucleotide, i.e., in the 3′ direction, comprise a modified sugar at the fourth (+4) nucleotide. In certain embodiments, the ds oligonucleotides comprising a guide strand backbone phosphoryl guanidine chiral center in the Sp configuration between the +3 nucleotide and the immediately downstream (+4) nucleotide, i.e., in the 3′ direction, comprise a modified sugar at the fifth (+5) nucleotide. In certain embodiments, the ds oligonucleotides comprising a guide strand backbone phosphoryl guanidine chiral center in the Sp configuration between the +3 nucleotide and the immediately downstream (+4) nucleotide, i.e., in the 3′ direction, comprise a modified sugar at the sixth (+6) nucleotide. In certain embodiments, the modified sugar comprises a 2′-F modification, 2′-H modification, 2′-OH modification, 2′-O-alkyl modification, e.g., 2′-O-methyl (OMe) modification, 2′-methoxyethyl (MOE) modification, 5′-alkyl modification, e.g., 5′-(R)-methyl or 5′-(S)-methyl, DNA, locked nucleic acid (LNA), unlocked nucleic acid (UNA), glycol nucleic acid (GNA), or Homo-DNA. In certain embodiments, the ds oligonucleotides comprising a guide strand backbone phosphoryl guanidine chiral center in the Sp configuration between the +3 nucleotide and the immediately downstream (+4) nucleotide, i.e., in the 3′ direction, comprise a 2′-F modification of the 5′ terminal (+1) nucleotide, second (+2) nucleotide, third (+3) nucleotide, fourth (+4) nucleotide, fifth (+5) nucleotide, and/or sixth (+6) nucleotide. In certain embodiments, the ds oligonucleotides comprising a guide strand backbone phosphoryl guanidine chiral center in the Sp configuration between the +3 nucleotide and the immediately downstream (+4) nucleotide, i.e., in the 3′ direction, comprise a 2′-F modification of the 5′ terminal (+1) nucleotide. In certain embodiments, the ds oligonucleotides comprising a guide strand backbone phosphoryl guanidine chiral center in the Sp configuration between the +3 nucleotide and the immediately downstream (+4) nucleotide, i.e., in the 3′ direction, comprise a 2′-F modification of the second (+2) nucleotide. In certain embodiments, the ds oligonucleotides comprising a guide strand backbone phosphoryl guanidine chiral center in the Sp configuration between the +3 nucleotide and the immediately downstream (+4) nucleotide, i.e., in the 3′ direction, comprise a 2′-F modification of the third (+3) nucleotide. In certain embodiments, the ds oligonucleotides comprising a guide strand backbone phosphoryl guanidine chiral center in the Sp configuration between the +3 nucleotide and the immediately downstream (+4) nucleotide, i.e., in the 3′ direction, comprise a 2′-F modification of the fourth (+4) nucleotide. In certain embodiments, the ds oligonucleotides comprising a guide strand backbone phosphoryl guanidine chiral center in the Sp configuration between the +3 nucleotide and the immediately downstream (+4) nucleotide, i.e., in the 3′ direction, comprise a 2′-F modification of the fifth (+5) nucleotide. In certain embodiments, the ds oligonucleotides comprising a guide strand backbone phosphoryl guanidine chiral center in the Sp configuration between the +3 nucleotide and the immediately downstream (+4) nucleotide, i.e., in the 3′ direction, comprise a 2′-F modification of the sixth (+6) nucleotide.

[0374] In certain embodiments, the one or more Rp, Sp, or stereorandom non-negatively charged internucleotidic linkage incorporated into the guide or passenger strand is an Rp non-negatively charged internucleotidic linkage. In certain embodiments, the one or more Rp, Sp, or stereorandom non-negatively charged internucleotidic linkage is an Sp non-negatively charged internucleotidic linkage. In certain embodiments, the one or more Rp, Sp, or stereorandom non-negatively charged internucleotidic linkage is a stereorandom non-negatively charged internucleotidic linkage. In certain embodiments, the passenger strand comprises an Sp backbone phosphorothioate chiral center between the 5′ terminal (+1) nucleotide and the immediately downstream (+2) nucleotide and an Sp backbone phosphorothioate chiral center between the penultimate (N-1) nucleotide and the 3′ terminal (N) nucleotide.

[0375] In certain embodiments, the ds oligonucleotide comprises a guide strand backbone phosphoryl guanidine chiral center in the Sp configuration between the +3 nucleotide and the immediately downstream (+4) nucleotide, i.e., in the 3′ direction, and the guide strand further comprises backbone phosphorothioate chiral centers in Sp configuration between the 3′ terminal nucleotide and the penultimate (N-1) nucleotide and as between the penultimate (N-1) nucleotide and the immediately upstream (N-2) nucleotide, and one or more of
[0376] (1) a guide strand where one or both of the 5′ and 3′ terminal dinucleotides are not linked by non-negatively charged internucleotidic linkages, i.e., the guide strand comprises one more non-negatively charged internucleotidic linkages downstream, i.e., in the 3′ direction, relative to the linkage between the 5′ terminal dinucleotide and/or upstream, i.e., in the 5′ direction, relative to the linkage between the 3′ terminal dinucleotide;
[0377] (2) a guide strand where one or more Rp, Sp, or stereorandom non-negatively charged internucleotidic linkage occurs between any two adjacent nucleotides between the second (+2) nucleotide relative to the 5′ terminal nucleotide of the guide strand and the penultimate 3′ (N-1) nucleotide of the guide strand, where N is the 3′ terminal nucleotide;
[0378] (3) a guide strand where an Rp, Sp, or stereorandom non-negatively charged internucleotidic linkage occurs between the tenth (+10) and eleventh (+11) nucleotides, relative to the 5′ terminal nucleotide;
[0379] (4) a guide strand where an Rp, Sp, or stereorandom non-negatively charged internucleotidic linkage occurs between the seventh (+7) and eighth (+8) nucleotides, relative to the 5′ terminal nucleotide;
[0380] (5) a guide strand comprising one or more backbone phosphorothioate chiral centers in Rp or Sp configuration where linkage occurs between any two adjacent nucleotides between the penultimate 3′ nucleotide of the guide strand, where N is the 3′ terminal nucleotide, and the upstream N-10 nucleotide;
[0381] (6) a passenger strand where one or more Rp, Sp, or stereorandom non-negatively charged internucleotidic linkage occurs upstream, i.e., in the 5′ direction, relative to the central nucleotide of the passenger strand;
[0382] (7) a passenger strand where one or more Rp, Sp, or stereorandom non-negatively charged internucleotidic linkage occurs downstream, i.e., in the 3′ direction, relative to the central nucleotide of the passenger strand;
[0383] (8) a passenger strand where one or more backbone phosphorothioate chiral centers in Rp or Sp configuration internucleotidic linkage occurs upstream, i.e., in the 5′ direction, relative to the central nucleotide of the passenger strand;
[0384] (9) a passenger strand where one or more backbone phosphorothioate chiral centers in Rp or Sp configuration internucleotidic linkage internucleotidic linkage occurs downstream, i.e., in the 3′ direction, relative to the central nucleotide of the passenger strand; and
[0385] (10) a passenger strand comprising one or more modified sugars, e.g. Homo-DNA, between the 5′ terminal (+1) nucleotide and the penultimate (N-1) nucleotide.
   In certain embodiments, the ds oligonucleotide further comprises a 2′ modification, e.g., a 2′ F modification, of the 3′ nucleotide of a nucleotide pair linked by an Rp, Sp, or stereorandom non-negatively charged internucleotidic linkage, and the passenger strand comprises one or more backbone phosphorothioate chiral centers in Rp or Sp configuration. In certain embodiments, the one or more Rp, Sp, or stereorandom non-negatively charged internucleotidic linkage incorporated into the guide or passenger strand is an Rp non-negatively charged internucleotidic linkage. In certain embodiments, the one or more Rp, Sp, or stereorandom non-negatively charged internucleotidic linkage is an Sp non-negatively charged internucleotidic linkage. In certain embodiments, the one or more Rp, Sp, or stereorandom non-negatively charged internucleotidic linkage is a stereorandom non-negatively charged internucleotidic linkage. In certain embodiments, the ds oligonucleotides comprising a guide strand backbone phosphoryl guanidine chiral center in the Sp configuration between the +3 nucleotide and the immediately downstream (+4) nucleotide, i.e., in the 3′ direction, further comprise one or a plurality of modified sugars. In certain embodiments, the ds oligonucleotides comprising a guide strand backbone phosphoryl guanidine chiral center in the Sp configuration between the +3 nucleotide and the immediately downstream (+4) nucleotide, i.e., in the 3′ direction, comprise a modified sugar at the 5′ terminal (+1) nucleotide, second (+2) nucleotide, third (+3) nucleotide, fourth (+4) nucleotide, fifth (+5) nucleotide, sixth (+6) nucleotide, seventh (+7) nucleotide, eighth (+8) nucleotide, ninth (+9) nucleotide, tenth (+10) nucleotide, twelfth (+12) nucleotide, sixteenth (+16) nucleotide, seventeenth (+17) nucleotide, eighteenth (+18) nucleotide, nineteenth (+19) nucleotide, twentieth (+20) nucleotide, twenty-first (+21) nucleotide, twenty-second (+22), and/or twenty-third (+23), the 3′ terminal, nucleotide. In certain embodiments, the ds oligonucleotides comprising a guide strand backbone phosphoryl guanidine chiral center in the Sp configuration between the +3 nucleotide and the immediately downstream (+4) nucleotide, i.e., in the 3′ direction, comprise a modified sugar at the 5′ terminal (+1) nucleotide. In certain embodiments, the ds oligonucleotides comprising a guide strand backbone phosphoryl guanidine chiral center in the Sp configuration between the +3 nucleotide and the immediately downstream (+4) nucleotide, i.e., in the 3′ direction, comprise a modified sugar at the second (+2) nucleotide. In certain embodiments, the ds oligonucleotides comprising a guide strand backbone phosphoryl guanidine chiral center in the Sp configuration between the +3 nucleotide and the immediately downstream (+4) nucleotide, i.e., in the 3′ direction, comprise a modified sugar at the third (+3) nucleotide. In certain embodiments, the ds oligonucleotides comprising a guide strand backbone phosphoryl guanidine chiral center in the Sp configuration between the +3 nucleotide and the immediately downstream (+4) nucleotide, i.e., in the 3′ direction, comprise a modified sugar at the fourth (+4) nucleotide. In certain embodiments, the ds oligonucleotides comprising a guide strand backbone phosphoryl guanidine chiral center in the Sp configuration between the +3 nucleotide and the immediately downstream (+4) nucleotide, i.e., in the 3′ direction, comprise a modified sugar at the fifth (+5) nucleotide. In certain embodiments, the ds oligonucleotides comprising a guide strand backbone phosphoryl guanidine chiral center in the Sp configuration between the +3 nucleotide and the immediately downstream (+4) nucleotide, i.e., in the 3′ direction, comprise a modified sugar at the sixth (+6) nucleotide. In certain embodiments, the modified sugar comprises a 2′-F modification, 2′-H modification, 2′-OH modification, 2′-O-alkyl modification, e.g., 2′-O-methyl (OMe) modification, 2′-methoxyethyl (MOE) modification, 5′-alkyl modification, e.g., 5′-(R)-methyl or 5′-(S)-methyl, DNA, locked nucleic acid (LNA), unlocked nucleic acid (UNA), glycol nucleic acid (GNA), or Homo-DNA. In certain embodiments, the ds oligonucleotides comprising a guide strand backbone phosphoryl guanidine chiral center in the Sp configuration between the +3 nucleotide and the immediately downstream (+4) nucleotide, i.e., in the 3′ direction, comprise a 2′-F modification of the 5′ terminal (+1) nucleotide, second (+2) nucleotide, third (+3) nucleotide, fourth (+4) nucleotide, fifth (+5) nucleotide, and/or sixth (+6) nucleotide. In certain embodiments, the ds oligonucleotides comprising a guide strand backbone phosphoryl guanidine chiral center in the Sp configuration between the +3 nucleotide and the immediately downstream (+4) nucleotide, i.e., in the 3′ direction, comprise a 2′-F modification of the 5′ terminal (+1) nucleotide. In certain embodiments, the ds oligonucleotides comprising a guide strand backbone phosphoryl guanidine chiral center in the Sp configuration between the +3 nucleotide and the immediately downstream (+4) nucleotide, i.e., in the 3′ direction, comprise a 2′-F modification of the second (+2) nucleotide. In certain embodiments, the ds oligonucleotides comprising a guide strand backbone phosphoryl guanidine chiral center in the Sp configuration between the +3 nucleotide and the immediately downstream (+4) nucleotide, i.e., in the 3′ direction, comprise a 2′-F modification of the third (+3) nucleotide. In certain embodiments, the ds oligonucleotides comprising a guide strand backbone phosphoryl guanidine chiral center in the Sp configuration between the +3 nucleotide and the immediately downstream (+4) nucleotide, i.e., in the 3′ direction, comprise a 2′-F modification of the fourth (+4) nucleotide. In certain embodiments, the ds oligonucleotides comprising a guide strand backbone phosphoryl guanidine chiral center in the Sp configuration between the +3 nucleotide and the immediately downstream (+4) nucleotide, i.e., in the 3′ direction, comprise a 2′-F modification of the fifth (+5) nucleotide. In certain embodiments, the ds oligonucleotides comprising a guide strand backbone phosphoryl guanidine chiral center in the Sp configuration between the +3 nucleotide and the immediately downstream (+4) nucleotide, i.e., in the 3′ direction, comprise a 2′-F modification of the sixth (+6) nucleotide.

[0386] In certain embodiments, the ds oligonucleotide comprises a guide strand backbone phosphoryl guanidine chiral center in the Sp configuration between the +3 nucleotide and the immediately downstream (+4) nucleotide, i.e., in the 3′ direction, and the guide strand comprises backbone phosphorothioate chiral centers in Rp, Sp, or alternating configurations between the 5′ terminal (+1) nucleotide and the immediately downstream (+2) nucleotide and between the +2 nucleotide and the immediately downstream (+3) nucleotide, and one or more of
[0387] (1) a guide strand where one or both of the 5′ and 3′ terminal dinucleotides are not linked by non-negatively charged internucleotidic linkages, i.e., the guide strand comprises one more non-negatively charged internucleotidic linkages downstream, i.e., in the 3′ direction, relative to the linkage between the 5′ terminal dinucleotide and/or upstream, i.e., in the 5′ direction, relative to the linkage between the 3′ terminal dinucleotide;
[0388] (2) a guide strand where one or more Rp, Sp, or stereorandom non-negatively charged internucleotidic linkage occurs between any two adjacent nucleotides between the second (+2) nucleotide relative to the 5′ terminal nucleotide of the guide strand and the penultimate 3′ (N-1) nucleotide of the guide strand, where N is the 3′ terminal nucleotide;
[0389] (3) a guide strand where an Rp, Sp, or stereorandom non-negatively charged internucleotidic linkage occurs between the tenth (+10) and eleventh (+11) nucleotides, relative to the 5′ terminal nucleotide;
[0390] (4) a guide strand where an Rp, Sp, or stereorandom non-negatively charged internucleotidic linkage occurs between the seventh (+7) and eighth (+8) nucleotides, relative to the 5′ terminal nucleotide;
[0391] (5) a guide strand comprising one or more backbone phosphorothioate chiral centers in Rp or Sp configuration where linkage occurs between any two adjacent nucleotides between the penultimate 3′ nucleotide of the guide strand, where N is the 3′ terminal nucleotide, and the upstream N-10 nucleotide;
[0392] (6) a passenger strand where one or more Rp, Sp, or stereorandom non-negatively charged internucleotidic linkage occurs upstream, i.e., in the 5′ direction, relative to the central nucleotide of the passenger strand;
[0393] (7) a passenger strand where one or more Rp, Sp, or stereorandom non-negatively charged internucleotidic linkage occurs downstream, i.e., in the 3′ direction, relative to the central nucleotide of the passenger strand;
[0394] (8) a passenger strand where one or more backbone phosphorothioate chiral centers in Rp or Sp configuration internucleotidic linkage occurs upstream, i.e., in the 5′ direction, relative to the central nucleotide of the passenger strand;
[0395] (9) a passenger strand where one or more backbone phosphorothioate chiral centers in Rp or Sp configuration internucleotidic linkage internucleotidic linkage occurs downstream, i.e., in the 3′ direction, relative to the central nucleotide of the passenger strand; and
[0396] (10) a passenger strand comprising one or more modified sugars, e.g. Homo-DNA, between the 5′ terminal (+1) nucleotide and the penultimate (N-1) nucleotide.
   wherein the ds oligonucleotide further comprises a 2′ modification, e.g., a 2′ F modification, of the 3′ nucleotide of a nucleotide pair linked by an Rp, Sp, or stereorandom-negatively charged internucleotidic linkage, and the passenger strand comprises one or more backbone chiral centers in Rp or Sp configuration. In certain embodiments, the one or more Rp, Sp, or stereorandom non-negatively charged internucleotidic linkage incorporated into the guide or passenger strand is an Rp non-negatively charged internucleotidic linkage. In certain embodiments, the one or more Rp, Sp, or stereorandom non-negatively charged internucleotidic linkage is an Sp non-negatively charged internucleotidic linkage. In certain embodiments, the one or more Rp, Sp, or stereorandom non-negatively charged internucleotidic linkage is a stereorandom non-negatively charged internucleotidic linkage. In certain embodiments, the ds oligonucleotides comprising a guide strand backbone phosphoryl guanidine chiral center in the Sp configuration between the +3 nucleotide and the immediately downstream (+4) nucleotide, i.e., in the 3′ direction, further comprise one or a plurality of modified sugars. In certain embodiments, the ds oligonucleotides comprising a guide strand backbone phosphoryl guanidine chiral center in the Sp configuration between the +3 nucleotide and the immediately downstream (+4) nucleotide, i.e., in the 3′ direction, comprise a modified sugar at the 5′ terminal (+1) nucleotide, second (+2) nucleotide, third (+3) nucleotide, fourth (+4) nucleotide, fifth (+5) nucleotide, sixth (+6) nucleotide, seventh (+7)nucleotide, eighth (+8) nucleotide, ninth (+9) nucleotide, tenth (+10) nucleotide, twelfth (+12) nucleotide, sixteenth (+16) nucleotide, seventeenth (+17) nucleotide, eighteenth (+18) nucleotide, nineteenth (+19) nucleotide, twentieth (+20) nucleotide, twenty-first (+21) nucleotide, twenty-second (+22), and/or twenty-third (+23), the 3′ terminal, nucleotide. In certain embodiments, the ds oligonucleotides comprising a guide strand backbone phosphoryl guanidine chiral center in the Sp configuration between the +3 nucleotide and the immediately downstream (+4) nucleotide, i.e., in the 3′ direction, comprise a modified sugar at the 5′ terminal (+1) nucleotide. In certain embodiments, the ds oligonucleotides comprising a guide strand backbone phosphoryl guanidine chiral center in the Sp configuration between the +3 nucleotide and the immediately downstream (+4) nucleotide, i.e., in the 3′ direction, comprise a modified sugar at the second (+2) nucleotide. In certain embodiments, the ds oligonucleotides comprising a guide strand backbone phosphoryl guanidine chiral center in the Sp configuration between the +3 nucleotide and the immediately downstream (+4) nucleotide, i.e., in the 3′ direction, comprise a modified sugar at the third (+3) nucleotide. In certain embodiments, the ds oligonucleotides comprising a guide strand backbone phosphoryl guanidine chiral center in the Sp configuration between the +3 nucleotide and the immediately downstream (+4) nucleotide, i.e., in the 3′ direction, comprise a modified sugar at the fourth (+4) nucleotide. In certain embodiments, the ds oligonucleotides comprising a guide strand backbone phosphoryl guanidine chiral center in the Sp configuration between the +3 nucleotide and the immediately downstream (+4) nucleotide, i.e., in the 3′ direction, comprise a modified sugar at the fifth (+5) nucleotide. In certain embodiments, the ds oligonucleotides comprising a guide strand backbone phosphoryl guanidine chiral center in the Sp configuration between the +3 nucleotide and the immediately downstream (+4) nucleotide, i.e., in the 3′ direction, comprise a modified sugar at the sixth (+6) nucleotide. In certain embodiments, the modified sugar comprises a 2′-F modification, 2′-H modification, 2′-OH modification, 2′-O-alkyl modification, e.g., 2′-O-methyl (OMe) modification, 2′-methoxyethyl (MOE) modification, 5′-alkyl modification, e.g., 5′-(R)-methyl or 5′-(S)-methyl, DNA, locked nucleic acid (LNA), unlocked nucleic acid (UNA), glycol nucleic acid (GNA), or Homo-DNA. In certain embodiments, the ds oligonucleotides comprising a guide strand backbone phosphoryl guanidine chiral center in the Sp configuration between the +3 nucleotide and the immediately downstream (+4) nucleotide, i.e., in the 3′ direction, comprise a 2′-F modification of the 5′ terminal (+1) nucleotide, second (+2) nucleotide, third (+3) nucleotide, fourth (+4) nucleotide, fifth (+5) nucleotide, and/or sixth (+6) nucleotide. In certain embodiments, the ds oligonucleotides comprising a guide strand backbone phosphoryl guanidine chiral center in the Sp configuration between the +3 nucleotide and the immediately downstream (+4) nucleotide, i.e., in the 3′ direction, comprise a 2′-F modification of the 5′ terminal (+1) nucleotide. In certain embodiments, the ds oligonucleotides comprising a guide strand backbone phosphoryl guanidine chiral center in the Sp configuration between the +3 nucleotide and the immediately downstream (+4) nucleotide, i.e., in the 3′ direction, comprise a 2′-F modification of the second (+2) nucleotide. In certain embodiments, the ds oligonucleotides comprising a guide strand backbone phosphoryl guanidine chiral center in the Sp configuration between the +3 nucleotide and the immediately downstream (+4) nucleotide, i.e., in the 3′ direction, comprise a 2′-F modification of the third (+3) nucleotide. In certain embodiments, the ds oligonucleotides comprising a guide strand backbone phosphoryl guanidine chiral center in the Sp configuration between the +3 nucleotide and the immediately downstream (+4) nucleotide, i.e., in the 3′ direction, comprise a 2′-F modification of the fourth (+4) nucleotide. In certain embodiments, the ds oligonucleotides comprising a guide strand backbone phosphoryl guanidine chiral center in the Sp configuration between the +3 nucleotide and the immediately downstream (+4) nucleotide, i.e., in the 3′ direction, comprise a 2′-F modification of the fifth (+5) nucleotide. In certain embodiments, the ds oligonucleotides comprising a guide strand backbone phosphoryl guanidine chiral center in the Sp configuration between the +3 nucleotide and the immediately downstream (+4) nucleotide, i.e., in the 3′ direction, comprise a 2′-F modification of the sixth (+6) nucleotide. In certain embodiments, the ds oligonucleotide comprises a guide strand backbone phosphoryl guanidine chiral center in the Sp configuration between the +3 nucleotide and the immediately downstream (+4) nucleotide, i.e., in the 3′ direction, and the guide strand further comprises one or more backbone phosphorothioate chiral centers in Rp or Sp configuration upstream of backbone chiral centers in Sp configuration between the 3′ terminal nucleotide and the penultimate (N-1) nucleotide and as between the penultimate (N-1) nucleotide and the immediately upstream (N-2) nucleotide, and one or more of:
[0397] (1) a guide strand where one or both of the 5′ and 3′ terminal dinucleotides are not linked by non-negatively charged internucleotidic linkages, i.e., the guide strand comprises one more non-negatively charged internucleotidic linkages downstream, i.e., in the 3′ direction, relative to the linkage between the 5′ terminal dinucleotide and/or upstream, i.e., in the 5′ direction, relative to the linkage between the 3′ terminal dinucleotide;
[0398] (2) a guide strand where one or more Rp, Sp, or stereorandom non-negatively charged internucleotidic linkage occurs between any two adjacent nucleotides between the second (+2) nucleotide relative to the 5′ terminal nucleotide of the guide strand and the penultimate 3′ (N-1) nucleotide of the guide strand, where N is the 3′ terminal nucleotide;
[0399] (3) a guide strand where an Rp, Sp, or stereorandom non-negatively charged internucleotidic linkage occurs between the tenth (+10) and eleventh (+11) nucleotides, relative to the 5′ terminal nucleotide;
[0400] (4) a guide strand where an Rp, Sp, or stereorandom non-negatively charged internucleotidic linkage occurs between the seventh (+7) and eighth (+8) nucleotides, relative to the 5′ terminal nucleotide;
[0401] (5) a guide strand comprising one or more backbone phosphorothioate chiral centers in Rp or Sp configuration where linkage occurs between any two adjacent nucleotides between the penultimate 3′ nucleotide of the guide strand, where N is the 3′ terminal nucleotide, and the upstream N-10 nucleotide;
[0402] (6) a passenger strand where one or more Rp, Sp, or stereorandom non-negatively charged internucleotidic linkage occurs upstream, i.e., in the 5′ direction, relative to the central nucleotide of the passenger strand;
[0403] (7) a passenger strand where one or more Rp, Sp, or stereorandom non-negatively charged internucleotidic linkage occurs downstream, i.e., in the 3′ direction, relative to the central nucleotide of the passenger strand;
[0404] (8) a passenger strand where one or more backbone phosphorothioate chiral centers in Rp or Sp configuration internucleotidic linkage occurs upstream, i.e., in the 5′ direction, relative to the central nucleotide of the passenger strand;
[0405] (9) a passenger strand where one or more backbone phosphorothioate chiral centers in Rp or Sp configuration internucleotidic linkage internucleotidic linkage occurs downstream, i.e., in the 3′ direction, relative to the central nucleotide of the passenger strand; and
[0406] (10) a passenger strand comprising one or more modified sugars, e.g. Homo-DNA, between the 5′ terminal (+1) nucleotide and the penultimate (N-1) nucleotide.

[0407] In certain embodiments, the ds oligonucleotide further comprises a 2′ modification, e.g., a 2′ F modification, of the 3′ nucleotide of a nucleotide pair linked by an Rp, Sp, or stereorandom non-negatively charged internucleotidic linkage, and the passenger strand comprises one or more backbone chiral centers in Rp or Sp configuration. In certain embodiments, the one or more Rp, Sp, or stereorandom non-negatively charged internucleotidic linkage incorporated into the guide or passenger strand is an Rp non-negatively charged internucleotidic linkage. In certain embodiments, the one or more Rp, Sp, or stereorandom non-negatively charged internucleotidic linkage is an Sp non-negatively charged internucleotidic linkage. In certain embodiments, the one or more Rp, Sp, or stereorandom non-negatively charged internucleotidic linkage is a stereorandom non-negatively charged internucleotidic linkage. In certain embodiments, the ds oligonucleotides comprising a guide strand backbone phosphoryl guanidine chiral center in the Sp configuration between the +3 nucleotide and the immediately downstream (+4) nucleotide, i.e., in the 3′ direction, further comprise one or a plurality of modified sugars. In certain embodiments, the ds oligonucleotides comprising a guide strand backbone phosphoryl guanidine chiral center in the Sp configuration between the +3 nucleotide and the immediately downstream (+4) nucleotide, i.e., in the 3′ direction, comprise a modified sugar at the 5′ terminal (+1) nucleotide, second (+2) nucleotide, third (+3) nucleotide, fourth (+4) nucleotide, fifth (+5) nucleotide, sixth (+6) nucleotide, seventh (+7) nucleotide, eighth (+8) nucleotide, ninth (+9) nucleotide, tenth (+10) nucleotide, twelfth (+12) nucleotide, sixteenth (+16) nucleotide, seventeenth (+17) nucleotide, eighteenth (+18) nucleotide, nineteenth (+19) nucleotide, twentieth (+20) nucleotide, twenty-first (+21) nucleotide, twenty-second (+22), and/or twenty-third (+23), the 3′ terminal, nucleotide. In certain embodiments, the ds oligonucleotides comprising a guide strand backbone phosphoryl guanidine chiral center in the Sp configuration between the +3 nucleotide and the immediately downstream (+4) nucleotide, i.e., in the 3′ direction, comprise a modified sugar at the 5′ terminal (+1) nucleotide. In certain embodiments, the ds oligonucleotides comprising a guide strand backbone phosphoryl guanidine chiral center in the Sp configuration between the +3 nucleotide and the immediately downstream (+4) nucleotide, i.e., in the 3′ direction, comprise a modified sugar at the second (+2) nucleotide. In certain embodiments, the ds oligonucleotides comprising a guide strand backbone phosphoryl guanidine chiral center in the Sp configuration between the +3 nucleotide and the immediately downstream (+4) nucleotide, i.e., in the 3′ direction, comprise a modified sugar at the third (+3) nucleotide. In certain embodiments, the ds oligonucleotides comprising a guide strand backbone phosphoryl guanidine chiral center in the Sp configuration between the +3 nucleotide and the immediately downstream (+4) nucleotide, i.e., in the 3′ direction, comprise a modified sugar at the fourth (+4) nucleotide. In certain embodiments, the ds oligonucleotides comprising a guide strand backbone phosphoryl guanidine chiral center in the Sp configuration between the +3 nucleotide and the immediately downstream (+4) nucleotide, i.e., in the 3′ direction, comprise a modified sugar at the fifth (+5) nucleotide. In certain embodiments, the ds oligonucleotides comprising a guide strand backbone phosphoryl guanidine chiral center in the Sp configuration between the +3 nucleotide and the immediately downstream (+4) nucleotide, i.e., in the 3′ direction, comprise a modified sugar at the sixth (+6) nucleotide. In certain embodiments, the modified sugar comprises a 2′-F modification, 2′-H modification, 2′-OH modification, 2′-O-alkyl modification, e.g., 2′-O-methyl (OMe) modification, 2′-methoxyethyl (MOE) modification, 5′-alkyl modification, e.g., 5′-(R)-methyl or 5′-(S)-methyl, DNA, locked nucleic acid (LNA), unlocked nucleic acid (UNA), glycol nucleic acid (GNA), or Homo-DNA. In certain embodiments, the ds oligonucleotides comprising a guide strand backbone phosphoryl guanidine chiral center in the Sp configuration between the +3 nucleotide and the immediately downstream (+4) nucleotide, i.e., in the 3′ direction, comprise a 2′-F modification of the 5′ terminal (+1) nucleotide, second (+2) nucleotide, third (+3) nucleotide, fourth (+4) nucleotide, fifth (+5) nucleotide, and/or sixth (+6) nucleotide. In certain embodiments, the ds oligonucleotides comprising a guide strand backbone phosphoryl guanidine chiral center in the Sp configuration between the +3 nucleotide and the immediately downstream (+4) nucleotide, i.e., in the 3′ direction, comprise a 2′-F modification of the 5′ terminal (+1) nucleotide. In certain embodiments, the ds oligonucleotides comprising a guide strand backbone phosphoryl guanidine chiral center in the Sp configuration between the +3 nucleotide and the immediately downstream (+4) nucleotide, i.e., in the 3′ direction, comprise a 2′-F modification of the second (+2) nucleotide. In certain embodiments, the ds oligonucleotides comprising a guide strand backbone phosphoryl guanidine chiral center in the Sp configuration between the +3 nucleotide and the immediately downstream (+4) nucleotide, i.e., in the 3′ direction, comprise a 2′-F modification of the third (+3) nucleotide. In certain embodiments, the ds oligonucleotides comprising a guide strand backbone phosphoryl guanidine chiral center in the Sp configuration between the +3 nucleotide and the immediately downstream (+4) nucleotide, i.e., in the 3′ direction, comprise a 2′-F modification of the fourth (+4) nucleotide. In certain embodiments, the ds oligonucleotides comprising a guide strand backbone phosphoryl guanidine chiral center in the Sp configuration between the +3 nucleotide and the immediately downstream (+4) nucleotide, i.e., in the 3′ direction, comprise a 2′-F modification of the fifth (+5) nucleotide. In certain embodiments, the ds oligonucleotides comprising a guide strand backbone phosphoryl guanidine chiral center in the Sp configuration between the +3 nucleotide and the immediately downstream (+4) nucleotide, i.e., in the 3′ direction, comprise a 2′-F modification of the sixth (+6) nucleotide.

[0408] In certain embodiments, the ds oligonucleotide comprises a guide strand backbone phosphoryl guanidine chiral center in the Sp configuration between the +3 nucleotide and the immediately downstream (+4) nucleotide, i.e., in the 3′ direction, and the guide strand further comprises one or more backbone phosphorothioate chiral centers in Rp or Sp configuration where linkage occurs between any two adjacent nucleotides between the penultimate 3′ nucleotide of the guide strand, where N is the 3′ terminal nucleotide, and the upstream N-10 nucleotide, and one or more of.
[0409] (1) a guide strand where one or both of the 5′ and 3′ terminal dinucleotides are not linked by non-negatively charged internucleotidic linkages, i.e., the guide strand comprises one more non-negatively charged internucleotidic linkages downstream, i.e., in the 3′ direction, relative to the linkage between the 5′ terminal dinucleotide and/or upstream, i.e., in the 5′ direction, relative to the linkage between the 3′ terminal dinucleotide;
[0410] (2) a guide strand where one or more Rp, Sp, or stereorandom non-negatively charged internucleotidic linkage occurs between any two adjacent nucleotides between the second (+2) nucleotide relative to the 5′ terminal nucleotide of the guide strand and the penultimate 3′ (N-1) nucleotide of the guide strand, where N is the 3′ terminal nucleotide;
[0411] (3) a guide strand where an Rp, Sp, or stereorandom non-negatively charged internucleotidic linkage occurs between the tenth (+10) and eleventh (+11) nucleotides, relative to the 5′ terminal nucleotide;
[0412] (4) a guide strand where an Rp, Sp, or stereorandom non-negatively charged internucleotidic linkage occurs between the seventh (+7) and eighth (+8) nucleotides, relative to the 5′ terminal nucleotide;
[0413] (5) a guide strand comprising one or more backbone phosphorothioate chiral centers in Rp or Sp configuration where linkage occurs between any two adjacent nucleotides between the penultimate 3′ nucleotide of the guide strand, where N is the 3′ terminal nucleotide, and the upstream N-10 nucleotide;
[0414] (6) a passenger strand where one or more Rp, Sp, or stereorandom non-negatively charged internucleotidic linkage occurs upstream, i.e., in the 5′ direction, relative to the central nucleotide of the passenger strand;
[0415] (7) a passenger strand where one or more Rp, Sp, or stereorandom non-negatively charged internucleotidic linkage occurs downstream, i.e., in the 3′ direction, relative to the central nucleotide of the passenger strand;
[0416] (8) a passenger strand where one or more backbone phosphorothioate chiral centers in Rp or Sp configuration internucleotidic linkage occurs upstream, i.e., in the 5′ direction, relative to the central nucleotide of the passenger strand;
[0417] (9) a passenger strand where one or more backbone phosphorothioate chiral centers in Rp or Sp configuration internucleotidic linkage internucleotidic linkage occurs downstream, i.e., in the 3′ direction, relative to the central nucleotide of the passenger strand; and
[0418] (10) a passenger strand comprising one or more modified sugars, e.g. Homo-DNA, between the 5′ terminal (+1) nucleotide and the penultimate (N-1) nucleotide.
   In certain embodiments, the ds oligonucleotide further comprises a 2′ modification, e.g., a 2′ F modification, of the 3′ nucleotide of a nucleotide pair linked by an Rp, Sp, or stereorandom non-negatively charged internucleotidic linkage, and the passenger strand comprises one or more backbone chiral centers in Rp or Sp configuration. In certain embodiments, the one or more Rp, Sp, or stereorandom non-negatively charged internucleotidic linkage incorporated into the guide or passenger strand is an Rp non-negatively charged internucleotidic linkage. In certain embodiments, the one or more Rp, Sp, or stereorandom non-negatively charged internucleotidic linkage is an Sp non-negatively charged internucleotidic linkage. In certain embodiments, the one or more Rp, Sp, or stereorandom non-negatively charged internucleotidic linkage is a stereorandom non-negatively charged internucleotidic linkage. In certain embodiments, the ds oligonucleotides comprising a guide strand backbone phosphoryl guanidine chiral center in the Sp configuration between the +3 nucleotide and the immediately downstream (+4) nucleotide, i.e., in the 3′ direction, further comprise one or a plurality of modified sugars. In certain embodiments, the ds oligonucleotides comprising a guide strand backbone phosphoryl guanidine chiral center in the Sp configuration between the +3 nucleotide and the immediately downstream (+4) nucleotide, i.e., in the 3′ direction, comprise a modified sugar at the 5′ terminal (+1) nucleotide, second (+2) nucleotide, third (+3) nucleotide, fourth (+4) nucleotide, fifth (+5) nucleotide, sixth (+6) nucleotide, seventh (+7) nucleotide, eighth (+8) nucleotide, ninth (+9) nucleotide, tenth (+10) nucleotide, twelfth (+12) nucleotide, sixteenth (+16) nucleotide, seventeenth (+17) nucleotide, eighteenth (+18) nucleotide, nineteenth (+19) nucleotide, twentieth (+20) nucleotide, twenty-first (+21) nucleotide, twenty-second (+22), and/or twenty-third (+23), the 3′ terminal, nucleotide. In certain embodiments, the ds oligonucleotides comprising a guide strand backbone phosphoryl guanidine chiral center in the Sp configuration between the +3 nucleotide and the immediately downstream (+4) nucleotide, i.e., in the 3′ direction, comprise a modified sugar at the 5′ terminal (+1) nucleotide. In certain embodiments, the ds oligonucleotides comprising a guide strand backbone phosphoryl guanidine chiral center in the Sp configuration between the +3 nucleotide and the immediately downstream (+4) nucleotide, i.e., in the 3′ direction, comprise a modified sugar at the second (+2) nucleotide. In certain embodiments, the ds oligonucleotides comprising a guide strand backbone phosphoryl guanidine chiral center in the Sp configuration between the +3 nucleotide and the immediately downstream (+4) nucleotide, i.e., in the 3′ direction, comprise a modified sugar at the third (+3) nucleotide. In certain embodiments, the ds oligonucleotides comprising a guide strand backbone phosphoryl guanidine chiral center in the Sp configuration between the +3 nucleotide and the immediately downstream (+4) nucleotide, i.e., in the 3′ direction, comprise a modified sugar at the fourth (+4) nucleotide. In certain embodiments, the ds oligonucleotides comprising a guide strand backbone phosphoryl guanidine chiral center in the Sp configuration between the +3 nucleotide and the immediately downstream (+4) nucleotide, i.e., in the 3′ direction, comprise a modified sugar at the fifth (+5) nucleotide. In certain embodiments, the ds oligonucleotides comprising a guide strand backbone phosphoryl guanidine chiral center in the Sp configuration between the +3 nucleotide and the immediately downstream (+4) nucleotide, i.e., in the 3′ direction, comprise a modified sugar at the sixth (+6) nucleotide. In certain embodiments, the modified sugar comprises a 2′-F modification, 2′-H modification, 2′-OH modification, 2′-O-alkyl modification, e.g., 2′-O-methyl (OMe) modification, 2′-methoxyethyl (MOE) modification, 5′-alkyl modification, e.g., 5′-(R)-methyl or 5′-(S)-methyl, DNA, locked nucleic acid (LNA), unlocked nucleic acid (UNA), glycol nucleic acid (GNA), or Homo-DNA. In certain embodiments, the ds oligonucleotides comprising a guide strand backbone phosphoryl guanidine chiral center in the Sp configuration between the +3 nucleotide and the immediately downstream (+4) nucleotide, i.e., in the 3′ direction, comprise a 2′-F modification of the 5′ terminal (+1) nucleotide, second (+2) nucleotide, third (+3) nucleotide, fourth (+4) nucleotide, fifth (+5) nucleotide, and/or sixth (+6) nucleotide. In certain embodiments, the ds oligonucleotides comprising a guide strand backbone phosphoryl guanidine chiral center in the Sp configuration between the +3 nucleotide and the immediately downstream (+4) nucleotide, i.e., in the 3′ direction, comprise a 2′-F modification of the 5′ terminal (+1) nucleotide. In certain embodiments, the ds oligonucleotides comprising a guide strand backbone phosphoryl guanidine chiral center in the Sp configuration between the +3 nucleotide and the immediately downstream (+4) nucleotide, i.e., in the 3′ direction, comprise a 2′-F modification of the second (+2) nucleotide. In certain embodiments, the ds oligonucleotides comprising a guide strand backbone phosphoryl guanidine chiral center in the Sp configuration between the +3 nucleotide and the immediately downstream (+4) nucleotide, i.e., in the 3′ direction, comprise a 2′-F modification of the third (+3) nucleotide. In certain embodiments, the ds oligonucleotides comprising a guide strand backbone phosphoryl guanidine chiral center in the Sp configuration between the +3 nucleotide and the immediately downstream (+4) nucleotide, i.e., in the 3′ direction, comprise a 2′-F modification of the fourth (+4) nucleotide. In certain embodiments, the ds oligonucleotides comprising a guide strand backbone phosphoryl guanidine chiral center in the Sp configuration between the +3 nucleotide and the immediately downstream (+4) nucleotide, i.e., in the 3′ direction, comprise a 2′-F modification of the fifth (+5) nucleotide. In certain embodiments, the ds oligonucleotides comprising a guide strand backbone phosphoryl guanidine chiral center in the Sp configuration between the +3 nucleotide and the immediately downstream (+4) nucleotide, i.e., in the 3′ direction, comprise a 2′-F modification of the sixth (+6) nucleotide

[0419] In certain embodiments, the ds oligonucleotide comprises a guide strand backbone phosphoryl guanidine chiral center in the Sp configuration between the +3 nucleotide and the immediately downstream (+4) nucleotide, i.e., in the 3′ direction, and the guide strand further comprises a backbone phosphoryl guanidine chiral center in the Sp configuration between the +7 and the immediately downstream (+8) and one or more of.
[0420] (1) a guide strand where one or both of the 5′ and 3′ terminal dinucleotides are not linked by non-negatively charged internucleotidic linkages, i.e., the guide strand comprises one more non-negatively charged internucleotidic linkages downstream, i.e., in the 3′ direction, relative to the linkage between the 5′ terminal dinucleotide and/or upstream, i.e., in the 5′ direction, relative to the linkage between the 3′ terminal dinucleotide;
[0421] (2) a guide strand where one or more Rp, Sp, or stereorandom non-negatively charged internucleotidic linkage occurs between any two adjacent nucleotides between the second (+2) nucleotide relative to the 5′ terminal nucleotide of the guide strand and the penultimate 3′ (N-1) nucleotide of the guide strand, where N is the 3′ terminal nucleotide;
[0422] (3) a guide strand where an Rp, Sp, or stereorandom non-negatively charged internucleotidic linkage occurs between the tenth (+10) and eleventh (+11) nucleotides, relative to the 5′ terminal nucleotide;
[0423] (4) a guide strand where an Rp, Sp, or stereorandom non-negatively charged internucleotidic linkage occurs between the seventh (+7) and eighth (+8) nucleotides, relative to the 5′ terminal nucleotide;
[0424] (5) a guide strand comprising one or more backbone phosphorothioate chiral centers in Rp or Sp configuration where linkage occurs between any two adjacent nucleotides between the penultimate 3′ nucleotide of the guide strand, where N is the 3′ terminal nucleotide, and the upstream N-10 nucleotide;
[0425] (6) a passenger strand where one or more Rp, Sp, or stereorandom non-negatively charged internucleotidic linkage occurs upstream, i.e., in the 5′ direction, relative to the central nucleotide of the passenger strand;
[0426] (7) a passenger strand where one or more Rp, Sp, or stereorandom non-negatively charged internucleotidic linkage occurs downstream, i.e., in the 3′ direction, relative to the central nucleotide of the passenger strand;
[0427] (8) a passenger strand where one or more backbone phosphorothioate chiral centers in Rp or Sp configuration internucleotidic linkage occurs upstream, i.e., in the 5′ direction, relative to the central nucleotide of the passenger strand;
[0428] (9) a passenger strand where one or more backbone phosphorothioate chiral centers in Rp or Sp configuration internucleotidic linkage internucleotidic linkage occurs downstream, i.e., in the 3′ direction, relative to the central nucleotide of the passenger strand; and
[0429] (10) a passenger strand comprising one or more modified sugars, e.g. Homo-DNA, between the 5′ terminal (+1) nucleotide and the penultimate (N-1) nucleotide.
   In certain embodiments, the ds oligonucleotide further comprises a 2′ modification, e.g., a 2′ F modification, of the 3′ nucleotide of a nucleotide pair linked by an Rp, Sp, or stereorandom non-negatively charged internucleotidic linkage, and the passenger strand comprises one or more backbone chiral centers in Rp or Sp configuration. In certain embodiments, the one or more Rp, Sp, or stereorandom non-negatively charged internucleotidic linkage incorporated into the guide or passenger strand is an Rp non-negatively charged internucleotidic linkage. In certain embodiments, the one or more Rp, Sp, or stereorandom non-negatively charged internucleotidic linkage is an Sp non-negatively charged internucleotidic linkage. In certain embodiments, the one or more Rp, Sp, or stereorandom non-negatively charged internucleotidic linkage is a stereorandom non-negatively charged internucleotidic linkage. In certain embodiments, the ds oligonucleotides comprising a guide strand backbone phosphoryl guanidine chiral center in the Sp configuration between the +3 nucleotide and the immediately downstream (+4) nucleotide, i.e., in the 3′ direction, further comprise one or a plurality of modified sugars. In certain embodiments, the ds oligonucleotides comprising a guide strand backbone phosphoryl guanidine chiral center in the Sp configuration between the +3 nucleotide and the immediately downstream (+4) nucleotide, i.e., in the 3′ direction, comprise a modified sugar at the 5′ terminal (+1) nucleotide, second (+2) nucleotide, third (+3) nucleotide, fourth (+4) nucleotide, fifth (+5) nucleotide, sixth (+6) nucleotide, seventh (+7) nucleotide, eighth (+8) nucleotide, ninth (+9) nucleotide, tenth (+10) nucleotide, twelfth (+12) nucleotide, sixteenth (+16) nucleotide, seventeenth (+17) nucleotide, eighteenth (+18) nucleotide, nineteenth (+19) nucleotide, twentieth (+20) nucleotide, twenty-first (+21) nucleotide, twenty-second (+22), and/or twenty-third (+23), the 3′ terminal, nucleotide. In certain embodiments, the ds oligonucleotides comprising a guide strand backbone phosphoryl guanidine chiral center in the Sp configuration between the +3 nucleotide and the immediately downstream (+4) nucleotide, i.e., in the 3′ direction, comprise a modified sugar at the 5′ terminal (+1) nucleotide. In certain embodiments, the ds oligonucleotides comprising a guide strand backbone phosphoryl guanidine chiral center in the Sp configuration between the +3 nucleotide and the immediately downstream (+4) nucleotide, i.e., in the 3′ direction, comprise a modified sugar at the second (+2) nucleotide. In certain embodiments, the ds oligonucleotides comprising a guide strand backbone phosphoryl guanidine chiral center in the Sp configuration between the +3 nucleotide and the immediately downstream (+4) nucleotide, i.e., in the 3′ direction, comprise a modified sugar at the third (+3) nucleotide. In certain embodiments, the ds oligonucleotides comprising a guide strand backbone phosphoryl guanidine chiral center in the Sp configuration between the +3 nucleotide and the immediately downstream (+4) nucleotide, i.e., in the 3′ direction, comprise a modified sugar at the fourth (+4) nucleotide. In certain embodiments, the ds oligonucleotides comprising a guide strand backbone phosphoryl guanidine chiral center in the Sp configuration between the +3 nucleotide and the immediately downstream (+4) nucleotide, i.e., in the 3′ direction, comprise a modified sugar at the fifth (+5) nucleotide. In certain embodiments, the ds oligonucleotides comprising a guide strand backbone phosphoryl guanidine chiral center in the Sp configuration between the +3 nucleotide and the immediately downstream (+4) nucleotide, i.e., in the 3′ direction, comprise a modified sugar at the sixth (+6) nucleotide. In certain embodiments, the modified sugar comprises a 2′-F modification, 2′-H modification, 2′-OH modification, 2′-O-alkyl modification, e.g., 2′-O-methyl (OMe) modification, 2′-methoxyethyl (MOE) modification, 5′-alkyl modification, e.g., 5′-(R)-methyl or 5′-(S)-methyl, DNA, locked nucleic acid (LNA), unlocked nucleic acid (UNA), glycol nucleic acid (GNA), or Homo-DNA. In certain embodiments, the ds oligonucleotides comprising a guide strand backbone phosphoryl guanidine chiral center in the Sp configuration between the +3 nucleotide and the immediately downstream (+4) nucleotide, i.e., in the 3′ direction, comprise a 2′-F modification of the 5′ terminal (+1) nucleotide, second (+2) nucleotide, third (+3) nucleotide, fourth (+4) nucleotide, fifth (+5) nucleotide, and/or sixth (+6) nucleotide. In certain embodiments, the ds oligonucleotides comprising a guide strand backbone phosphoryl guanidine chiral center in the Sp configuration between the +3 nucleotide and the immediately downstream (+4) nucleotide, i.e., in the 3′ direction, comprise a 2′-F modification of the 5′ terminal (+1) nucleotide. In certain embodiments, the ds oligonucleotides comprising a guide strand backbone phosphoryl guanidine chiral center in the Sp configuration between the +3 nucleotide and the immediately downstream (+4) nucleotide, i.e., in the 3′ direction, comprise a 2′-F modification of the second (+2) nucleotide. In certain embodiments, the ds oligonucleotides comprising a guide strand backbone phosphoryl guanidine chiral center in the Sp configuration between the +3 nucleotide and the immediately downstream (+4) nucleotide, i.e., in the 3′ direction, comprise a 2′-F modification of the third (+3) nucleotide. In certain embodiments, the ds oligonucleotides comprising a guide strand backbone phosphoryl guanidine chiral center in the Sp configuration between the +3 nucleotide and the immediately downstream (+4) nucleotide, i.e., in the 3′ direction, comprise a 2′-F modification of the fourth (+4) nucleotide. In certain embodiments, the ds oligonucleotides comprising a guide strand backbone phosphoryl guanidine chiral center in the Sp configuration between the +3 nucleotide and the immediately downstream (+4) nucleotide, i.e., in the 3′ direction, comprise a 2′-F modification of the fifth (+5) nucleotide. In certain embodiments, the ds oligonucleotides comprising a guide strand backbone phosphoryl guanidine chiral center in the Sp configuration between the +3 nucleotide and the immediately downstream (+4) nucleotide, i.e., in the 3′ direction, comprise a 2′-F modification of the sixth (+6) nucleotide

[0430] In certain embodiments, the ds oligonucleotide comprises a guide strand backbone phosphoryl guanidine chiral center in the Sp configuration between the +3 nucleotide and the immediately downstream (+4) nucleotide, i.e., in the 3′ direction, and the guide strand further comprises one or more backbone phosphorothioate chiral centers in Rp or Sp configuration between the 5′ terminal (+1)nucleotide and the immediately downstream (+2) nucleotide and between the (+2) nucleotide and the immediately downstream (+3) nucleotide, as well as between the (+5) nucleotide and the (+6) nucleotide, and one or more of:
[0431] (1) a guide strand where one or both of the 5′ and 3′ terminal dinucleotides are not linked by non-negatively charged internucleotidic linkages, i.e., the guide strand comprises one more non-negatively charged internucleotidic linkages downstream, i.e., in the 3′ direction, relative to the linkage between the 5′ terminal dinucleotide and/or upstream, i.e., in the 5′ direction, relative to the linkage between the 3′ terminal dinucleotide;
[0432] (2) a guide strand where one or more Rp, Sp, or stereorandom non-negatively charged internucleotidic linkage occurs between any two adjacent nucleotides between the second (+2) nucleotide relative to the 5′ terminal nucleotide of the guide strand and the penultimate 3′ (N-1) nucleotide of the guide strand, where N is the 3′ terminal nucleotide;
[0433] (3) a guide strand where an Rp, Sp, or stereorandom non-negatively charged internucleotidic linkage occurs between the tenth (+10) and eleventh (+11) nucleotides, relative to the 5′ terminal nucleotide;
[0434] (4) a guide strand where an Rp, Sp, or stereorandom non-negatively charged internucleotidic linkage occurs between the seventh (+7) and eighth (+8) nucleotides, relative to the 5′ terminal nucleotide;
[0435] (5) a guide strand comprising one or more backbone phosphorothioate chiral centers in Rp or Sp configuration where linkage occurs between any two adjacent nucleotides between the penultimate 3′ nucleotide of the guide strand, where N is the 3′ terminal nucleotide, and the upstream N-10 nucleotide;
[0436] (6) a passenger strand where one or more Rp, Sp, or stereorandom non-negatively charged internucleotidic linkage occurs upstream, i.e., in the 5′ direction, relative to the central nucleotide of the passenger strand;
[0437] (7) a passenger strand where one or more Rp, Sp, or stereorandom non-negatively charged internucleotidic linkage occurs downstream, i.e., in the 3′ direction, relative to the central nucleotide of the passenger strand;
[0438] (8) a passenger strand where one or more backbone phosphorothioate chiral centers in Rp or Sp configuration internucleotidic linkage occurs upstream, i.e., in the 5′ direction, relative to the central nucleotide of the passenger strand;
[0439] (9) a passenger strand where one or more backbone phosphorothioate chiral centers in Rp or Sp configuration internucleotidic linkage internucleotidic linkage occurs downstream, i.e., in the 3′ direction, relative to the central nucleotide of the passenger strand; and
[0440] (10) a passenger strand comprising one or more modified sugars, e.g. Homo-DNA, between the 5′ terminal (+1) nucleotide and the penultimate (N-1) nucleotide.
   In certain embodiments, the ds oligonucleotide further comprises a 2′ modification, e.g., a 2′ F modification, of the 3′ nucleotide of a nucleotide pair linked by an Rp, Sp, or stereorandom non-negatively charged internucleotidic linkage, and the passenger strand comprises one or more backbone chiral centers in Rp or Sp configuration. In certain embodiments, the one or more Rp, Sp, or stereorandom non-negatively charged internucleotidic linkage incorporated into the guide or passenger strand is an Rp non-negatively charged internucleotidic linkage. In certain embodiments, the one or more Rp, Sp, or stereorandom non-negatively charged internucleotidic linkage is an Sp non-negatively charged internucleotidic linkage. In certain embodiments, the one or more Rp, Sp, or stereorandom non-negatively charged internucleotidic linkage is a stereorandom non-negatively charged internucleotidic linkage. In certain embodiments, the ds oligonucleotides comprising a guide strand backbone phosphoryl guanidine chiral center in the Sp configuration between the +3 nucleotide and the immediately downstream (+4) nucleotide, i.e., in the 3′ direction, further comprise one or a plurality of modified sugars. In certain embodiments, the ds oligonucleotides comprising a guide strand backbone phosphoryl guanidine chiral center in the Sp configuration between the +3 nucleotide and the immediately downstream (+4) nucleotide, i.e., in the 3′ direction, comprise a modified sugar at the 5′ terminal (+1) nucleotide, second (+2) nucleotide, third (+3) nucleotide, fourth (+4) nucleotide, fifth (+5) nucleotide, sixth (+6) nucleotide, seventh (+7) nucleotide, eighth (+8) nucleotide, ninth (+9) nucleotide, tenth (+10) nucleotide, twelfth (+12) nucleotide, sixteenth (+16) nucleotide, seventeenth (+17) nucleotide, eighteenth (+18) nucleotide, nineteenth (+19) nucleotide, twentieth (+20) nucleotide, twenty-first (+21) nucleotide, twenty-second (+22), and/or twenty-third (+23), the 3′ terminal, nucleotide. In certain embodiments, the ds oligonucleotides comprising a guide strand backbone phosphoryl guanidine chiral center in the Sp configuration between the +3 nucleotide and the immediately downstream (+4) nucleotide, i.e., in the 3′ direction, comprise a modified sugar at the 5′ terminal (+1) nucleotide. In certain embodiments, the ds oligonucleotides comprising a guide strand backbone phosphoryl guanidine chiral center in the Sp configuration between the +3 nucleotide and the immediately downstream (+4) nucleotide, i.e., in the 3′ direction, comprise a modified sugar at the second (+2) nucleotide. In certain embodiments, the ds oligonucleotides comprising a guide strand backbone phosphoryl guanidine chiral center in the Sp configuration between the +3 nucleotide and the immediately downstream (+4) nucleotide, i.e., in the 3′ direction, comprise a modified sugar at the third (+3) nucleotide. In certain embodiments, the ds oligonucleotides comprising a guide strand backbone phosphoryl guanidine chiral center in the Sp configuration between the +3 nucleotide and the immediately downstream (+4) nucleotide, i.e., in the 3′ direction, comprise a modified sugar at the fourth (+4) nucleotide. In certain embodiments, the ds oligonucleotides comprising a guide strand backbone phosphoryl guanidine chiral center in the Sp configuration between the +3 nucleotide and the immediately downstream (+4) nucleotide, i.e., in the 3′ direction, comprise a modified sugar at the fifth (+5) nucleotide. In certain embodiments, the ds oligonucleotides comprising a guide strand backbone phosphoryl guanidine chiral center in the Sp configuration between the +3 nucleotide and the immediately downstream (+4) nucleotide, i.e., in the 3′ direction, comprise a modified sugar at the sixth (+6) nucleotide. In certain embodiments, the modified sugar comprises a 2′-F modification, 2′-H modification, 2′-OH modification, 2′-O-alkyl modification, e.g., 2′-O-methyl (OMe) modification, 2′-methoxyethyl (MOE) modification, 5′-alkyl modification, e.g., 5′-(R)-methyl or 5′-(S)-methyl, DNA, locked nucleic acid (LNA), unlocked nucleic acid (UNA), glycol nucleic acid (GNA), or Homo-DNA. In certain embodiments, the ds oligonucleotides comprising a guide strand backbone phosphoryl guanidine chiral center in the Sp configuration between the +3 nucleotide and the immediately downstream (+4) nucleotide, i.e., in the 3′ direction, comprise a 2′-F modification of the 5′ terminal (+1) nucleotide, second (+2) nucleotide, third (+3) nucleotide, fourth (+4) nucleotide, fifth (+5) nucleotide, and/or sixth (+6) nucleotide. In certain embodiments, the ds oligonucleotides comprising a guide strand backbone phosphoryl guanidine chiral center in the Sp configuration between the +3 nucleotide and the immediately downstream (+4) nucleotide, i.e., in the 3′ direction, comprise a 2′-F modification of the 5′ terminal (+1) nucleotide. In certain embodiments, the ds oligonucleotides comprising a guide strand backbone phosphoryl guanidine chiral center in the Sp configuration between the +3 nucleotide and the immediately downstream (+4) nucleotide, i.e., in the 3′ direction, comprise a 2′-F modification of the second (+2) nucleotide. In certain embodiments, the ds oligonucleotides comprising a guide strand backbone phosphoryl guanidine chiral center in the Sp configuration between the +3 nucleotide and the immediately downstream (+4) nucleotide, i.e., in the 3′ direction, comprise a 2′-F modification of the third (+3) nucleotide. In certain embodiments, the ds oligonucleotides comprising a guide strand backbone phosphoryl guanidine chiral center in the Sp configuration between the +3 nucleotide and the immediately downstream (+4) nucleotide, i.e., in the 3′ direction, comprise a 2′-F modification of the fourth (+4) nucleotide. In certain embodiments, the ds oligonucleotides comprising a guide strand backbone phosphoryl guanidine chiral center in the Sp configuration between the +3 nucleotide and the immediately downstream (+4) nucleotide, i.e., in the 3′ direction, comprise a 2′-F modification of the fifth (+5) nucleotide. In certain embodiments, the ds oligonucleotides comprising a guide strand backbone phosphoryl guanidine chiral center in the Sp configuration between the +3 nucleotide and the immediately downstream (+4) nucleotide, i.e., in the 3′ direction, comprise a 2′-F modification of the sixth (+6) nucleotide.

[0441] In certain embodiments, the ds oligonucleotide comprises a guide strand backbone phosphoryl guanidine chiral center in the Sp configuration between the +3 nucleotide and the immediately downstream (+4) nucleotide, i.e., in the 3′ direction, and the guide strand further comprises one or more Rp, Sp, or stereorandom non-negatively charged internucleotidic linkage occurs between any two adjacent nucleotides between the second (+2) nucleotide relative to the 5′ terminal nucleotide of the guide strand and the penultimate 3′ (N-1) nucleotide of the guide strand, where N is the 3′ terminal nucleotide, a 2′ modification, e.g., a 2′ F modification, of the 3′ nucleotide of a nucleotide pair linked by an Rp, Sp, or stereorandom non-negatively charged internucleotidic linkage, and the passenger strand comprises one or more backbone chiral centers in Rp or Sp configuration. In certain embodiments, the one or more Rp, Sp, or stereorandom non-negatively charged internucleotidic linkage incorporated into the guide strand is an Rp non-negatively charged internucleotidic linkage. In certain embodiments, the one or more Rp, Sp, or stereorandom non-negatively charged internucleotidic linkage is an Sp non-negatively charged internucleotidic linkage. In certain embodiments, the one or more Rp, Sp, or stereorandom non-negatively charged internucleotidic linkage is a stereorandom non-negatively charged internucleotidic linkage. In certain embodiments, the ds oligonucleotides comprising a guide strand backbone phosphoryl guanidine chiral center in the Sp configuration between the +3 nucleotide and the immediately downstream (+4) nucleotide, i.e., in the 3′ direction, further comprise one or a plurality of modified sugars. In certain embodiments, the ds oligonucleotides comprising a guide strand backbone phosphoryl guanidine chiral center in the Sp configuration between the +3 nucleotide and the immediately downstream (+4) nucleotide, i.e., in the 3′ direction, comprise a modified sugar at the 5′ terminal (+1) nucleotide, second (+2) nucleotide, third (+3) nucleotide, fourth (+4) nucleotide, fifth (+5) nucleotide, sixth (+6) nucleotide, seventh (+7) nucleotide, eighth (+8) nucleotide, ninth (+9) nucleotide, tenth (+10) nucleotide, twelfth (+12) nucleotide, sixteenth (+16) nucleotide, seventeenth (+17) nucleotide, eighteenth (+18) nucleotide, nineteenth (+19) nucleotide, twentieth (+20) nucleotide, twenty-first (+21) nucleotide, twenty-second (+22), and/or twenty-third (+23), the 3′ terminal, nucleotide. In certain embodiments, the ds oligonucleotides comprising a guide strand backbone phosphoryl guanidine chiral center in the Sp configuration between the +3 nucleotide and the immediately downstream (+4) nucleotide, i.e., in the 3′ direction, comprise a modified sugar at the 5′ terminal (+1) nucleotide. In certain embodiments, the ds oligonucleotides comprising a guide strand backbone phosphoryl guanidine chiral center in the Sp configuration between the +3 nucleotide and the immediately downstream (+4) nucleotide, i.e., in the 3′ direction, comprise a modified sugar at the second (+2) nucleotide. In certain embodiments, the ds oligonucleotides comprising a guide strand backbone phosphoryl guanidine chiral center in the Sp configuration between the +3 nucleotide and the immediately downstream (+4) nucleotide, i.e., in the 3′ direction, comprise a modified sugar at the third (+3) nucleotide. In certain embodiments, the ds oligonucleotides comprising a guide strand backbone phosphoryl guanidine chiral center in the Sp configuration between the +3 nucleotide and the immediately downstream (+4) nucleotide, i.e., in the 3′ direction, comprise a modified sugar at the fourth (+4) nucleotide. In certain embodiments, the ds oligonucleotides comprising a guide strand backbone phosphoryl guanidine chiral center in the Sp configuration between the +3 nucleotide and the immediately downstream (+4) nucleotide, i.e., in the 3′ direction, comprise a modified sugar at the fifth (+5) nucleotide. In certain embodiments, the ds oligonucleotides comprising a guide strand backbone phosphoryl guanidine chiral center in the Sp configuration between the +3 nucleotide and the immediately downstream (+4) nucleotide, i.e., in the 3′ direction, comprise a modified sugar at the sixth (+6) nucleotide. In certain embodiments, the modified sugar comprises a 2′-F modification, 2′-H modification, 2′-OH modification, 2′-O-alkyl modification, e.g., 2′-O-methyl (OMe) modification, 2′-methoxyethyl (MOE) modification, 5′-alkyl modification, e.g., 5′-(R)-methyl or 5′-(S)-methyl, DNA, locked nucleic acid (LNA), unlocked nucleic acid (UNA), glycol nucleic acid (GNA), or Homo-DNA. In certain embodiments, the ds oligonucleotides comprising a guide strand backbone phosphoryl guanidine chiral center in the Sp configuration between the +3 nucleotide and the immediately downstream (+4) nucleotide, i.e., in the 3′ direction, comprise a 2′-F modification of the 5′ terminal (+1) nucleotide, second (+2) nucleotide, third (+3) nucleotide, fourth (+4) nucleotide, fifth (+5) nucleotide, and/or sixth (+6) nucleotide. In certain embodiments, the ds oligonucleotides comprising a guide strand backbone phosphoryl guanidine chiral center in the Sp configuration between the +3 nucleotide and the immediately downstream (+4) nucleotide, i.e., in the 3′ direction, comprise a 2′-F modification of the 5′ terminal (+1) nucleotide. In certain embodiments, the ds oligonucleotides comprising a guide strand backbone phosphoryl guanidine chiral center in the Sp configuration between the +3 nucleotide and the immediately downstream (+4) nucleotide, i.e., in the 3′ direction, comprise a 2′-F modification of the second (+2) nucleotide. In certain embodiments, the ds oligonucleotides comprising a guide strand backbone phosphoryl guanidine chiral center in the Sp configuration between the +3 nucleotide and the immediately downstream (+4) nucleotide, i.e., in the 3′ direction, comprise a 2′-F modification of the third (+3) nucleotide. In certain embodiments, the ds oligonucleotides comprising a guide strand backbone phosphoryl guanidine chiral center in the Sp configuration between the +3 nucleotide and the immediately downstream (+4) nucleotide, i.e., in the 3′ direction, comprise a 2′-F modification of the fourth (+4) nucleotide. In certain embodiments, the ds oligonucleotides comprising a guide strand backbone phosphoryl guanidine chiral center in the Sp configuration between the +3 nucleotide and the immediately downstream (+4) nucleotide, i.e., in the 3′ direction, comprise a 2′-F modification of the fifth (+5) nucleotide. In certain embodiments, the ds oligonucleotides comprising a guide strand backbone phosphoryl guanidine chiral center in the Sp configuration between the +3 nucleotide and the immediately downstream (+4) nucleotide, i.e., in the 3′ direction, comprise a 2′-F modification of the sixth (+6) nucleotide.

[0442] In certain embodiments, the ds oligonucleotide comprises a guide strand backbone phosphoryl guanidine chiral center in the Sp configuration between the +3 nucleotide and the immediately downstream (+4) nucleotide, i.e., in the 3′ direction, and the guide strand further comprises backbone phosphorothioate chiral centers in Sp configuration between the 3′ terminal nucleotide and the penultimate (N-1) nucleotide and as between the penultimate (N-1) nucleotide and the immediately upstream (N-2) nucleotide, a 2′ modification, e.g., a 2′ F modification, of the 3′ nucleotide of a nucleotide pair linked by an Rp, Sp, or stereorandom non-negatively charged internucleotidic linkage, and the passenger strand comprises 0-n Rp, Sp, or stereorandom non-negatively charged internucleotidic linkages, where n is about 1 to 49 and one or more backbone chiral centers in Rp or Sp configuration.

[0443] In certain embodiments, the ds oligonucleotides comprising a guide strand backbone phosphoryl guanidine chiral center in the Sp configuration between the +3 nucleotide and the immediately downstream (+4) nucleotide, i.e., in the 3′ direction, further comprise one or a plurality of modified sugars. In certain embodiments, the ds oligonucleotides comprising a guide strand backbone phosphoryl guanidine chiral center in the Sp configuration between the +3 nucleotide and the immediately downstream (+4) nucleotide, i.e., in the 3′ direction, comprise a modified sugar at the 5′ terminal (+1) nucleotide, second (+2) nucleotide, third (+3) nucleotide, fourth (+4) nucleotide, fifth (+5) nucleotide, sixth (+6) nucleotide, seventh (+7) nucleotide, eighth (+8) nucleotide, ninth (+9) nucleotide, tenth (+10) nucleotide, twelfth (+12) nucleotide, sixteenth (+16) nucleotide, seventeenth (+17) nucleotide, eighteenth (+18) nucleotide, nineteenth (+19) nucleotide, twentieth (+20) nucleotide, twenty-first (+21) nucleotide, twenty-second (+22), and/or twenty-third (+23), the 3′ terminal, nucleotide. In certain embodiments, the ds oligonucleotides comprising a guide strand backbone phosphoryl guanidine chiral center in the Sp configuration between the +3 nucleotide and the immediately downstream (+4) nucleotide, i.e., in the 3′ direction, comprise a modified sugar at the 5′ terminal (+1) nucleotide. In certain embodiments, the ds oligonucleotides comprising a guide strand backbone phosphoryl guanidine chiral center in the Sp configuration between the +3 nucleotide and the immediately downstream (+4) nucleotide, i.e., in the 3′ direction, comprise a modified sugar at the second (+2) nucleotide. In certain embodiments, the ds oligonucleotides comprising a guide strand backbone phosphoryl guanidine chiral center in the Sp configuration between the +3 nucleotide and the immediately downstream (+4) nucleotide, i.e., in the 3′ direction, comprise a modified sugar at the third (+3) nucleotide. In certain embodiments, the ds oligonucleotides comprising a guide strand backbone phosphoryl guanidine chiral center in the Sp configuration between the +3 nucleotide and the immediately downstream (+4) nucleotide, i.e., in the 3′ direction, comprise a modified sugar at the fourth (+4) nucleotide. In certain embodiments, the ds oligonucleotides comprising a guide strand backbone phosphoryl guanidine chiral center in the Sp configuration between the +3 nucleotide and the immediately downstream (+4) nucleotide, i.e., in the 3′ direction, comprise a modified sugar at the fifth (+5) nucleotide. In certain embodiments, the ds oligonucleotides comprising a guide strand backbone phosphoryl guanidine chiral center in the Sp configuration between the +3 nucleotide and the immediately downstream (+4) nucleotide, i.e., in the 3′ direction, comprise a modified sugar at the sixth (+6) nucleotide. In certain embodiments, the modified sugar comprises a 2′-F modification, 2′-H modification, 2′-OH modification, 2′-O-alkyl modification, e.g., 2′-O-methyl (OMe) modification, 2′-methoxyethyl (MOE) modification, 5′-alkyl modification, e.g., 5′-(R)-methyl or 5′-(S)-methyl, DNA, locked nucleic acid (LNA), unlocked nucleic acid (UNA), glycol nucleic acid (GNA), or Homo-DNA. In certain embodiments, the ds oligonucleotides comprising a guide strand backbone phosphoryl guanidine chiral center in the Sp configuration between the +3 nucleotide and the immediately downstream (+4) nucleotide, i.e., in the 3′ direction, comprise a 2′-F modification of the 5′ terminal (+1) nucleotide, second (+2) nucleotide, third (+3) nucleotide, fourth (+4) nucleotide, fifth (+5) nucleotide, and/or sixth (+6) nucleotide. In certain embodiments, the ds oligonucleotides comprising a guide strand backbone phosphoryl guanidine chiral center in the Sp configuration between the +3 nucleotide and the immediately downstream (+4) nucleotide, i.e., in the 3′ direction, comprise a 2′-F modification of the 5′ terminal (+1) nucleotide. In certain embodiments, the ds oligonucleotides comprising a guide strand backbone phosphoryl guanidine chiral center in the Sp configuration between the +3 nucleotide and the immediately downstream (+4) nucleotide, i.e., in the 3′ direction, comprise a 2′-F modification of the second (+2) nucleotide. In certain embodiments, the ds oligonucleotides comprising a guide strand backbone phosphoryl guanidine chiral center in the Sp configuration between the +3 nucleotide and the immediately downstream (+4) nucleotide, i.e., in the 3′ direction, comprise a 2′-F modification of the third (+3) nucleotide. In certain embodiments, the ds oligonucleotides comprising a guide strand backbone phosphoryl guanidine chiral center in the Sp configuration between the +3 nucleotide and the immediately downstream (+4) nucleotide, i.e., in the 3′ direction, comprise a 2′-F modification of the fourth (+4) nucleotide. In certain embodiments, the ds oligonucleotides comprising a guide strand backbone phosphoryl guanidine chiral center in the Sp configuration between the +3 nucleotide and the immediately downstream (+4) nucleotide, i.e., in the 3′ direction, comprise a 2′-F modification of the fifth (+5) nucleotide. In certain embodiments, the ds oligonucleotides comprising a guide strand backbone phosphoryl guanidine chiral center in the Sp configuration between the +3 nucleotide and the immediately downstream (+4) nucleotide, i.e., in the 3′ direction, comprise a 2′-F modification of the sixth (+6) nucleotide.

[0444] In certain embodiments, the one or more Rp, Sp, or stereorandom non-negatively charged internucleotidic linkage incorporated into the guide strand is an Rp non-negatively charged internucleotidic linkage. In certain embodiments, the one or more Rp, Sp, or stereorandom non-negatively charged internucleotidic linkage is an Sp non-negatively charged internucleotidic linkage. In certain embodiments, the one or more Rp, Sp, or stereorandom non-negatively charged internucleotidic linkage is a stereorandom non-negatively charged internucleotidic linkage. In certain further embodiments, the passenger strand comprises an Sp backbone phosphorothioate chiral center between the 5′ terminal (+1) nucleotide and the immediately downstream (+2) nucleotide and an Sp backbone phosphorothioate chiral center between the penultimate (N-1) nucleotide and the 3′ terminal (N) nucleotide.

[0445] In certain embodiments, the ds oligonucleotide comprises a guide strand backbone phosphoryl guanidine chiral center in the Sp configuration between the +3 nucleotide and the immediately downstream (+4) nucleotide, i.e., in the 3′ direction, and the guide strand further comprises backbone phosphorothioate chiral centers in Rp, Sp, or alternating configurations between the 5′ terminal (+1) nucleotide and the immediately downstream (+2) nucleotide and between the +2 nucleotide and the immediately downstream (+3) nucleotide, a 2′ modification, e.g., a 2′ F modification, of the 3′ nucleotide of a nucleotide pair linked by an Rp, Sp, or stereorandom non-negatively charged internucleotidic linkage, and the passenger strand comprises 0-n Rp, Sp, or stereorandom non-negatively charged internucleotidic linkages, where n is about 1 to 49 and one or more backbone chiral centers in Rp or Sp configuration.

[0446] In certain embodiments, the ds oligonucleotides comprising a guide strand backbone phosphoryl guanidine chiral center in the Sp configuration between the +3 nucleotide and the immediately downstream (+4) nucleotide, i.e., in the 3′ direction, further comprise one or a plurality of modified sugars. In certain embodiments, the ds oligonucleotides comprising a guide strand backbone phosphoryl guanidine chiral center in the Sp configuration between the +3 nucleotide and the immediately downstream (+4) nucleotide, i.e., in the 3′ direction, comprise a modified sugar at the 5′ terminal (+1) nucleotide, second (+2) nucleotide, third (+3) nucleotide, fourth (+4) nucleotide, fifth (+5) nucleotide, sixth (+6) nucleotide, seventh (+7) nucleotide, eighth (+8) nucleotide, ninth (+9) nucleotide, tenth (+10) nucleotide, twelfth (+12) nucleotide, sixteenth (+16) nucleotide, seventeenth (+17) nucleotide, eighteenth (+18) nucleotide, nineteenth (+19) nucleotide, twentieth (+20) nucleotide, twenty-first (+21) nucleotide, twenty-second (+22), and/or twenty-third (+23), the 3′ terminal, nucleotide. In certain embodiments, the ds oligonucleotides comprising a guide strand backbone phosphoryl guanidine chiral center in the Sp configuration between the +3 nucleotide and the immediately downstream (+4) nucleotide, i.e., in the 3′ direction, comprise a modified sugar at the 5′ terminal (+1) nucleotide. In certain embodiments, the ds oligonucleotides comprising a guide strand backbone phosphoryl guanidine chiral center in the Sp configuration between the +3 nucleotide and the immediately downstream (+4) nucleotide, i.e., in the 3′ direction, comprise a modified sugar at the second (+2) nucleotide. In certain embodiments, the ds oligonucleotides comprising a guide strand backbone phosphoryl guanidine chiral center in the Sp configuration between the +3 nucleotide and the immediately downstream (+4) nucleotide, i.e., in the 3′ direction, comprise a modified sugar at the third (+3) nucleotide. In certain embodiments, the ds oligonucleotides comprising a guide strand backbone phosphoryl guanidine chiral center in the Sp configuration between the +3 nucleotide and the immediately downstream (+4) nucleotide, i.e., in the 3′ direction, comprise a modified sugar at the fourth (+4) nucleotide. In certain embodiments, the ds oligonucleotides comprising a guide strand backbone phosphoryl guanidine chiral center in the Sp configuration between the +3 nucleotide and the immediately downstream (+4) nucleotide, i.e., in the 3′ direction, comprise a modified sugar at the fifth (+5) nucleotide. In certain embodiments, the ds oligonucleotides comprising a guide strand backbone phosphoryl guanidine chiral center in the Sp configuration between the +3 nucleotide and the immediately downstream (+4) nucleotide, i.e., in the 3′ direction, comprise a modified sugar at the sixth (+6) nucleotide. In certain embodiments, the modified sugar comprises a 2′-F modification, 2′-H modification, 2′-OH modification, 2′-O-alkyl modification, e.g., 2′-O-methyl (OMe) modification, 2′-methoxyethyl (MOE) modification, 5′-alkyl modification, e.g., 5′-(R)-methyl or 5′-(S)-methyl, DNA, locked nucleic acid (LNA), unlocked nucleic acid (UNA), glycol nucleic acid (GNA), or Homo-DNA. In certain embodiments, the ds oligonucleotides comprising a guide strand backbone phosphoryl guanidine chiral center in the Sp configuration between the +3 nucleotide and the immediately downstream (+4) nucleotide, i.e., in the 3′ direction, comprise a 2′-F modification of the 5′ terminal (+1) nucleotide, second (+2) nucleotide, third (+3) nucleotide, fourth (+4) nucleotide, fifth (+5) nucleotide, and/or sixth (+6) nucleotide. In certain embodiments, the ds oligonucleotides comprising a guide strand backbone phosphoryl guanidine chiral center in the Sp configuration between the +3 nucleotide and the immediately downstream (+4) nucleotide, i.e., in the 3′ direction, comprise a 2′-F modification of the 5′ terminal (+1) nucleotide. In certain embodiments, the ds oligonucleotides comprising a guide strand backbone phosphoryl guanidine chiral center in the Sp configuration between the +3 nucleotide and the immediately downstream (+4) nucleotide, i.e., in the 3′ direction, comprise a 2′-F modification of the second (+2) nucleotide. In certain embodiments, the ds oligonucleotides comprising a guide strand backbone phosphoryl guanidine chiral center in the Sp configuration between the +3 nucleotide and the immediately downstream (+4) nucleotide, i.e., in the 3′ direction, comprise a 2′-F modification of the third (+3) nucleotide. In certain embodiments, the ds oligonucleotides comprising a guide strand backbone phosphoryl guanidine chiral center in the Sp configuration between the +3 nucleotide and the immediately downstream (+4) nucleotide, i.e., in the 3′ direction, comprise a 2′-F modification of the fourth (+4) nucleotide. In certain embodiments, the ds oligonucleotides comprising a guide strand backbone phosphoryl guanidine chiral center in the Sp configuration between the +3 nucleotide and the immediately downstream (+4) nucleotide, i.e., in the 3′ direction, comprise a 2′-F modification of the fifth (+5) nucleotide. In certain embodiments, the ds oligonucleotides comprising a guide strand backbone phosphoryl guanidine chiral center in the Sp configuration between the +3 nucleotide and the immediately downstream (+4) nucleotide, i.e., in the 3′ direction, comprise a 2′-F modification of the sixth (+6) nucleotide.

[0447] In certain embodiments, the one or more Rp, Sp, or stereorandom non-negatively charged internucleotidic linkage incorporated into the guide strand is an Rp non-negatively charged internucleotidic linkage. In certain embodiments, the one or more Rp, Sp, or stereorandom non-negatively charged internucleotidic linkage is an Sp non-negatively charged internucleotidic linkage. In certain embodiments, the one or more Rp, Sp, or stereorandom non-negatively charged internucleotidic linkage is a stereorandom non-negatively charged internucleotidic linkage. In certain further embodiments, the passenger strand comprises an Sp backbone phosphorothioate chiral center between the 5′ terminal (+1) nucleotide and the immediately downstream (+2) nucleotide and an Sp backbone phosphorothioate chiral center between the penultimate (N-1) nucleotide and the 3′ terminal (N) nucleotide.

[0448] In certain embodiments, the ds oligonucleotide comprises a guide strand backbone phosphoryl guanidine chiral center in the Sp configuration between the +3 nucleotide and the immediately downstream (+4) nucleotide, i.e., in the 3′ direction, and the guide strand further comprises one or more backbone phosphorothioate chiral centers in Rp or Sp configuration upstream of backbone phosphorothioate chiral centers in Sp configuration between the 3′ terminal nucleotide and the penultimate (N-1) nucleotide and as between the penultimate (N-1) nucleotide and the immediately upstream (N-2) nucleotide, a 2′ modification, e.g., a 2′ F modification, of the 3′ nucleotide of a nucleotide pair linked by an Rp, Sp, or stereorandom non-negatively charged internucleotidic linkage, and the passenger strand comprises 0-n Rp, Sp, or stereorandom non-negatively charged internucleotidic linkages, where n is about 1 to 49 and one or more backbone chiral centers in Rp or Sp configuration.

[0449] In certain embodiments, the ds oligonucleotides comprising a guide strand backbone phosphoryl guanidine chiral center in the Sp configuration between the +3 nucleotide and the immediately downstream (+4) nucleotide, i.e., in the 3′ direction, further comprise one or a plurality of modified sugars. In certain embodiments, the ds oligonucleotides comprising a guide strand backbone phosphoryl guanidine chiral center in the Sp configuration between the +3 nucleotide and the immediately downstream (+4) nucleotide, i.e., in the 3′ direction, comprise a modified sugar at the 5′ terminal (+1) nucleotide, second (+2) nucleotide, third (+3) nucleotide, fourth (+4) nucleotide, fifth (+5) nucleotide, sixth (+6) nucleotide, seventh (+7) nucleotide, eighth (+8) nucleotide, ninth (+9) nucleotide, tenth (+10) nucleotide, twelfth (+12) nucleotide, sixteenth (+16) nucleotide, seventeenth (+17) nucleotide, eighteenth (+18) nucleotide, nineteenth (+19) nucleotide, twentieth. In certain embodiments, the ds oligonucleotides comprising a guide strand backbone phosphoryl guanidine chiral center in the Sp configuration between the +3 nucleotide and the immediately downstream (+4) nucleotide, i.e., in the 3′ direction, comprise a modified sugar at the 5′ terminal (+1) nucleotide. In certain embodiments, the ds oligonucleotides comprising a guide strand backbone phosphoryl guanidine chiral center in the Sp configuration between the +3 nucleotide and the immediately downstream (+4) nucleotide, i.e., in the 3′ direction, comprise a modified sugar at the second (+2) nucleotide. In certain embodiments, the ds oligonucleotides comprising a guide strand backbone phosphoryl guanidine chiral center in the Sp configuration between the +3 nucleotide and the immediately downstream (+4) nucleotide, i.e., in the 3′ direction, comprise a modified sugar at the third (+3) nucleotide. In certain embodiments, the ds oligonucleotides comprising a guide strand backbone phosphoryl guanidine chiral center in the Sp configuration between the +3 nucleotide and the immediately downstream (+4) nucleotide, i.e., in the 3′ direction, comprise a modified sugar at the fourth (+4) nucleotide. In certain embodiments, the ds oligonucleotides comprising a guide strand backbone phosphoryl guanidine chiral center in the Sp configuration between the +3 nucleotide and the immediately downstream (+4) nucleotide, i.e., in the 3′ direction, comprise a modified sugar at the fifth (+5) nucleotide. In certain embodiments, the ds oligonucleotides comprising a guide strand backbone phosphoryl guanidine chiral center in the Sp configuration between the +3 nucleotide and the immediately downstream (+4) nucleotide, i.e., in the 3′ direction, comprise a modified sugar at the sixth (+6) nucleotide. In certain embodiments, the modified sugar comprises a 2′-F modification, 2′-H modification, 2′-OH modification, 2′-O-alkyl modification, e.g., 2′-O-methyl (OMe) modification, 2′-methoxyethyl (MOE) modification, 5′-alkyl modification, e.g., 5′-(R)-methyl or 5′-(S)-methyl, DNA, locked nucleic acid (LNA), unlocked nucleic acid (UNA), glycol nucleic acid (GNA), or Homo-DNA. In certain embodiments, the ds oligonucleotides comprising a guide strand backbone phosphoryl guanidine chiral center in the Sp configuration between the +3 nucleotide and the immediately downstream (+4) nucleotide, i.e., in the 3′ direction, comprise a 2′-F modification of the 5′ terminal (+1) nucleotide, second (+2) nucleotide, third (+3) nucleotide, fourth (+4) nucleotide, fifth (+5) nucleotide, and/or sixth (+6) nucleotide. In certain embodiments, the ds oligonucleotides comprising a guide strand backbone phosphoryl guanidine chiral center in the Sp configuration between the +3 nucleotide and the immediately downstream (+4) nucleotide, i.e., in the 3′ direction, comprise a 2′-F modification of the 5′ terminal (+1) nucleotide. In certain embodiments, the ds oligonucleotides comprising a guide strand backbone phosphoryl guanidine chiral center in the Sp configuration between the +3 nucleotide and the immediately downstream (+4) nucleotide, i.e., in the 3′ direction, comprise a 2′-F modification of the second (+2) nucleotide. In certain embodiments, the ds oligonucleotides comprising a guide strand backbone phosphoryl guanidine chiral center in the Sp configuration between the +3 nucleotide and the immediately downstream (+4) nucleotide, i.e., in the 3′ direction, comprise a 2′-F modification of the third (+3) nucleotide. In certain embodiments, the ds oligonucleotides comprising a guide strand backbone phosphoryl guanidine chiral center in the Sp configuration between the +3 nucleotide and the immediately downstream (+4) nucleotide, i.e., in the 3′ direction, comprise a 2′-F modification of the fourth (+4) nucleotide. In certain embodiments, the ds oligonucleotides comprising a guide strand backbone phosphoryl guanidine chiral center in the Sp configuration between the +3 nucleotide and the immediately downstream (+4) nucleotide, i.e., in the 3′ direction, comprise a 2′-F modification of the fifth (+5) nucleotide. In certain embodiments, the ds oligonucleotides comprising a guide strand backbone phosphoryl guanidine chiral center in the Sp configuration between the +3 nucleotide and the immediately downstream (+4) nucleotide, i.e., in the 3′ direction, comprise a 2′-F modification of the sixth (+6) nucleotide.

[0450] In certain embodiments, the one or more Rp, Sp, or stereorandom non-negatively charged internucleotidic linkage incorporated into the guide strand is an Rp non-negatively charged internucleotidic linkage. In certain embodiments, the one or more Rp, Sp, or stereorandom non-negatively charged internucleotidic linkage is an Sp non-negatively charged internucleotidic linkage. In certain embodiments, the one or more Rp, Sp, or stereorandom non-negatively charged internucleotidic linkage is a stereorandom non-negatively charged internucleotidic linkage. In certain further embodiments, the passenger strand comprises an Sp backbone phosphorothioate chiral center between the 5′ terminal (+1) nucleotide and the immediately downstream (+2) nucleotide and an Sp backbone phosphorothioate chiral center between the penultimate (N-1) nucleotide and the 3′ terminal (N) nucleotide.

[0451] In certain embodiments, the ds oligonucleotide comprises a guide strand backbone phosphoryl guanidine chiral center in the Sp configuration between the +3 nucleotide and the immediately downstream (+4) nucleotide, i.e., in the 3′ direction, and the guide strand further comprises one or more Rp, Sp, or stereorandom non-negatively charged internucleotidic linkage occurs between any two adjacent nucleotides between the second (+2) nucleotide relative to the 5′ terminal nucleotide of the guide strand and the penultimate 3′ (N-1) nucleotide of the guide strand, where N is the 3′ terminal nucleotide, a 2′ modification, e.g., a 2′ F modification, of the 3′ nucleotide of a nucleotide pair linked by an Rp, Sp, or stereorandom non-negatively charged internucleotidic linkage, and the passenger strand comprises 0-n Rp, Sp, or stereorandom non-negatively charged internucleotidic linkages, where n is about 1 to 49 and one or more backbone chiral centers in Rp or Sp configuration.

[0452] In certain embodiments, the ds oligonucleotides comprising a guide strand backbone phosphoryl guanidine chiral center in the Sp configuration between the +3 nucleotide and the immediately downstream (+4) nucleotide, i.e., in the 3′ direction, further comprise one or a plurality of modified sugars. In certain embodiments, the ds oligonucleotides comprising a guide strand backbone phosphoryl guanidine chiral center in the Sp configuration between the +3 nucleotide and the immediately downstream (+4) nucleotide, i.e., in the 3′ direction, comprise a modified sugar at the 5′ terminal (+1) nucleotide, second (+2) nucleotide, third (+3) nucleotide, fourth (+4) nucleotide, fifth (+5) nucleotide, sixth (+6) nucleotide, seventh (+7)nucleotide, eighth (+8) nucleotide, ninth (+9) nucleotide, tenth (+10) nucleotide, twelfth (+12) nucleotide, sixteenth (+16) nucleotide, seventeenth (+17) nucleotide, eighteenth (+18) nucleotide, nineteenth (+19) nucleotide, twentieth. In certain embodiments, the ds oligonucleotides comprising a guide strand backbone phosphoryl guanidine chiral center in the Sp configuration between the +3 nucleotide and the immediately downstream (+4) nucleotide, i.e., in the 3′ direction, comprise a modified sugar at the 5′ terminal (+1) nucleotide. In certain embodiments, the ds oligonucleotides comprising a guide strand backbone phosphoryl guanidine chiral center in the Sp configuration between the +3 nucleotide and the immediately downstream (+4) nucleotide, i.e., in the 3′ direction, comprise a modified sugar at the second (+2) nucleotide. In certain embodiments, the ds oligonucleotides comprising a guide strand backbone phosphoryl guanidine chiral center in the Sp configuration between the +3 nucleotide and the immediately downstream (+4) nucleotide, i.e., in the 3′ direction, comprise a modified sugar at the third (+3) nucleotide. In certain embodiments, the ds oligonucleotides comprising a guide strand backbone phosphoryl guanidine chiral center in the Sp configuration between the +3 nucleotide and the immediately downstream (+4) nucleotide, i.e., in the 3′ direction, comprise a modified sugar at the fourth (+4) nucleotide. In certain embodiments, the ds oligonucleotides comprising a guide strand backbone phosphoryl guanidine chiral center in the Sp configuration between the +3 nucleotide and the immediately downstream (+4) nucleotide, i.e., in the 3′ direction, comprise a modified sugar at the fifth (+5) nucleotide. In certain embodiments, the ds oligonucleotides comprising a guide strand backbone phosphoryl guanidine chiral center in the Sp configuration between the +3 nucleotide and the immediately downstream (+4) nucleotide, i.e., in the 3′ direction, comprise a modified sugar at the sixth (+6) nucleotide.

[0453] In certain embodiments, the modified sugar comprises a 2′-F modification, 2′-H modification, 2′-OH modification, 2′-O-alkyl modification, e.g., 2′-O-methyl (OMe) modification, 2′-methoxyethyl (MOE) modification, 5′-alkyl modification, e.g., 5′-(R)-methyl or 5′-(S)-methyl, DNA, locked nucleic acid (LNA), unlocked nucleic acid (UNA), glycol nucleic acid (GNA), or Homo-DNA.

[0454] In certain embodiments, the ds oligonucleotides comprising a guide strand backbone phosphoryl guanidine chiral center in the Sp configuration between the +3 nucleotide and the immediately downstream (+4) nucleotide, i.e., in the 3′ direction, comprise a 2′-F modification of the 5′ terminal (+1) nucleotide, second (+2) nucleotide, third (+3) nucleotide, fourth (+4) nucleotide, fifth (+5) nucleotide, and/or sixth (+6) nucleotide. In certain embodiments, the ds oligonucleotides comprising a guide strand backbone phosphoryl guanidine chiral center in the Sp configuration between the +3 nucleotide and the immediately downstream (+4) nucleotide, i.e., in the 3′ direction, comprise a 2′-F modification of the 5′ terminal (+1) nucleotide. In certain embodiments, the ds oligonucleotides comprising a guide strand backbone phosphoryl guanidine chiral center in the Sp configuration between the +3 nucleotide and the immediately downstream (+4) nucleotide, i.e., in the 3′ direction, comprise a 2′-F modification of the second (+2) nucleotide. In certain embodiments, the ds oligonucleotides comprising a guide strand backbone phosphoryl guanidine chiral center in the Sp configuration between the +3 nucleotide and the immediately downstream (+4) nucleotide, i.e., in the 3′ direction, comprise a 2′-F modification of the third (+3) nucleotide. In certain embodiments, the ds oligonucleotides comprising a guide strand backbone phosphoryl guanidine chiral center in the Sp configuration between the +3 nucleotide and the immediately downstream (+4) nucleotide, i.e., in the 3′ direction, comprise a 2′-F modification of the fourth (+4) nucleotide. In certain embodiments, the ds oligonucleotides comprising a guide strand backbone phosphoryl guanidine chiral center in the Sp configuration between the +3 nucleotide and the immediately downstream (+4) nucleotide, i.e., in the 3′ direction, comprise a 2′-F modification of the fifth (+5) nucleotide. In certain embodiments, the ds oligonucleotides comprising a guide strand backbone phosphoryl guanidine chiral center in the Sp configuration between the +3 nucleotide and the immediately downstream (+4) nucleotide, i.e., in the 3′ direction, comprise a 2′-F modification of the sixth (+6) nucleotide.

[0455] In certain embodiments, the ds oligonucleotides comprise a 5′-methyl modification of the third (+3) nucleotide and/or fourth (+4) nucleotide. In certain embodiments, the ds oligonucleotides comprises a 5′-alkyl modification of the third (+3) nucleotide. In certain embodiments, the ds oligonucleotides comprises a 5′-methyl modification of the third (+3) nucleotide. In certain embodiments, the ds oligonucleotides comprises a 5′-alkyl modification of the fourth (+4) nucleotide. In certain embodiments, the ds oligonucleotides comprises a 5′-methyl modification of the fourth (+4) nucleotide. In certain embodiments, the ds oligonucleotides comprises a 5′-alkyl modification of the third (+3) nucleotide and fourth (+4) nucleotide. In certain embodiments, the ds oligonucleotides comprises a 5′-methyl modification of the third (+3) nucleotide and fourth (+4) nucleotide.

[0456] In certain embodiments, the one or more Rp, Sp, or stereorandom non-negatively charged internucleotidic linkage incorporated into the guide strand is an Rp non-negatively charged internucleotidic linkage. In certain embodiments, the one or more Rp, Sp, or stereorandom non-negatively charged internucleotidic linkage is an Sp non-negatively charged internucleotidic linkage. In certain embodiments, the one or more Rp, Sp, or stereorandom non-negatively charged internucleotidic linkage is a stereorandom non-negatively charged internucleotidic linkage. In certain further embodiments, the passenger strand comprises an Sp backbone phosphorothioate chiral center between the 5′ terminal (+1) nucleotide and the immediately downstream (+2) nucleotide and an Sp backbone phosphorothioate chiral center between the penultimate (N-1) nucleotide and the 3′ terminal (N) nucleotide. In certain embodiments, provided ds oligonucleotides may participate in exon skipping mechanisms. In certain embodiments, provided ds oligonucleotides may be aptamers. In certain embodiments, provided ds oligonucleotides may bind to and inhibit the function of a protein, small molecule, nucleic acid or cell. In certain embodiments, provided ds oligonucleotides may participate in forming a triplex helix with a double-stranded nucleic acid in the cell. In certain embodiments, provided ds oligonucleotides may bind to genomic (e.g., chromosomal) nucleic acid. In certain embodiments, provided ds oligonucleotides may bind to genomic (e.g., chromosomal) nucleic acid, thus preventing or decreasing expression of the nucleic acid (e.g., by preventing or decreasing transcription, transcriptional enhancement, modification, etc.). In certain embodiments, provided ds oligonucleotides may bind to DNA quadruplexes. In certain embodiments, provided ds oligonucleotides may be immunomodulatory. In certain embodiments, provided ds oligonucleotides may be immunostimulatory. In certain embodiments, provided oligonucleotides may be immunostimulatory and may comprise a CpG sequence. In certain embodiments, provided ds oligonucleotides may be immunostimulatory and may comprise a CpG sequence and may be useful as an adjuvant. In certain embodiments, provided ds oligonucleotides may be immunostimulatory and may comprise a CpG sequence and may be useful as an adjuvant in treating a disease (e.g., an infectious disease or cancer). In certain embodiments, provided ds oligonucleotides may be therapeutic. In certain embodiments, provided ds oligonucleotides may be non-therapeutic. In certain embodiments, provided ds oligonucleotides may be therapeutic or non-therapeutic. In certain embodiments, provided ds oligonucleotides are useful in therapeutic, diagnostic, research and/or nanomaterials applications. In certain embodiments, provided ds oligonucleotides may be useful for experimental purposes. In certain embodiments, provided ds oligonucleotides may be useful for experimental purposes, e.g., as a probe, in a microarray, etc. In certain embodiments, provided ds oligonucleotides may participate in more than one biological mechanism; in certain such embodiments, for example, provided ds oligonucleotides may participate in both RNAi and RNase H mechanisms.

[0457] In certain embodiments, provided ds oligonucleotides are directed to a target (e.g., a target sequence, a target RNA, a target mRNA, a target pre-mRNA, a target gene, etc.). A target gene is a gene with respect to which expression and/or activity of one or more gene products (e.g., RNA and/or protein products) are intended to be altered. In certain embodiments, a target gene is intended to be inhibited. Thus, when a ds oligonucleotide as described herein acts on a particular target gene, presence and/or activity of one or more gene products of that gene are altered when the ds oligonucleotide is present as compared with when it is absent.

[0458] In certain embodiments, a target is a specific allele with respect to which expression and/or activity of one or more products (e.g., RNA and/or protein products) are intended to be altered. In certain embodiments, a target allele is one whose presence and/or expression is associated (e.g., correlated) with presence, incidence, and/or severity, of one or more diseases and/or conditions. Alternatively or additionally, in certain embodiments, a target allele is one for which alteration of level and/or activity of one or more gene products correlates with improvement (e.g., delay of onset, reduction of severity, responsiveness to other therapy, etc.) in one or more aspects of a disease and/or condition.

[0459] In certain embodiments, e.g., where presence and/or activity of a particular allele (a disease-associated allele) is associated (e.g., correlated) with presence, incidence and/or severity of one or more disorders, diseases and/or conditions, a different allele of the same gene exists and is not so associated, or is associated to a lesser extent (e.g., shows less significant, or statistically insignificant correlation), ds oligonucleotides and methods thereof as described herein may preferentially or specifically target the associated allele relative to the one or more less-associated/unassociated allele(s), thus mediating allele-specific suppression.

[0460] In certain embodiments, a target sequence is a sequence to which an oligonucleotide as described herein binds. In certain embodiments, a target sequence is identical to, or is an exact complement of, a sequence of a provided oligonucleotide, or of consecutive residues therein (e.g., a provided oligonucleotide includes a target-binding sequence that is identical to, or an exact complement of, a target sequence). In certain embodiments, a target-binding sequence is an exact complement of a target sequence of a transcript (e.g., pre-mRNA, mRNA, etc.). A target-binding sequence/target sequence can be of various lengths to provided oligonucleotides with desired activities and/or properties. In certain embodiments, a target binding sequence/target sequence comprises 5-50 (e.g., 10-40, 15-30, 15-25, 16-25, 17-25, 18-25, 19-25, 20-25, 10, 11, 12, 13, 14, 15, 16, 17, 18, 19, 20, 21, 22, 23, 24, 25, or more) bases. In certain embodiments, a small number of differences/mismatches is tolerated between (a relevant portion of) an oligonucleotide and its target sequence, including but not limited to the 5′ and/or 3′-end regions of the target and/or oligonucleotide sequence. In certain embodiments, a target sequence is present within a target gene. In certain embodiments, a target sequence is present within a transcript (e.g., an mRNA and/or a pre-mRNA) produced from a target gene.

[0461] In certain embodiments, a target sequence includes one or more allelic sites (i.e., positions within a target gene at which allelic variation occurs). In certain embodiments, an allelic site is a mutation. In certain embodiments, an allelic site is a SNP. In some such embodiments, a provided oligonucleotide binds to one allele preferentially or specifically relative to one or more other alleles. In certain embodiments, a provided oligonucleotide binds preferentially to a disease-associated allele. For example, in certain embodiments, an oligonucleotide (or a target-binding sequence portion thereof) provided herein has a sequence that is, fully or at least in part, identical to, or an exact complement of a particular allelic version of a target sequence.

[0462] In certain embodiments, an oligonucleotide (or a target-binding sequence portion thereof) provided herein has a sequence that is identical to, or an exact complement of a target sequence comprising an allelic site, or an allelic site, of a disease-associated allele. In certain embodiments, an oligonucleotide provided herein has a target binding sequence that is an exact complement of a target sequence comprising an allelic site of a transcript of an allele (in certain embodiments, a disease-associated allele), wherein the allelic site is a mutation. In certain embodiments, an oligonucleotide provided herein has a target binding sequence that is an exact complement of a target sequence comprising an allelic site of a transcript of an allele (in certain embodiments, a disease-associated allele), wherein the allelic site is a SNP. In certain embodiments, a sequence is any sequence disclosed herein.

[0463] Unless otherwise noted, all sequences (including, but not limited to base sequences and patterns of chemistry, modification, and/or stereochemistry) are presented in 5′ to 3′ order, with the 5′ terminal nucleotide identified as the “+1” position and the 3′ terminal nucleotide identified either by the number of nucleotides of the full sequence or by “N”, with the penultimate nucleotide identified, e.g., as “N-i”, and so on.

[0464] In certain embodiments, the present disclosure provides compositions and methods related to an oligonucleotide which is specific to a target and which has any format, structural element or base sequence of any oligonucleotide disclosed herein.

[0465] In certain embodiments, the present disclosure provides compositions and methods related to an oligonucleotide which is specific to a target and which has or comprises the base sequence of any oligonucleotide disclosed herein, or a region of at least 15 contiguous nucleotides of the base sequence of any oligonucleotide disclosed herein, wherein the first nucleotide of the base sequence or the first nucleotide of the at least 15 contiguous nucleotides can be optionally replaced by T or DNA T.

[0466] In certain embodiments, the present disclosure provides compositions and methods for RNA interference directed by a RNAi agent (also referred to as a RNAi oligonucleotides). In certain embodiments, oligonucleotides of such compositions can have a format, structural element or base sequence of an oligonucleotide disclosed herein.

[0467] In certain embodiments, the present disclosure provides compositions and methods for RNase H-mediated knockdown of a target gene RNA directed by an oligonucleotide (e.g., an antisense oligonucleotide).

[0468] Provided oligonucleotides and oligonucleotide compositions can have any format, structural element or base sequence of any oligonucleotide disclosed herein. In certain embodiments, a structural element is a 5′-end structure, 5′-end region, 5′-nucleotide, seed region, post-seed region, 3′-end region, 3′-terminal dinucleotide, 3′-end cap, or any portion of any of these structures, GC content, long GC stretch, and/or any modification, chemistry, stereochemistry, pattern of modification, chemistry or stereochemistry, or a chemical moiety (e.g., including but not limited to, a targeting moiety, a lipid moiety, a GalNAc moiety, a carbohydrate moiety, etc.), any component, or any combination of any of the above.

[0469] In certain embodiments, the present disclosure provides compositions and methods of use of an oligonucleotide.

[0470] In certain embodiments, the present disclosure provides compositions and methods of use of an oligonucleotide which can direct both RNA interference and RNase H-mediated knockdown of a target gene RNA. In certain embodiments, oligonucleotides of such compositions can have a format, structural element or base sequence of an oligonucleotide disclosed herein.

[0471] In certain embodiments, an oligonucleotide directing a particular event or activity participates in the particular event or activity, e.g., a decrease in the expression, level or activity of a target gene or a gene product thereof. In certain embodiments, an oligonucleotide is deemed to “direct” a particular event or activity when presence of the oligonucleotide in a system in which the event or activity can occur correlates with increased detectable incidence, frequency, intensity and/or level of the event or activity.

[0472] In certain embodiments, provided ds oligonucleotides, compositions and methods can be delivered to various regions of the central nervous system. For example, but not by way of limitation, in certain embodiments, provided ds oligonucleotides, compositions and methods can be delivered to various regions of the brain. In certain embodiments, provided ds oligonucleotides, compositions and methods can be delivered to the cerebellum. In certain embodiments, provided ds oligonucleotides, compositions and methods can be delivered to the hippocampus. In certain embodiments, provided ds oligonucleotides, compositions and methods can be delivered to the cortex. In certain embodiments, provided ds oligonucleotides, compositions and methods can be delivered to the striatum. In certain embodiments, provided ds oligonucleotides, compositions and methods can be delivered to the spinal cord. In certain embodiments, provided ds oligonucleotides, compositions and methods can be delivered to the brain stem.

[0473] In certain embodiments, provided ds oligonucleotides, compositions and methods can be delivered to various regions of the central nervous system without conjugation to a targeting ligand (e.g., peptide, sugar, etc.), without a delivery system (e.g., lipid nanoparticles, etc.), or combinations thereof.

[0474] In certain embodiments, a provided oligonucleotide comprises any one or more structural elements of an oligonucleotide as described herein, e.g., a base sequence (or a portion thereof of at least 15 contiguous bases); a pattern of internucleotidic linkages (or a portion thereof of at least 5 contiguous internucleotidic linkage); a pattern of stereochemistry of internucleotidic linkages (or a portion thereof of at least 5 contiguous internucleotidic linkages); a 5′-end structure; a 5′-end region; a first region; a second region; and a 3′-end region (which can be a 3′-terminal dinucleotide and/or a 3′-end cap); and an optional additional chemical moiety; and, in certain embodiments, at least one structural element comprises a chirally controlled chiral center. In certain embodiments, a 3′-terminal dinucleotide can comprise two total nucleotides. In certain embodiments, an oligonucleotide further comprises a chemical moiety selected from, as non-limiting examples, a targeting moiety, a carbohydrate moiety, a GalNAc moiety, a lipid moiety, and any other chemical moiety described herein or known in the art. In certain embodiments, a moiety that binds APGR is a moiety of GalNAc, or a variant, derivative or modified version thereof, as described herein and/or known in the art. In certain embodiments, an oligonucleotide is a RNAi agent. In certain embodiments, a first region is a seed region. In certain embodiments, a second region is a post-seed region.

[0475] In certain embodiments, a provided oligonucleotide comprises any one or more structural elements of a RNAi agent as described herein, e.g., a 5′-end structure; a 5′-end region; a seed region; a post-seed region (the region between the seed region and the 3′-end region); and a 3′-end region (which can be a 3′-terminal dinucleotide and/or a 3′-end cap); and an optional additional chemical moiety; and, in certain embodiments, at least one structural element comprises a chirally controlled chiral center. In certain embodiments, a 3′-terminal dinucleotide can comprise two total nucleotides. In certain embodiments, an oligonucleotide further comprises a chemical moiety selected from, as non-limiting examples, a targeting moiety, a carbohydrate moiety, a GalNAc moiety, and a lipid moiety. In certain embodiments, a moiety that binds APGR is any GalNAc, or variant, derivative or modification thereof, as described herein or known in the art.

[0476] In certain embodiments, a provided oligonucleotide comprises any one or more structural elements of an oligonucleotide as described herein, e.g., a 5′-end structure, a 5′-end region, a first region, a second region, a 3′-end region, and an optional additional chemical moiety, wherein at least one structural element comprises a chirally controlled chiral center. In certain embodiments, the oligonucleotide comprises a span of at least 5 total nucleotides without 2′-modifications. In certain embodiments, the oligonucleotide further comprises an additional chemical moiety selected from, as non-limiting examples, a targeting moiety, a carbohydrate moiety, a GalNAc moiety, and a lipid moiety. In certain embodiments, a provided oligonucleotide is capable of directing RNA interference. In certain embodiments, a provided oligonucleotide is capable of directing RNase H-mediated knockdown. In certain embodiments, a provided oligonucleotide is capable of directing both RNA interference and RNase H-mediated knockdown. In certain embodiments, a first region is a seed region. In certain embodiments, a second region is a post-seed region.

[0477] In certain embodiments, a provided oligonucleotide comprises any one or more structural elements of a RNAi agent, e.g., a 5′-end structure, a 5′-end region, a seed region, a post-seed region, and a 3′-end region and an optional additional chemical moiety, wherein at least one structural element comprises a chirally controlled chiral center; and, in certain embodiments, the oligonucleotide is also capable of directing RNase H-mediated knockdown of a target gene RNA. In certain embodiments, the oligonucleotide comprises a span of at least 5 total 2′-deoxy nucleotides. In certain embodiments, the oligonucleotide further comprises a chemical moiety selected from, as non-limiting examples, a targeting moiety, a carbohydrate moiety, a GalNAc moiety, and a lipid moiety, and any other additional chemical moiety described herein.

[0478] In certain embodiments, the present disclosure demonstrates that oligonucleotide properties can be modulated through chemical modifications. In certain embodiments, the present disclosure provides an oligonucleotide composition comprising a first plurality of oligonucleotides which have a common base sequence and comprise one or more internucleotidic linkage, sugar, and/or base modifications. In certain embodiments, the present disclosure provides an oligonucleotide composition capable of directing RNA interference and comprising a first plurality of oligonucleotides which have a common base sequence and comprise one or more internucleotidic linkage, and/or one or more sugar, and/or one or more base modifications. In certain embodiments, an oligonucleotide or oligonucleotide composition is also capable of directing RNase H-mediated knockdown of a target gene RNA. In certain embodiments, the present disclosure demonstrates that oligonucleotide properties, e.g., activities, toxicities, etc., can be modulated through chemical modifications of sugars, nucleobases, and/or internucleotidic linkages. In certain embodiments, the present disclosure provides an oligonucleotide composition comprising a plurality of oligonucleotides which have a common base sequence, and comprise one or more modified internucleotidic linkages (or “non-natural internucleotidic linkages”, linkages that can be utilized in place of a natural phosphate internucleotidic linkage (—OP(O)(OH)O—), which may exist as a salt form (—OP(O)(O⁻)O—) at a physiological pH) found in natural DNA and RNA), one or more modified sugar moieties, and/or one or more natural phosphate linkages. In certain embodiments, provided oligonucleotides may comprise two or more types of modified internucleotidic linkages. In certain embodiments, a provided oligonucleotide comprises a non-negatively charged internucleotidic linkage. In certain embodiments, a non-negatively charged internucleotidic linkage is a neutral internucleotidic linkage. In certain embodiments, a neutral internucleotidic linkage comprises a cyclic guanidine moiety. Such moieties an optionally substituted. In certain embodiments, a provided oligonucleotide comprises a neutral internucleotidic linkage and another internucleotidic linkage which is not a neutral backbone. In certain embodiments, a provided oligonucleotide comprises a neutral internucleotidic linkage and a phosphorothioate internucleotidic linkage. In certain embodiments, provided oligonucleotide compositions comprising a plurality of oligonucleotides are chirally controlled and level of the plurality of oligonucleotides in the composition is controlled or pre-determined, and oligonucleotides of the plurality share a common stereochemistry configuration at one or more chiral internucleotidic linkages. For example, in certain embodiments, oligonucleotides of a plurality share a common stereochemistry configuration at 1, 2, 3, 4, 5, 6, 7, 8, 9, 10, 11, 12, 13, 14, 15, 16, 17, 18, 19, 20, 21, 22, 23, 24, 25, 26, 27, 28, 29, 30, 35, 40, 45, 50 or more chiral internucleotidic linkages, each of which is independently Rp or Sp; in certain embodiments, oligonucleotides of a plurality share a common stereochemistry configuration at each chiral internucleotidic linkages. In certain embodiments, a chiral internucleotidic linkage where a controlled level of oligonucleotides of a composition share a common stereochemistry configuration (independently in the Rp or Sp configuration) is referred to as a chirally controlled internucleotidic linkage. In certain embodiments, a modified internucleotidic linkage is a non-negatively charged (neutral or cationic) internucleotidic linkage in that at a pH, (e.g., human physiological pH (˜7.4), pH of a delivery site (e.g., an organelle, cell, tissue, organ, organism, etc.), etc.), it largely (e.g., at least 5%, 10%, 20%, 30%, 40%, 50%, 60%, 70%, 80%, 90%, etc.; in certain embodiments, at least 30%; in certain embodiments, at least 40%; in certain embodiments, at least 50%; in certain embodiments, at least 60%; in certain embodiments, at least 70%; in certain embodiments, at least 80%; in certain embodiments, at least 90%; in certain embodiments, at least 99%; etc.;) exists as a neutral or cationic form (as compared to an anionic form (e.g., —O—P(O)(O⁻)—O— (the anionic form of natural phosphate linkage), —O—P(O)(S⁻)—O— (the anionic form of phosphorothioate linkage), etc.)), respectively. In certain embodiments, a modified internucleotidic linkage is a neutral internucleotidic linkage in that at a pH, it largely exists as a neutral form. In certain embodiments, a modified internucleotidic linkage is a cationic internucleotidic linkage in that at a pH, it largely exists as a cationic form. In certain embodiments, a pH is human physiological pH (˜7.4). In certain embodiments, a modified internucleotidic linkage is a neutral internucleotidic linkage in that at pH 7.4 in a water solution, at least 90% of the internucleotidic linkage exists as its neutral form. In certain embodiments, a modified internucleotidic linkage is a neutral internucleotidic linkage in that in a water solution of the oligonucleotide, at least 50%, 60%, 70%, 80%, 90%, 95%, or 99% of the internucleotidic linkage exists in its neutral form. In certain embodiments, the percentage is at least 90%. In certain embodiments, the percentage is at least 95%. In certain embodiments, the percentage is at least 99%. In certain embodiments, a non-negatively charged internucleotidic linkage, e.g., a neutral internucleotidic linkage, when in its neutral form has no moiety with a pKa that is less than 8, 9, 10, 11. 12, 13, or 14. In certain embodiments, pKa of an internucleotidic linkage in the present disclosure can be represented by pKa of CH₃—the internucleotidic linkage-CH₃ (i.e., replacing the two nucleoside units connected by the internucleotidic linkage with two —CH₃ groups). Without wishing to be bound by any particular theory, in at least some cases, a neutral internucleotidic linkage in an oligonucleotide can provide improved properties and/or activities, e.g., improved delivery, improved resistance to exonucleases and endonucleases, improved cellular uptake, improved endosomal escape and/or improved nuclear uptake, etc., compared to a comparable nucleic acid which does not comprises a neutral internucleotidic linkage.

[0479] In certain embodiments, a non-negatively charged internucleotidic linkage has the structure of e.g., of formula I-n-1, I-n-2, I-n-3, II, II-a-1, II-a-2, II-b-1, II-b-2, II-c-1, II-c-2, II-d-1, II-d-2, as described in U.S. Pat. Nos. 9,394,333, 9,744,183, 9,605,019, 9,598,458, 9,982,257, U.S. Ser. No. 10/160,969, U.S. Ser. No. 10/479,995, US 2020/0056173, US 2018/0216107, US 2019/0127733, U.S. Ser. No. 10/450,568, US 2019/0077817, US 2019/0249173, US 2019/0375774, WO 2018/223056, WO 2018/223073, WO 2018/223081, WO 2018/237194, WO 2019/032607, WO 2019/055951, WO 2019/075357, WO 2019/200185, WO 2019/217784, and/or WO 2019/032612 etc. In certain embodiments, a non-negatively charged internucleotidic linkage comprises a cyclic guanidine moiety. In certain embodiments, a modified internucleotidic linkage comprising a cyclic guanidine moiety has the structure of

[chemical structure]

In certain embodiments, a modified internucleotidic linkage comprising a cyclic guanidine moiety has the structure of:

[chemical structure]

In certain embodiments, a modified internucleotidic linkage comprising a cyclic guanidine moiety has the structure of:

[chemical structure]

In certain embodiments, a modified internucleotidic linkage comprising a cyclic guanidine moiety has the structure of

[chemical structure]

In certain embodiments, a modified internucleotidic linkage comprising a cyclic guanidine moiety has the structure of:

[chemical structure]

In certain embodiments, a neutral internucleotidic linkage comprising a cyclic guanidine moiety is chirally controlled. In certain embodiments, the present disclosure pertains to a composition comprising an oligonucleotide comprising at least one neutral internucleotidic linkage and at least one phosphorothioate internucleotidic linkage.

[0480] In certain embodiments, the present disclosure pertains to a composition comprising an oligonucleotide comprising at least one neutral internucleotidic linkage and at least one phosphorothioate internucleotidic linkage, wherein the phosphorothioate internucleotidic linkage is a chirally controlled internucleotidic linkage in the Sp configuration.

[0481] In certain embodiments, the present disclosure pertains to a composition comprising an oligonucleotide comprising at least one neutral internucleotidic linkage and at least one phosphorothioate internucleotidic linkage, wherein the phosphorothioate is a chirally controlled internucleotidic linkage in the Rp configuration.

[0482] In certain embodiments, the present disclosure pertains to a composition comprising an oligonucleotide comprising at least one neutral internucleotidic linkage of a neutral internucleotidic linkage comprising a Tmg group

[chemical structure]

and at least one phosphorothioate.

[0483] In certain embodiments, each internucleotidic linkage in an oligonucleotide is independently selected from a natural phosphate linkage, a phosphorothioate linkage, and a non-negatively charged internucleotidic linkage (e.g., n001, n003, n004, n006, n008, n009, n013, n020, n021, n025, n026, n029, n031, n033, n037, n043, n046, n047, n048, n054, n058, or n055). In some embodiments, each internucleotidic linkage in an oligonucleotide is independently selected from a natural phosphate linkage, a phosphorothioate linkage, and a neutral internucleotidic linkage (e.g., n001, n003, n004, n006, n008, n009, n013, n020, n021, n025, n026, n029, n031, n033, n037, n043, n046, n047, n048, n054, n058, or n055).

[0484] In certain embodiments, the present disclosure pertains to a composition comprising an oligonucleotide comprising at least one neutral internucleotidic linkage of a neutral internucleotidic linkage comprising a Tmg group, and at least one phosphorothioate, wherein the phosphorothioate is a chirally controlled internucleotidic linkage in the Sp configuration.

[0485] In certain embodiments, the present disclosure pertains to a composition comprising an oligonucleotide comprising at least one neutral internucleotidic linkage selected from a neutral internucleotidic linkage of a neutral internucleotidic linkage comprising a Tmg group, and at least one phosphorothioate, wherein the phosphorothioate is a chirally controlled internucleotidic linkage in the Rp configuration.

[0486] Various types of internucleotidic linkages differ in properties. Without wishing to be bound by any theory, the present disclosure notes that a natural phosphate linkage (phosphodiester internucleotidic linkage) is anionic and may be unstable when used by itself without other chemical modifications in vivo; a phosphorothioate internucleotidic linkage is anionic, generally more stable in vivo than a natural phosphate linkage, and generally more hydrophobic; a neutral internucleotidic linkage such as one exemplified in the present disclosure comprising a cyclic guanidine moiety is neutral at physiological pH, can be more stable in vivo than a natural phosphate linkage, and more hydrophobic.

[0487] In certain embodiments, a chirally controlled neutral internucleotidic linkage sis neutral at physiological pH, chirally controlled, stable in vivo, hydrophobic, and may increase endosomal escape.

[0488] In certain embodiments, provided oligonucleotides comprise one or more regions, e.g., a block, wing, core, 5′-end, 3′-end, middle, seed, post-seed region, etc. In certain embodiments, a region (e.g., a block, wing, core, 5′-end, 3′-end, middle region, etc.) comprises a non-negatively charged internucleotidic linkage, e.g., of formula I-n-1, I-n-2, I-n-3, II, II-a-1, II-a-2, II-b-1, II-b-2, II-c-1, II-c-2, II-d-1, II-d-2, etc. as described in U.S. Pat. Nos. 9,394,333, 9,744,183, 9,605,019, 9,598,458, 9,982,257, U.S. Ser. No. 10/160,969, U.S. Ser. No. 10/479,995, US 2020/0056173, US 2018/0216107, US 2019/0127733, U.S. Ser. No. 10/450,568, US 2019/0077817, US 2019/0249173, US 2019/0375774, WO 2018/223056, WO 2018/223073, WO 2018/223081, WO 2018/237194, WO 2019/032607, WO 2019/055951, WO 2019/075357, WO 2019/200185, WO 2019/217784, and/or WO 2019/032612. In certain embodiments, a region comprises a neutral internucleotidic linkage. In certain embodiments, a region comprises an internucleotidic linkage which comprises a cyclic guanidine. In certain embodiments, a region comprises an internucleotidic linkage which comprises a cyclic guanidine moiety. In certain embodiments, a region comprises an internucleotidic linkage having the structure of

[chemical structure]

In certain embodiments, a modified internucleotidic linkage comprising a cyclic guanidine moiety has the structure of:

[chemical structure]

In certain embodiments, a modified internucleotidic linkage comprising a cyclic guanidine moiety has the structure of:

[chemical structure]

In certain embodiments, a modified internucleotidic linkage comprising a cyclic guanidine moiety has the structure of:

[chemical structure]

In certain embodiments, a modified internucleotidic linkage comprising a cyclic guanidine moiety has the structure of:

[chemical structure]

In certain embodiments, such internucleotidic linkages are chirally controlled.
In certain embodiments, a modified internucleotidic linkage has the structure of
In certain embodiments, a modified internucleotidic linkage has the structure of

[chemical structure]

and is optionally chirally controlled,

[chemical structure]

and is optionally chirally controlled or

[chemical structure]

and is optionally chirally controlled wherein R² is H C6-amine

[chemical structure]

[chemical structure]

[chemical structure]

[0489] In certain embodiments, a nucleotide is a natural nucleotide. In certain embodiments, a nucleotide is a modified nucleotide. In certain embodiments, a nucleotide is a nucleotide analog. In certain embodiments, a base is a modified base. In certain embodiments, a base is protected nucleobase, such as a protected nucleobase used in oligonucleotide synthesis. In certain embodiments, a base is a base analog. In certain embodiments, a sugar is a modified sugar. In certain embodiments, a sugar is a sugar analog. In certain embodiments, an internucleotidic linkage is a modified internucleotidic linkage. In certain embodiments, a nucleotide comprises a base, a sugar, and an internucleotidic linkage, wherein each of the base, the sugar, and the internucleotidic linkage is independently and optionally naturally-occurring or non-naturally occurring. In certain embodiments, a nucleoside comprises a base and a sugar, wherein each of the base and the sugar is independently and optionally naturally-occurring or non-naturally occurring. Non-limiting examples of nucleotides include DNA (2′-deoxy) and RNA (2′-OH) nucleotides; and those which comprise one or more modifications at the base, sugar and/or internucleotidic linkage. Non-limiting examples of sugars include ribose and deoxyribose; ribose and deoxyribose with 2′-modifications, including but not limited to 2′-F, LNA, 2′-OMe, 2′-O—C16 lipid, and 2′-MOE modifications; and ribose and deoxyribose with 5′-modifications, including, but not limited to 5′-alkyl modifications. In certain embodiments, an internucleotidic linkage is a moiety which does not a comprise a phosphorus but serves to link two natural or non-natural sugars.

[0490] In certain embodiments, a composition comprises a multimer of two or more of any: oligonucleotides of a first plurality and/or oligonucleotides of a second plurality, wherein the oligonucleotides of the first and second plurality can independently direct knockdown of the same or different targets independently via RNA interference and/or RNase H-mediated knockdown.

[0491] In certain embodiments, the present disclosure provides an oligonucleotide composition comprising a first plurality of oligonucleotides which share:
[0492] 1) a common base sequence;
[0493] 2) a common pattern of backbone linkages;
[0494] 3) common stereochemistry independently at least 1, 2, 3, 4, 5, 6, 7, 8, 9, 10, 11, 12, 13, 14, 15, 16, 17, 18, 19, 20, 21, 22, 23, 24, 25, 26, 27, 28, 29, 30, 35, 40, 45, or 50 chiral internucleotidic linkages (“chirally controlled internucleotidic linkages”); which composition is chirally controlled in that level of the first plurality of oligonucleotides in the composition is predetermined.

[0495] In certain embodiments, an oligonucleotide composition comprising a plurality of oligonucleotides (e.g., a first plurality of oligonucleotides) is chirally controlled in that oligonucleotides of the plurality share a common stereochemistry independently at one or more chiral internucleotidic linkages. In certain embodiments, oligonucleotides of the plurality share a common stereochemistry configuration at 1, 2, 3, 4, 5, 6, 7, 8, 9, 10, 11, 12, 13, 14, 15, 16, 17, 18, 19, 20, 21, 22, 23, 24, 25, 26, 27, 28, 29, 30, 35, 40, 45, 50 or more chiral internucleotidic linkages, each of which is independently Rp or Sp In certain embodiments, oligonucleotides of the plurality share a common stereochemistry configuration at each chiral internucleotidic linkages. In certain embodiments, a chiral internucleotidic linkage where a predetermined level of oligonucleotides of a composition share a common stereochemistry configuration (independently Rp or Sp) is referred to as a chirally controlled internucleotidic linkage.

[0496] In certain embodiments, a predetermined level of oligonucleotides of a provided composition, e.g., a first plurality of oligonucleotides of certain example compositions, comprise 1, 2, 3, 4, 5, 6, 7, 8, 9, 10, 11, 12, 13, 14, 15, 16, 17, 18, 19, 20, 21, 22, 23, 24, 25, 26, 27, 28, 29, 30, 35, 40, 45, 50 or more chirally controlled internucleotidic linkages.

[0497] In certain embodiments, at least 5 internucleotidic linkages are chirally controlled; in certain embodiments, at least 10 internucleotidic linkages are chirally controlled; in certain embodiments, at least 15 internucleotidic linkages are chirally controlled; in certain embodiments, each chiral internucleotidic linkage is chirally controlled.

[0498] In certain embodiments, 1%-100% of chiral internucleotidic linkages are chirally controlled. In certain embodiments, at least 5%, 10%, 15%, 20%, 25%, 30%, 35%, 40%, 45%, 50%, 55%, 60%, 65%, 70%, 75%, 80%, 85%, 90%, 91%, 92%, 93%, 94%, 95%, 96%, 97%, 98%, or 99% of chiral internucleotidic linkages are chirally controlled.

[0499] In certain embodiments, the present disclosure provides an oligonucleotide composition comprising a first plurality of oligonucleotides which share:
[0500] 1) a common base sequence;
[0501] 2) a common pattern of backbone linkages; and
[0502] 3) a common pattern of backbone chiral centers, which composition is a substantially pure preparation of oligonucleotide in that a predetermined level of the oligonucleotides in the composition have the common base sequence and length, the common pattern of backbone linkages, and the common pattern of backbone chiral centers. In certain embodiments, the common pattern of backbone chiral centers comprises at least one internucleotidic linkage comprising a chirally controlled chiral center. In certain embodiments, a predetermined level of oligonucleotides is at least 1%, 5%, 10%, 15%, 20%, 25%, 30%, 35%, 40%, 45%, 50%, 55%, 60%, 65%, 70%, 75%, 80%, 85%, 90%, 91%, 92%, 93%, 94%, 95%, 96%, 97%, 98%, or 99% of all oligonucleotides in a provided composition. In certain embodiments, a predetermined level of oligonucleotides is at least 1%, 5%, 10%, 15%, 20%, 25%, 30%, 35%, 40%, 45%, 50%, 55%, 60%, 65%, 70%, 75%, 80%, 85%, 90%, 91%, 92%, 93%, 94%, 95%, 96%, 97%, 98%, or 99% of all oligonucleotides in a provided composition that are of or comprise a common base sequence. In certain embodiments, all oligonucleotides in a provided composition that are of or comprise a common base sequence are at least 1%, 5%, 10%, 15%, 20%, 25%, 30%, 35%, 40%, 45%, 50%, 55%, 60%, 65%, 70%, 75%, 80%, 85%, 90%, 91%, 92%, 93%, 94%, 95%, 96%, 97%, 98%, or 99% of all oligonucleotides in the composition. In certain embodiments, a predetermined level of oligonucleotides is at least 1%, 5%, 10%, 15%, 20%, 25%, 30%, 35%, 40%, 45%, 50%, 55%, 60%, 65%, 70%, 75%, 80%, 85%, 90%, 91%, 92%, 93%, 94%, 95%, 96%, 97%, 98%, or 99% of all oligonucleotides in a provided composition that are of or comprise a common base sequence, base modification, sugar modification and/or modified internucleotidic linkage. In certain embodiments, all oligonucleotides in a provided composition that are of or comprise a common base sequence, base modification, sugar modification and/or modified internucleotidic linkage are at least 1%, 5%, 10%, 15%, 20%, 25%, 30%, 35%, 40%, 45%, 50%, 55%, 60%, 65%, 70%, 75%, 80%, 85%, 90%, 91%, 92%, 93%, 94%, 95%, 96%, 97%, 98%, or 99% of all oligonucleotides in the composition. In certain embodiments, a predetermined level of oligonucleotides is at least 1%, 5%, 10%, 15%, 20%, 25%, 30%, 35%, 40%, 45%, 50%, 55%, 60%, 65%, 70%, 75%, 80%, 85%, 90%, 91%, 92%, 93%, 94%, 95%, 96%, 97%, 98%, or 99% of all oligonucleotides in a provided composition that are of or comprise a common base sequence, pattern of base modification, pattern of sugar modification, and/or pattern of modified internucleotidic linkage. In certain embodiments, all oligonucleotides in a provided composition that are of or comprise a common base sequence, pattern of base modification, pattern of sugar modification, and/or pattern of modified internucleotidic linkage are at least 1%, 5%, 10%, 15%, 20%, 25%, 30%, 35%, 40%, 45%, 50%, 55%, 60%, 65%, 70%, 75%, 80%, 85%, 90%, 91%, 92%, 93%, 94%, 95%, 96%, 97%, 98%, or 99% of all oligonucleotides in the composition. In certain embodiments, a predetermined level of oligonucleotides is at least 1%, 5%, 10%, 15%, 20%, 25%, 30%, 35%, 40%, 45%, 50%, 55%, 60%, 65%, 70%, 75%, 80%, 85%, 90%, 91%, 92%, 93%, 94%, 95%, 96%, 97%, 98%, or 99% of all oligonucleotides in a provided composition that share a common base sequence, a common pattern of base modification, a common pattern of sugar modification, and/or a common pattern of modified internucleotidic linkages. In certain embodiments, all oligonucleotides in a provided composition that share a common base sequence, a common pattern of base modification, a common pattern of sugar modification, and/or a common pattern of modified internucleotidic linkages are at least 1%, 5%, 10%, 15%, 20%, 25%, 30%, 35%, 40%, 45%, 50%, 55%, 60%, 65%, 70%, 75%, 80%, 85%, 90%, 91%, 92%, 93%, 94%, 95%, 96%, 97%, 98%, or 99% of all oligonucleotides in the composition. In certain embodiments, a predetermined level is 1-100%. In certain embodiments, a predetermined level is at least 1%. In certain embodiments, a predetermined level is at least 5%. In certain embodiments, a predetermined level is at least 10%. In certain embodiments, a predetermined level is at least 20%. In certain embodiments, a predetermined level is at least 30%. In certain embodiments, a predetermined level is at least 40%. In certain embodiments, a predetermined level is at least 50%. In certain embodiments, a predetermined level is at least 60%. In certain embodiments, a predetermined level is at least 10%. In certain embodiments, a predetermined level is at least 70%. In certain embodiments, a predetermined level is at least 80%. In certain embodiments, a predetermined level is at least 90%. In certain embodiments, a predetermined level is at least 5*(½g), wherein g is the number of chirally controlled internucleotidic linkages. In certain embodiments, a predetermined level is at least 10*(½g), wherein g is the number of chirally controlled internucleotidic linkages. In certain embodiments, a predetermined level is at least 100*(½g), wherein g is the number of chirally controlled internucleotidic linkages. In certain embodiments, a predetermined level is at least (0.80)g, wherein g is the number of chirally controlled internucleotidic linkages. In certain embodiments, a predetermined level is at least (0.80)g, wherein g is the number of chirally controlled internucleotidic linkages. In certain embodiments, a predetermined level is at least (0.80)g, wherein g is the number of chirally controlled internucleotidic linkages. In certain embodiments, a predetermined level is at least (0.85)g, wherein g is the number of chirally controlled internucleotidic linkages. In certain embodiments, a predetermined level is at least (0.90)g, wherein g is the number of chirally controlled internucleotidic linkages. In certain embodiments, a predetermined level is at least (0.95)g, wherein g is the number of chirally controlled internucleotidic linkages. In certain embodiments, a predetermined level is at least (0.96)g, wherein g is the number of chirally controlled internucleotidic linkages. In certain embodiments, a predetermined level is at least (0.97)g, wherein g is the number of chirally controlled internucleotidic linkages. In certain embodiments, a predetermined level is at least (0.98)g, wherein g is the number of chirally controlled internucleotidic linkages. In certain embodiments, a predetermined level is at least (0.99)g, wherein g is the number of chirally controlled internucleotidic linkages. In certain embodiments, to determine level of oligonucleotides having g chirally controlled internucleotidic linkages in a composition, product of diastereopurity of each of the g chirally controlled internucleotidic linkages: (diastereopurity of chirally controlled internucleotidic linkage 1)*(diastereopurity of chirally controlled internucleotidic linkage 2)*. . .*(diastereopurity of chirally controlled internucleotidic linkage g) is utilized as the level, wherein diastereopurity of each chirally controlled internucleotidic linkage is independently represented by diastereopurity of a dimer comprising the same internucleotidic linkage and nucleosides flanking the internucleotidic linkage and prepared under comparable methods as the oligonucleotides (e.g., comparable or preferably identical oligonucleotide preparation cycles, including comparable or preferably identical reagents and reaction conditions). In certain embodiments, levels of oligonucleotides and/or diastereopurity can be determined by analytical methods, e.g., chromatographic, spectrometric, spectroscopic methods or any combinations thereof. Among other things, the present disclosure encompasses the recognition that stereorandom oligonucleotide preparations contain a plurality of distinct chemical entities that differ from one another, e.g., in the stereochemical structure (or stereochemistry) of individual backbone chiral centers within the oligonucleotide chain. Without control of stereochemistry of backbone chiral centers, stereorandom oligonucleotide preparations provide uncontrolled compositions comprising undetermined levels of oligonucleotide stereoisomers. Even though these stereoisomers may have the same base sequence and/or chemical modifications, they are different chemical entities at least due to their different backbone stereochemistry, and they can have, as demonstrated herein, different properties, e.g., sensitivity to nucleases, activities, distribution, etc. In certain embodiments, a particular stereoisomer may be defined, for example, by its base sequence, its length, its pattern of backbone linkages, and its pattern of backbone chiral centers. In certain embodiments, the present disclosure demonstrates that improvements in properties and activities achieved through control of stereochemistry within an oligonucleotide can be comparable to, or even better than those achieved through use of chemical modification.

[0503] Among other things, the present disclosure encompasses the recognition that stereorandom oligonucleotide preparations contain a plurality of distinct chemical entities that differ from one another, e.g., in the stereochemical structure (or stereochemistry) of individual backbone chiral centers within the oligonucleotide chain. Without control of stereochemistry of backbone chiral centers, stereorandom oligonucleotide preparations provide uncontrolled compositions comprising undetermined levels of oligonucleotide stereoisomers. Even though these stereoisomers may have the same base sequence and/or chemical modifications, they are different chemical entities at least due to their different backbone stereochemistry, and they can have, as demonstrated herein, different properties, e.g., sensitivity to nucleases, activities, distribution, etc. In certain embodiments, a particular stereoisomer may be defined, for example, by its base sequence, its length, its pattern of backbone linkages, and its pattern of backbone chiral centers. In certain embodiments, the present disclosure demonstrates that improvements in properties and activities achieved through control of stereochemistry within an oligonucleotide can be comparable to, or even better than those achieved through use of chemical modification.

### I. DETAILED DESCRIPTION OF CERTAIN EMBODIMENTS

[0504] Technologies of the present disclosure may be understood more readily by reference to the following detailed description of certain embodiments.

### Definitions

[0505] As used herein, the following definitions shall apply unless otherwise indicated. For purposes of this disclosure, the elements are identified in accordance with the Periodic Table of the Elements, CAS version, Handbook of Chemistry and Physics, 75th Ed. Additionally, general principles of organic chemistry are described in “Organic Chemistry”, Thomas Sorrell, University Science Books, Sausalito: 1999, and “March's Advanced Organic Chemistry”, 5th Ed., Ed.: Smith, M. B. and March, J., John Wiley & Sons, New York: 2001.

[0506] As used herein in the present disclosure, unless otherwise clear from context, (i) the term “a” or “an” may be understood to mean “at least one”; (ii) the term “or” may be understood to mean “and/or”; (iii) the terms “comprising”, “comprise”, “including” (whether used with “not limited to” or not), and “include” (whether used with “not limited to” or not) may be understood to encompass itemized components or steps whether presented by themselves or together with one or more additional components or steps; (iv) the term “another” may be understood to mean at least an additional/second one or more; (v) the terms “about” and “approximately” may be understood to permit standard variation as would be understood by those of ordinary skill in the art; and (vi) where ranges are provided, endpoints are included.

[0507] Unless otherwise specified, description of oligonucleotides and elements thereof (e.g., base sequence, sugar modifications, internucleotidic linkages, linkage phosphorus stereochemistry, patterns thereof, etc.) is from 5′ to 3′, with the 5′ terminal nucleotide identified as the “+1” position and the 3′ terminal nucleotide identified either by the number of nucleotides of the full sequence or by “N”, with the penultimate nucleotide identified, e.g., as “N-1”, and so on. As those skilled in the art will appreciate, in certain embodiments, oligonucleotides may be provided and/or utilized as salt forms, particularly pharmaceutically acceptable salt forms, e.g., sodium salts. As those skilled in the art will also appreciate, in certain embodiments, individual oligonucleotides within a composition may be considered to be of the same constitution and/or structure even though, within such composition (e.g., a liquid composition), particular such oligonucleotides might be in different salt form(s) (and may be dissolved and the oligonucleotide chain may exist as an anion form when, e.g., in a liquid composition) at a particular moment in time. For example, those skilled in the art will appreciate that, at a given pH, individual internucleotidic linkages along an oligonucleotide chain may be in an acid (H) form, or in one of a plurality of possible salt forms (e.g., a sodium salt, or a salt of a different cation, depending on which ions might be present in the preparation or composition), and will understand that, so long as their acid forms (e.g., replacing all cations, if any, with H+) are of the same constitution and/or structure, such individual oligonucleotides may properly be considered to be of the same constitution and/or structure.

[0508] Aliphatic: As used herein, “aliphatic” means a straight-chain (i.e., unbranched) or branched, substituted or unsubstituted hydrocarbon chain that is completely saturated or that contains one or more units of unsaturation (but not aromatic), or a substituted or unsubstituted monocyclic, bicyclic, or polycyclic hydrocarbon ring that is completely saturated or that contains one or more units of unsaturation (but not aromatic), or combinations thereof. In certain embodiments, aliphatic groups contain 1-50 aliphatic carbon atoms. In certain embodiments, aliphatic groups contain 1-20 aliphatic carbon atoms. In other embodiments, aliphatic groups contain 1-10 aliphatic carbon atoms. In other embodiments, aliphatic groups contain 1-9 aliphatic carbon atoms. In other embodiments, aliphatic groups contain 1-8 aliphatic carbon atoms. In other embodiments, aliphatic groups contain 1-7 aliphatic carbon atoms. In other embodiments, aliphatic groups contain 1-6 aliphatic carbon atoms. In still other embodiments, aliphatic groups contain 1-5 aliphatic carbon atoms, and in yet other embodiments, aliphatic groups contain 1, 2, 3, or 4 aliphatic carbon atoms. Suitable aliphatic groups include, but are not limited to, linear or branched, substituted or unsubstituted alkyl, alkenyl, alkynyl groups and hybrids thereof such as (cycloalkyl)alkyl, (cycloalkenyl)alkyl or (cycloalkyl)alkenyl.

[0509] Alkenyl: As used herein, the term “alkenyl” refers to an aliphatic group, as defined herein, having one or more double bonds.

[0510] Alkyl: As used herein, the term “alkyl” is given its ordinary meaning in the art and may include saturated aliphatic groups, including straight-chain alkyl groups, branched-chain alkyl groups, cycloalkyl (alicyclic) groups, alkyl substituted cycloalkyl groups, and cycloalkyl substituted alkyl groups. In certain embodiments, alkyl has 1-100 carbon atoms. In certain embodiments, a straight chain or branched chain alkyl has about 1-20 carbon atoms in its backbone (e.g., C₁-C₂₀ for straight chain, C₂-C₂₀ for branched chain), and alternatively, about 1-10. In certain embodiments, cycloalkyl rings have from about 3-10 carbon atoms in their ring structure where such rings are monocyclic, bicyclic, or polycyclic, and alternatively about 5, 6 or 7 carbons in the ring structure. In certain embodiments, an alkyl group may be a lower alkyl group, wherein a lower alkyl group comprises 1-4 carbon atoms (e.g., C₁-C₄ for straight chain lower alkyls).

[0511] Alkynyl: As used herein, the term “alkynyl” refers to an aliphatic group, as defined herein, having one or more triple bonds.

[0512] Analog: The term “analog” includes any chemical moiety which differs structurally from a reference chemical moiety or class of moieties, but which is capable of performing at least one function of such a reference chemical moiety or class of moieties. As non-limiting examples, a nucleotide analog differs structurally from a nucleotide but performs at least one function of a nucleotide; a nucleobase analog differs structurally from a nucleobase but performs at least one function of a nucleobase; etc.

[0513] Animal: As used herein, the term “animal” refers to any member of the animal kingdom. In certain embodiments, “animal” refers to humans, at any stage of development. In certain embodiments, “animal” refers to non-human animals, at any stage of development. In certain embodiments, the non-human animal is a mammal (e.g., a rodent, a mouse, a rat, a rabbit, a monkey, a dog, a cat, a sheep, cattle, a primate and/or a pig). In certain embodiments, animals include, but are not limited to, mammals, birds, reptiles, amphibians, fish and/or worms. In certain embodiments, an animal may be a transgenic animal, a genetically-engineered animal and/or a clone.

[0514] Aryl: The term “aryl”, as used herein, used alone or as part of a larger moiety as in “aralkyl,” “aralkoxy,” or “aryloxyalkyl,” refers to monocyclic, bicyclic or polycyclic ring systems having a total of five to thirty ring members, wherein at least one ring in the system is aromatic. In certain embodiments, an aryl group is a monocyclic, bicyclic or polycyclic ring system having a total of five to fourteen ring members, wherein at least one ring in the system is aromatic, and wherein each ring in the system contains 3 to 7 ring members. In certain embodiments, each monocyclic ring unit is aromatic. In certain embodiments, an aryl group is a biaryl group. The term “aryl” may be used interchangeably with the term “aryl ring.” In certain embodiments of the present disclosure, “aryl” refers to an aromatic ring system which includes, but is not limited to, phenyl, biphenyl, naphthyl, binaphthyl, anthracyl and the like, which may bear one or more substituents. Also included within the scope of the term “aryl,” as it is used herein, is a group in which an aromatic ring is fused to one or more non-aromatic rings, such as indanyl, phthalimidyl, naphthimidyl, phenanthridinyl, or tetrahydronaphthyl, and the like.

[0515] Chiral control: As used herein, “chiral control” refers to control of the stereochemical designation of the chiral linkage phosphorus in a chiral internucleotidic linkage within an oligonucleotide. As used herein, a chiral internucleotidic linkage is an internucleotidic linkage whose linkage phosphorus is chiral. In certain embodiments, a control is achieved through a chiral element that is absent from the sugar and base moieties of an oligonucleotide, for example, in certain embodiments, a control is achieved through use of one or more chiral auxiliaries during oligonucleotide preparation, which chiral auxiliaries often are part of chiral phosphoramidites used during oligonucleotide preparation. In contrast to chiral control, a person having ordinary skill in the art will appreciate that conventional oligonucleotide synthesis which does not use chiral auxiliaries cannot control stereochemistry at a chiral internucleotidic linkage if such conventional oligonucleotide synthesis is used to form the chiral internucleotidic linkage. In certain embodiments, the stereochemical designation of each chiral linkage phosphorus in each chiral internucleotidic linkage within an oligonucleotide is controlled.

[0516] Chirally controlled oligonucleotide composition: The terms “chirally controlled oligonucleotide composition”, “chirally controlled nucleic acid composition”, and the like, as used herein, refers to a composition that comprises a plurality of oligonucleotides (or nucleic acids) which share a common base sequence, wherein the plurality of oligonucleotides (or nucleic acids) share the same linkage phosphorus stereochemistry at one or more chiral internucleotidic linkages (chirally controlled or stereodefined internucleotidic linkages, whose chiral linkage phosphorus is Rp or Sp in the composition (“stereodefined”), not a random Rp and Sp mixture as non-chirally controlled internucleotidic linkages). In certain embodiments, a chirally controlled oligonucleotide composition comprises a plurality of oligonucleotides (or nucleic acids) that share: 1) a common base sequence, 2) a common pattern of backbone linkages, and 3) a common pattern of backbone phosphorus modifications, wherein the plurality of oligonucleotides (or nucleic acids) share the same linkage phosphorus stereochemistry at one or more chiral internucleotidic linkages (chirally controlled or stereodefined internucleotidic linkages, whose chiral linkage phosphorus is Rp or Sp in the composition (“stereodefined”), not a random Rp and Sp mixture as non-chirally controlled internucleotidic linkages). Level of the plurality of oligonucleotides (or nucleic acids) in a chirally controlled oligonucleotide composition is pre-determined/controlled or enriched (e.g., through chirally controlled oligonucleotide preparation to stereoselectively form one or more chiral internucleotidic linkages) compared to a random level in a non-chirally controlled oligonucleotide composition. In certain embodiments, about 1%-100%, (e.g., about 5%-1⁰⁰%, 10%-10⁰%, 20%-100%, 30%-100%, 40%-100%, 50%-100%, 60%-100%, 70%-100%, 80-100%, 90-100%, 95-100%, 50%-90%, or about 5%, 10%, 20%, 30%, 40%, 50%, 60%, 70%, 80%, 85%, 90%, 91%, 92%, 93%, 94%, 95%, 96%, 97%, 98%, 99%, or 100%, or at least 5%, 10%, 20%, 30%, 40%, 50%, 60%, 70%, 80%, 85%, 90%, 91%, 92%, 93%, 94%, 95%, 96%, 97%, 98%, or 99%) of all oligonucleotides in a chirally controlled oligonucleotide composition are oligonucleotides of the plurality. In certain embodiments, about 1%-100%, (e.g., about 5%-100%, 10%-100%, 20%-100%, 30%-100%, 40%-100%, 50%-100%, 60%-100%, 70%-100%, 80-100%, 90-100%, 95-100%, 50%-90%, or about 5%, 10%, 20%, 30%, 40%, 50%, 60%, 70%, 80%, 85%, 90%, 91%, 92%, 93%, 94%, 95%, 96%, 97%, 98%, 99%, or 100%, or at least 5%, 10%, 20%, 30%, 40%, 50%, 60%, 70%, 80%, 85%, 90%, 91%, 92%, 93%, 94%, 95%, 96%, 97%, 98%, or 99%) of all oligonucleotides in a chirally controlled oligonucleotide composition that share the common base sequence, the common pattern of backbone linkages, and the common pattern of backbone phosphorus modifications are oligonucleotides of the plurality. In certain embodiments, a level is about 1%-100%, (e.g., about 5%-100%, 10%-100%, 20%-100%, 30%-100%, 40%-100%, 50%-100%, 60%-100%, 70%-100%, 80-100%, 90-100%, 95-100%, 50%-90%, or about 5%, 10%, 20%, 30%, 40%, 50%, 60%, 70%, 80%, 85%, 90%, 91%, 92%, 93%, 94%, 95%, 96%, 97%, 98%, 99%, or 100%, or at least 5%, 10%, 20%, 30%, 40%, 50%, 60%, 70%, 80%, 85%, 90%, 91%, 92%, 93%, 94%, 95%, 96%, 97%, 98%, or 99%) of all oligonucleotides in a composition, or of all oligonucleotides in a composition that share a common base sequence (e.g., of a plurality of oligonucleotide or an oligonucleotide type), or of all oligonucleotides in a composition that share a common base sequence, a common pattern of backbone linkages, and a common pattern of backbone phosphorus modifications, or of all oligonucleotides in a composition that share a common base sequence, a common patter of base modifications, a common pattern of sugar modifications, a common pattern of internucleotidic linkage types, and/or a common pattern of internucleotidic linkage modifications. In certain embodiments, the plurality of oligonucleotides share the same stereochemistry at about 1-50 (e.g., about 1-10, 1-20, 5-10, 5-20, 10-15, 10-20, 10-25, 10-30, or about 1, 2, 3, 4, 5, 6, 7, 8, 9, 10, 11, 12, 13, 14, 15, 16, 17, 18, 19, or 20, or at least 1, 2, 3, 4, 5, 6, 7, 8, 9, 10, 11, 12, 13, 14, 15, 16, 17, 18, 19, or 20) chiral internucleotidic linkages. In certain embodiments, the plurality of oligonucleotides share the same stereochemistry at about 1%-100% (e.g., about 5%-100%, 10%-100%, 20%-100^{%}, 30%-100%, 40%-100%, 50%-100%, 60%-100%, 70%-100%, 80-100%, 90-100%, 95-100%, 50^{%}-90%, about 5%, 10%, 15%, 20%, 25%, 30%, 35%, 40%, 45%, 50%, 55%, 60%, 65%, 70%, 75%, 80%, 85%, 90%, 95%, or 100%, or at least 5%, 10%, 15%, 20%, 25%, 30%, 35%, 40%, 45%, 50%, 55%, 60%, 65%, 70%, 75%, 80%, 85%, 90%, 95%, or 99%) of chiral internucleotidic linkages. In certain embodiments, oligonucleotides (or nucleic acids) of a plurality share the same pattern of sugar and/or nucleobase modifications, in any. In certain embodiments, oligonucleotides (or nucleic acids) of a plurality are various forms of the same oligonucleotide (e.g., acid and/or various salts of the same oligonucleotide). In certain embodiments, oligonucleotides (or nucleic acids) of a plurality are of the same constitution. In certain embodiments, level of the oligonucleotides (or nucleic acids) of the plurality is about 1%-100%, (e.g., about 5%-100%, 10%-100%, 20%-100%, 30%-100%, 40%-100%, 50%-100%, 60%-100%, 70%-100%, 80-100%, 90-100%, 95-100%, 50%-90%, or about 5%, 10%, 20%, 30%, 40%, 50%, 60%, 70%, 80%, 85%, 90%, 91%, 92%, 93%, 94%, 95%, 96%, 97%, 98%, 99%, or 100%, or at least 5%, 10%, 20%, 30%, 40%, 50%, 60%, 70%, 80%, 85%, 90%, 91%, 92%, 93%, 94%, 95%, 96%, 97%, 98%, or 99%) of all oligonucleotides (or nucleic acids) in a composition that share the same constitution as the oligonucleotides (or nucleic acids) of the plurality. In certain embodiments, each chiral internucleotidic linkage is a chiral controlled internucleotidic linkage, and the composition is a completely chirally controlled oligonucleotide composition. In certain embodiments, oligonucleotides (or nucleic acids) of a plurality are structurally identical. In certain embodiments, a chirally controlled internucleotidic linkage has a diastereopurity of at least 80%, 85%, 90%, 91%, 92%, 93%, 94%, 95%, 96%, 97%, 98%, 99% or 99.5%, typically at least 90%, 91%, 92%, 93%, 94%, 95%, 96%, 97%, 98%, 99% or 99.5%. In certain embodiments, a chirally controlled internucleotidic linkage has a diastereopurity of at least 95%. In certain embodiments, a chirally controlled internucleotidic linkage has a diastereopurity of at least 96%. In certain embodiments, a chirally controlled internucleotidic linkage has a diastereopurity of at least 97%. In certain embodiments, a chirally controlled internucleotidic linkage has a diastereopurity of at least 98%. In certain embodiments, a chirally controlled internucleotidic linkage has a diastereopurity of at least 99%. In certain embodiments, a percentage of a level is or is at least (DS)^{nc}, wherein DS is a diastereopurity as described in the present disclosure (e.g., 90%, 91%, 92%, 93%, 94%, 95%, 96%, 97%, 98%, 99% or 99.5% or more) and nc is the number of chirally controlled internucleotidic linkages as described in the present disclosure (e.g., 1-50, 1-40, 1-30, 1-25, 1-20, 5-50, 5-40, 5-30, 5-25, 5-20, 1, 2, 3, 4, 5, 6, 7, 8, 9, 10, 11, 12, 13, 14, 15, 16, 17, 18, 19, 20, 21, 22, 23, 24, 25 or more). In certain embodiments, a percentage of a level is or is at least (DS)^{nc}, wherein DS is 95%-100%. For example, when DS is 99% and nc is 10, the percentage is or is at least 90% ((99%)¹⁰≈0.90=90%). In certain embodiments, level of a plurality of oligonucleotides in a composition is represented as the product of the diastereopurity of each chirally controlled internucleotidic linkage in the oligonucleotides. In certain embodiments, diastereopurity of an internucleotidic linkage connecting two nucleosides in an oligonucleotide (or nucleic acid) is represented by the diastereopurity of an internucleotidic linkage of a dimer connecting the same two nucleosides, wherein the dimer is prepared using comparable conditions, in some instances, identical synthetic cycle conditions (e.g., for the linkage between Nx and Ny in an oligonucleotide . . . NxNy . . . , the dimer is NxNy). In certain embodiments, not all chiral internucleotidic linkages are chiral controlled internucleotidic linkages, and the composition is a partially chirally controlled oligonucleotide composition. In certain embodiments, a non-chirally controlled internucleotidic linkage has a diastereopurity of less than about 80%, 75%, 70%, 65%, 60%, 55%, or of about 50%, as typically observed in stereorandom oligonucleotide compositions (e.g., as appreciated by those skilled in the art, from traditional oligonucleotide synthesis, e.g., the phosphoramidite method). In certain embodiments, oligonucleotides (or nucleic acids) of a plurality are of the same type. In certain embodiments, a chirally controlled oligonucleotide composition comprises non-random or controlled levels of individual oligonucleotide or nucleic acids types. For instance, in certain embodiments a chirally controlled oligonucleotide composition comprises one and no more than one oligonucleotide type. In certain embodiments, a chirally controlled oligonucleotide composition comprises more than one oligonucleotide type. In certain embodiments, a chirally controlled oligonucleotide composition comprises multiple oligonucleotide types. In certain embodiments, a chirally controlled oligonucleotide composition is a composition of oligonucleotides of an oligonucleotide type, which composition comprises a non-random or controlled level of a plurality of oligonucleotides of the oligonucleotide type.

[0517] Comparable: The term “comparable” is used herein to describe two (or more) sets of conditions or circumstances that are sufficiently similar to one another to permit comparison of results obtained or phenomena observed. In certain embodiments, comparable sets of conditions or circumstances are characterized by a plurality of substantially identical features and one or a small number of varied features. Those of ordinary skill in the art will appreciate that sets of conditions are comparable to one another when characterized by a sufficient number and type of substantially identical features to warrant a reasonable conclusion that differences in results obtained or phenomena observed under the different sets of conditions or circumstances are caused by or indicative of the variation in those features that are varied.

[0518] Cycloaliphatic: The term “cycloaliphatic,” “carbocycle,” “carbocyclyl,” “carbocyclic radical,” and “carbocyclic ring,” are used interchangeably, and as used herein, refer to saturated or partially unsaturated, but non-aromatic, cyclic aliphatic monocyclic, bicyclic, or polycyclic ring systems, as described herein, having, unless otherwise specified, from 3 to 30 ring members. Cycloaliphatic groups include, without limitation, cyclopropyl, cyclobutyl, cyclopentyl, cyclopentenyl, cyclohexyl, cyclohexenyl, cycloheptyl, cycloheptenyl, cyclooctyl, cyclooctenyl, norbomyl, adamantyl, and cyclooctadienyl. In certain embodiments, a cycloaliphatic group has 3-6 carbons. In certain embodiments, a cycloaliphatic group is saturated and is cycloalkyl. The term “cycloaliphatic” may also include aliphatic rings that are fused to one or more aromatic or nonaromatic rings, such as decahydronaphthyl or tetrahydronaphthyl. In certain embodiments, a cycloaliphatic group is bicyclic. In certain embodiments, a cycloaliphatic group is tricyclic. In certain embodiments, a cycloaliphatic group is polycyclic. In certain embodiments, “cycloaliphatic” refers to C₃-C₆ monocyclic hydrocarbon, or C₈-C₁₀ bicyclic or polycyclic hydrocarbon, that is completely saturated or that contains one or more units of unsaturation, but which is not aromatic, that has a single point of attachment to the rest of the molecule, or a C₉-C₁₆ polycyclic hydrocarbon that is completely saturated or that contains one or more units of unsaturation, but which is not aromatic, that has a single point of attachment to the rest of the molecule.

[0519] Heteroaliphatic: The term “heteroaliphatic”, as used herein, is given its ordinary meaning in the art and refers to aliphatic groups as described herein in which one or more carbon atoms are independently replaced with one or more heteroatoms (e.g., oxygen, nitrogen, sulfur, silicon, phosphorus, and the like). In certain embodiments, one or more units selected from C, CH, CH₂, and CH₃ are independently replaced by one or more heteroatoms (including oxidized and/or substituted forms thereof). In certain embodiments, a heteroaliphatic group is heteroalkyl. In certain embodiments, a heteroaliphatic group is heteroalkenyl.

[0520] Heteroalkyl: The term “heteroalkyl”, as used herein, is given its ordinary meaning in the art and refers to alkyl groups as described herein in which one or more carbon atoms are independently replaced with one or more heteroatoms (e.g., oxygen, nitrogen, sulfur, silicon, phosphorus, and the like). Examples of heteroalkyl groups include, but are not limited to, alkoxy, poly(ethylene glycol)-, alkyl-substituted amino, tetrahydrofuranyl, piperidinyl, morpholinyl, etc.

[0521] Heteroaryl: The terms “heteroaryl” and “heteroar-”, as used herein, used alone or as part of a larger moiety, e.g., “heteroaralkyl,” or “heteroaralkoxy,” refer to monocyclic, bicyclic or polycyclic ring systems having a total of five to thirty ring members, wherein at least one ring in the system is aromatic and at least one aromatic ring atom is a heteroatom. In certain embodiments, a heteroaryl group is a group having 5 to 10 ring atoms (i.e., monocyclic, bicyclic or polycyclic), in certain embodiments 5, 6, 9, or 10 ring atoms. In certain embodiments, each monocyclic ring unit is aromatic. In certain embodiments, a heteroaryl group has 6, 10, or 14 π electrons shared in a cyclic array; and having, in addition to carbon atoms, from one to five heteroatoms. Heteroaryl groups include, without limitation, thienyl, furanyl, pyrrolyl, imidazolyl, pyrazolyl, triazolyl, tetrazolyl, oxazolyl, isoxazolyl, oxadiazolyl, thiazolyl, isothiazolyl, thiadiazolyl, pyridyl, pyridazinyl, pyrimidinyl, pyrazinyl, indolizinyl, purinyl, naphthyridinyl, and pteridinyl. In certain embodiments, a heteroaryl is a heterobiaryl group, such as bipyridyl and the like. The terms “heteroaryl” and “heteroar-”, as used herein, also include groups in which a heteroaromatic ring is fused to one or more aryl, cycloaliphatic, or heterocyclyl rings, where the radical or point of attachment is on the heteroaromatic ring. Non-limiting examples include indolyl, isoindolyl, benzothienyl, benzofuranyl, dibenzofuranyl, indazolyl, benzimidazolyl, benzthiazolyl, quinolyl, isoquinolyl, cinnolinyl, phthalazinyl, quinazolinyl, quinoxalinyl, 4H-quinolizinyl, carbazolyl, acridinyl, phenazinyl, phenothiazinyl, phenoxazinyl, tetrahydroquinolinyl, tetrahydroisoquinolinyl, and pyrido[2,3-b]-1,4-oxazin-3(4H)-one. A heteroaryl group may be monocyclic, bicyclic or polycyclic. The term “heteroaryl” may be used interchangeably with the terms “heteroaryl ring,” “heteroaryl group,” or “heteroaromatic,” any of which terms include rings that are optionally substituted. The term “heteroaralkyl” refers to an alkyl group substituted by a heteroaryl group, wherein the alkyl and heteroaryl portions independently are optionally substituted.

[0522] Heteroatom: The term “heteroatom”, as used herein, means an atom that is not carbon or hydrogen. In certain embodiments, a heteroatom is boron, oxygen, sulfur, nitrogen, phosphorus, or silicon (including oxidized forms of nitrogen, sulfur, phosphorus, or silicon; charged forms of nitrogen (e.g., quaternized forms, forms as in iminium groups, etc.), phosphorus, sulfur, oxygen; etc.). In certain embodiments, a heteroatom is silicon, phosphorus, oxygen, sulfur or nitrogen. In certain embodiments, a heteroatom is silicon, oxygen, sulfur or nitrogen. In certain embodiments, a heteroatom is oxygen, sulfur or nitrogen.

[0523] Heterocycle: As used herein, the terms “heterocycle,” “heterocyclyl,” “heterocyclic radical,” and “heterocyclic ring”, as used herein, are used interchangeably and refer to a monocyclic, bicyclic or polycyclic ring moiety (e.g., 3-30 membered) that is saturated or partially unsaturated and has one or more heteroatom ring atoms. In certain embodiments, a heterocyclyl group is a stable 5- to 7-membered monocyclic or 7- to 10-membered bicyclic heterocyclic moiety that is either saturated or partially unsaturated, and having, in addition to carbon atoms, one or more, preferably one to four, heteroatoms, as defined above. When used in reference to a ring atom of a heterocycle, the term “nitrogen” includes substituted nitrogen. As an example, in a saturated or partially unsaturated ring having 0-3 heteroatoms selected from oxygen, sulfur and nitrogen, the nitrogen may be N (as in 3,4-dihydro-2H-pyrrolyl), NH (as in pyrrolidinyl), or ⁺NR (as in N-substituted pyrrolidinyl). A heterocyclic ring can be attached to its pendant group at any heteroatom or carbon atom that results in a stable structure and any of the ring atoms can be optionally substituted. Examples of such saturated or partially unsaturated heterocyclic radicals include, without limitation, tetrahydrofuranyl, tetrahydrothienyl, pyrrolidinyl, piperidinyl, pyrrolinyl, tetrahydroquinolinyl, tetrahydroisoquinolinyl, decahydroquinolinyl, oxazolidinyl, piperazinyl, dioxanyl, dioxolanyl, diazepinyl, oxazepinyl, thiazepinyl, morpholinyl, and quinuclidinyl. The terms “heterocycle,” “heterocyclyl,” “heterocyclyl ring,” “heterocyclic group,” “heterocyclic moiety,” and “heterocyclic radical,” are used interchangeably herein, and also include groups in which a heterocyclyl ring is fused to one or more aryl, heteroaryl, or cycloaliphatic rings, such as indolinyl, 3H-indolyl, chromanyl, phenanthridinyl, or tetrahydroquinolinyl. A heterocyclyl group may be monocyclic, bicyclic or polycyclic. The term “heterocyclylalkyl” refers to an alkyl group substituted by a heterocyclyl, wherein the alkyl and heterocyclyl portions independently are optionally substituted.

[0524] Identity: As used herein, the term “identity” refers to the overall relatedness between polymeric molecules, e.g., between nucleic acid molecules (e.g., oligonucleotides, DNA, RNA, etc.) and/or between polypeptide molecules. In certain embodiments, polymeric molecules are considered to be “substantially identical” to one another if their sequences are at least 25%, 30%, 35%, 40%, 45%, 50%, 55%, 60%, 65%, 70%, 75%, 80%, 85%, 90%, 95%, or 99% identical. Calculation of the percent identity of two nucleic acid or polypeptide sequences, for example, can be performed by aligning the two sequences for optimal comparison purposes (e.g., gaps can be introduced in one or both of a first and a second sequences for optimal alignment and non-identical sequences can be disregarded for comparison purposes). In certain embodiments, the length of a sequence aligned for comparison purposes is at least 30%, at least 40%, at least 50%, at least 60%, at least 70%, at least 80%, at least 90%, at least 95%, or substantially 100% of the length of a reference sequence. The nucleotides at corresponding positions are then compared. When a position in the first sequence is occupied by the same residue (e.g., nucleotide or amino acid) as the corresponding position in the second sequence, then the molecules are identical at that position. The percent identity between the two sequences is a function of the number of identical positions shared by the sequences, taking into account the number of gaps, and the length of each gap, which needs to be introduced for optimal alignment of the two sequences. The comparison of sequences and determination of percent identity between two sequences can be accomplished using a mathematical algorithm. For example, the percent identity between two nucleotide sequences can be determined using the algorithm of Meyers and Miller (CABIOS, 1989, 4: 11-17), which has been incorporated into the ALIGN program (version 2.0). In some exemplary embodiments, nucleic acid sequence comparisons made with the ALIGN program use a PAM120 weight residue table, a gap length penalty of 12 and a gap penalty of 4. The percent identity between two nucleotide sequences can, alternatively, be determined using the GAP program in the GCG software package using an NWSgapdna.CMP matrix.

[0525] Internucleotidic linkage: As used herein, the phrase “internucleotidic linkage” refers generally to a linkage linking nucleoside units of an oligonucleotide or a nucleic acid. In certain embodiments, an internucleotidic linkage is a phosphodiester linkage, as extensively found in naturally occurring DNA and RNA molecules (natural phosphate linkage (—OP(═O)(OH)O—), which as appreciated by those skilled in the art may exist as a salt form). In certain embodiments, an internucleotidic linkage is a modified internucleotidic linkage (not a natural phosphate linkage). In certain embodiments, an internucleotidic linkage is a “modified internucleotidic linkage” wherein at least one oxygen atom or —OH of a phosphodiester linkage is replaced by a different organic or inorganic moiety. In certain embodiments, such an organic or inorganic moiety is selected from ═S, ═Se, ═NR′, —SR′, —SeR′, —N(R′)₂, B(R′)₃, —S—, —Se—, and —N(R′)—, wherein each R′ is independently as defined and described in the present disclosure. In certain embodiments, an internucleotidic linkage is a phosphotriester linkage, phosphorothioate linkage (or phosphorothioate diester linkage, —OP(═O)(SH)O—, which as appreciated by those skilled in the art may exist as a salt form), or phosphorothioate triester linkage. In certain embodiments, a modified internucleotidic linkage is a phosphorothioate linkage. In certain embodiments, a modified internucleotidic linkage is a phosphoryl guanidine linkage. In certain embodiments, an internucleotidic linkage is one of, e.g., PNA (peptide nucleic acid) or PMO (phosphorodiamidate Morpholino oligomer) linkage. In certain embodiments, a modified internucleotidic linkage is a non-negatively charged internucleotidic linkage. In certain embodiments, a modified internucleotidic linkage is a neutral internucleotidic linkage (e.g., n001 in certain provided oligonucleotides). In certain a embodiments, a phosphoryl guanidine linkage is a non-negatively charged linkage or a neutral internucleotidic linkage. It is understood by a person of ordinary skill in the art that an internucleotidic linkage may exist as an anion or cation at a given pH due to the existence of acid or base moieties in the linkage. In certain embodiments, a modified internucleotidic linkages is a modified internucleotidic linkages designated as s, s1, s2, s3, s4, s5, s6, s7, s8, s9, s10, s11, s12, s13, s14, s15, s16, s17 and s18 as described in WO 2017/210647.

[0526] In vitro: As used herein, the term “in vitro” refers to events that occur in an artificial environment, e.g., in a test tube or reaction vessel, in cell culture, etc., rather than within an organism (e.g., animal, plant and/or microbe).

[0527] In vivo: As used herein, the term “in vivo” refers to events that occur within an organism (e.g., animal, plant and/or microbe).

[0528] Linkage phosphorus: as defined herein, the phrase “linkage phosphorus” is used to indicate that the particular phosphorus atom being referred to is the phosphorus atom present in the internucleotidic linkage, which phosphorus atom corresponds to the phosphorus atom of a phosphodiester internucleotidic linkage as occurs in naturally occurring DNA and RNA. In certain embodiments, a linkage phosphorus atom is in a modified internucleotidic linkage, wherein each oxygen atom of a phosphodiester linkage is optionally and independently replaced by an organic or inorganic moiety. In certain embodiments, a linkage phosphorus atom is chiral (e.g., as in phosphorothioate internucleotidic linkages). In certain embodiments, a linkage phosphorus atom is achiral (e.g., as in natural phosphate linkages).

[0529] Modified nucleobase: The terms “modified nucleobase”, “modified base” and the like refer to a chemical moiety which is chemically distinct from a nucleobase, but which is capable of performing at least one function of a nucleobase. In certain embodiments, a modified nucleobase is a nucleobase which comprises a modification. In certain embodiments, a modified nucleobase is capable of at least one function of a nucleobase, e.g., forming a moiety in a polymer capable of base-pairing to a nucleic acid comprising an at least complementary sequence of bases. In certain embodiments, a modified nucleobase is substituted A, T, C, G, or U, or a substituted tautomer of A, T, C, G, or U. In certain embodiments, a modified nucleobase in the context of oligonucleotides refer to a nucleobase that is not A, T, C, G or U.

[0530] Modified nucleoside: The term “modified nucleoside” refers to a moiety derived from or chemically similar to a natural nucleoside, but which comprises a chemical modification which differentiates it from a natural nucleoside. Non-limiting examples of modified nucleosides include those which comprise a modification at the base and/or the sugar. Non-limiting examples of modified nucleosides include those with a 2′ modification at a sugar. Non-limiting examples of modified nucleosides also include abasic nucleosides (which lack a nucleobase). In certain embodiments, a modified nucleoside is capable of at least one function of a nucleoside, e.g., forming a moiety in a polymer capable of base-pairing to a nucleic acid comprising an at least complementary sequence of bases.

[0531] Modified nucleotide: The term “modified nucleotide” includes any chemical moiety which differs structurally from a natural nucleotide but is capable of performing at least one function of a natural nucleotide. In certain embodiments, a modified nucleotide comprises a modification at a sugar, base and/or internucleotidic linkage. In certain embodiments, a modified nucleotide comprises a modified sugar, modified nucleobase and/or modified internucleotidic linkage. In certain embodiments, a modified nucleotide is capable of at least one function of a nucleotide, e.g., forming a subunit in a polymer capable of base-pairing to a nucleic acid comprising an at least complementary sequence of bases.

[0532] Modified sugar: The term “modified sugar” refers to a moiety that can replace a sugar. A modified sugar mimics the spatial arrangement, electronic properties, or some other physicochemical property of a sugar. In certain embodiments, as described in the present disclosure, a modified sugar is substituted ribose or deoxyribose. In certain embodiments, a modified sugar comprises a 2′-modification. Examples of useful 2′-modification are widely utilized in the art and described herein. In certain embodiments, a 2′-modification is 2′-F. In certain embodiments, a 2′-modification is 2′-OR, wherein R is optionally substituted C₁₋₁₀ aliphatic. In certain embodiments, the 2′ modification is a 2′-O—C16 lipid modification. In certain embodiments, a 2′-modification is 2′-OMe. In certain embodiments, a 2′-modification is 2′-MOE. In certain embodiments, a modified sugar comprises a 5′-modification. In certain embodiments, each modified sugar independently comprises a 5′-modification. In certain embodiments, a 5′-modification is 5′-alkyl modification. In certain embodiments, a 5′-alkyl modification is a 5′-methyl modification. In particular embodiments, a 5′-methyl modification is a 5′-(R)-methyl modification. In certain embodiments, a 5′-methyl modification is a 5′-(S)-methyl modification. In certain embodiments, a modified sugar is a bicyclic sugar (e.g., a sugar used in LNA, BNA, etc.). In certain embodiments, in the context of oligonucleotides, a modified sugar is a sugar that is not ribose or deoxyribose as typically found in natural RNA or DNA.

[0533] Nucleic acid: The term “nucleic acid”, as used herein, includes any nucleotides and polymers thereof. The term “polynucleotide”, as used herein, refers to a polymeric form of nucleotides of any length, either ribonucleotides (RNA) or deoxyribonucleotides (DNA) or a combination thereof. These terms refer to the primary structure of the molecules and, thus, include double- and single-stranded DNA, and double- and single-stranded RNA. These terms include, as equivalents, analogs of either RNA or DNA comprising modified nucleotides and/or modified polynucleotides, such as, though not limited to, methylated, protected and/or capped nucleotides or polynucleotides. The terms encompass poly- or oligo-ribonucleotides (RNA) and poly- or oligo-deoxyribonucleotides (DNA); RNA or DNA derived from N-glycosides or C-glycosides of nucleobases and/or modified nucleobases; nucleic acids derived from sugars and/or modified sugars; and nucleic acids derived from phosphate bridges and/or modified internucleotidic linkages. The term encompasses nucleic acids containing any combinations of nucleobases, modified nucleobases, sugars, modified sugars, phosphate bridges or modified internucleotidic linkages. Examples include, and are not limited to, nucleic acids containing ribose moieties, nucleic acids containing deoxy-ribose moieties, nucleic acids containing both ribose and deoxyribose moieties, nucleic acids containing ribose and modified ribose moieties. Unless otherwise specified, the prefix poly-refers to a nucleic acid containing 2 to about 10,000 nucleotide monomer units and wherein the prefix oligo-refers to a nucleic acid containing 2 to about 200 nucleotide monomer units.

[0534] Nucleobase: The term “nucleobase” refers to the parts of nucleic acids that are involved in the hydrogen-bonding that binds one nucleic acid strand to another complementary strand in a sequence specific manner. The most common naturally-occurring nucleobases are adenine (A), guanine (G), uracil (U), cytosine (C), and thymine (T). In certain embodiments, a naturally-occurring nucleobases are modified adenine, guanine, uracil, cytosine, or thymine. In certain embodiments, a naturally-occurring nucleobases are methylated adenine, guanine, uracil, cytosine, or thymine. In certain embodiments, a nucleobase comprises a heteroaryl ring wherein a ring atom is nitrogen, and when in a nucleoside, the nitrogen is bonded to a sugar moiety. In certain embodiments, a nucleobase comprises a heterocyclic ring wherein a ring atom is nitrogen, and when in a nucleoside, the nitrogen is bonded to a sugar moiety. In certain embodiments, a nucleobase is a “modified nucleobase,” a nucleobase other than adenine (A), guanine (G), uracil (U), cytosine (C), and thymine (T). In certain embodiments, a modified nucleobase is substituted A, T, C, G or U. In certain embodiments, a modified nucleobase is a substituted tautomer of A, T, C, G, or U. In certain embodiments, a modified nucleobase is methylated adenine, guanine, uracil, cytosine, or thymine. In certain embodiments, a modified nucleobase mimics the spatial arrangement, electronic properties, or some other physicochemical property of the nucleobase and retains the property of hydrogen-bonding that binds one nucleic acid strand to another in a sequence specific manner. In certain embodiments, a modified nucleobase can pair with all of the five naturally occurring bases (uracil, thymine, adenine, cytosine, or guanine) without substantially affecting the melting behavior, recognition by intracellular enzymes or activity of the oligonucleotide duplex. As used herein, the term “nucleobase” also encompasses structural analogs used in lieu of natural or naturally-occurring nucleotides, such as modified nucleobases and nucleobase analogs. In certain embodiments, a nucleobase is optionally substituted A, T, C, G, or U, or an optionally substituted tautomer of A, T, C, G, or U. In certain embodiments, a “nucleobase” refers to a nucleobase unit in an oligonucleotide or a nucleic acid (e.g., A, T, C, G or U as in an oligonucleotide or a nucleic acid).

[0535] Nucleoside: The term “nucleoside” refers to a moiety wherein a nucleobase or a modified nucleobase is covalently bound to a sugar or a modified sugar. In certain embodiments, a nucleoside is a natural nucleoside, e.g., adenosine, deoxyadenosine, guanosine, deoxyguanosine, thymidine, uridine, cytidine, or deoxycytidine. In certain embodiments, a nucleoside is a modified nucleoside, e.g., a substituted natural nucleoside selected from adenosine, deoxyadenosine, guanosine, deoxyguanosine, thymidine, uridine, cytidine, and deoxycytidine. In certain embodiments, a nucleoside is a modified nucleoside, e.g., a substituted tautomer of a natural nucleoside selected from adenosine, deoxyadenosine, guanosine, deoxyguanosine, thymidine, uridine, cytidine, and deoxycytidine. In certain embodiments, a “nucleoside” refers to a nucleoside unit in an oligonucleotide or a nucleic acid.

[0536] Nucleotide: The term “nucleotide” as used herein refers to a monomeric unit of a polynucleotide that consists of a nucleobase, a sugar, and one or more internucleotidic linkages (e.g., phosphate linkages in natural DNA and RNA). The naturally occurring bases [guanine, (G), adenine, (A), cytosine, (C), thymine, (T), and uracil (U)] are derivatives of purine or pyrimidine, though it should be understood that naturally and non-naturally occurring base analogs are also included. The naturally occurring sugar is the pentose (five-carbon sugar) deoxyribose (which forms DNA) or ribose (which forms RNA), though it should be understood that naturally and non-naturally occurring sugar analogs are also included. Nucleotides are linked via internucleotidic linkages to form nucleic acids, or polynucleotides. Many internucleotidic linkages are known in the art (such as, though not limited to, phosphate, phosphorothioates, boranophosphates and the like). Artificial nucleic acids include PNAs (peptide nucleic acids), phosphotriesters, phosphorothionates, H-phosphonates, phosphoramidates, boranophosphates, methylphosphonates, phosphonoacetates, thiophosphonoacetates and other variants of the phosphate backbone of native nucleic acids, such as those described herein. In certain embodiments, a natural nucleotide comprises a naturally occurring base, sugar and internucleotidic linkage. As used herein, the term “nucleotide” also encompasses structural analogs used in lieu of natural or naturally-occurring nucleotides, such as modified nucleotides and nucleotide analogs. In certain embodiments, a “nucleotide” refers to a nucleotide unit in an oligonucleotide or a nucleic acid.

[0537] Oligonucleotide: The term “oligonucleotide” refers to a polymer or oligomer of nucleotides, and may contain any combination of natural and non-natural nucleobases, sugars, and internucleotidic linkages.

[0538] Oligonucleotides can be single-stranded or double-stranded. A single-stranded oligonucleotide can have double-stranded regions (formed by two portions of the single-stranded oligonucleotide) and a double-stranded oligonucleotide, which comprises two oligonucleotide chains, can have single-stranded regions for example, at regions where the two oligonucleotide chains are not complementary to each other. Example oligonucleotides include, but are not limited to structural genes, genes including control and termination regions, self-replicating systems such as viral or plasmid DNA, single-stranded and double-stranded RNAi agents and other RNA interference reagents (RNAi agents or iRNA agents), shRNA, antisense oligonucleotides, ribozymes, microRNAs, microRNA mimics, supermirs, aptamers, antimirs, antagomirs, Ul adaptors, triplex-forming oligonucleotides, G-quadruplex oligonucleotides, RNA activators, immuno-stimulatory oligonucleotides, and decoy oligonucleotides.

[0539] Oligonucleotides of the present disclosure can be of various lengths. In particular embodiments, oligonucleotides can range from about 2 to about 200 nucleosides in length. In various related embodiments, oligonucleotides, single-stranded, double-stranded, or triple-stranded, can range in length from about 4 to about 10 nucleosides, from about 10 to about 50 nucleosides, from about 20 to about 50 nucleosides, from about 15 to about 30 nucleosides, from about 20 to about 30 nucleosides in length. In certain embodiments, the oligonucleotide is from about 9 to about 39 nucleosides in length. In certain embodiments, the oligonucleotide is at least 4, 5, 6, 7, 8, 9, 10, 11, 12, 13, 14, 15, 16, 17, 18, 19, 20, 21, 22, 23, 24, or 25 nucleosides in length. In certain embodiments, the oligonucleotide is at least 4 nucleosides in length. In certain embodiments, the oligonucleotide is at least 5 nucleosides in length. In certain embodiments, the oligonucleotide is at least 6 nucleosides in length. In certain embodiments, the oligonucleotide is at least 7 nucleosides in length. In certain embodiments, the oligonucleotide is at least 8 nucleosides in length. In certain embodiments, the oligonucleotide is at least 9 nucleosides in length. In certain embodiments, the oligonucleotide is at least 10 nucleosides in length. In certain embodiments, the oligonucleotide is at least 11 nucleosides in length. In certain embodiments, the oligonucleotide is at least 12 nucleosides in length. In certain embodiments, the oligonucleotide is at least 15 nucleosides in length. In certain embodiments, the oligonucleotide is at least 15 nucleosides in length. In certain embodiments, the oligonucleotide is at least 16 nucleosides in length. In certain embodiments, the oligonucleotide is at least 17 nucleosides in length. In certain embodiments, the oligonucleotide is at least 18 nucleosides in length. In certain embodiments, the oligonucleotide is at least 19 nucleosides in length. In certain embodiments, the oligonucleotide is at least 20 nucleosides in length. In certain embodiments, the oligonucleotide is at least 25 nucleosides in length. In certain embodiments, the oligonucleotide is at least 30 nucleosides in length. In certain embodiments, each nucleoside counted in an oligonucleotide length independently comprises a nucleobase comprising a ring having at least one nitrogen ring atom. In certain embodiments, each nucleoside counted in an oligonucleotide length independently comprises A, T, C, G, or U, or optionally substituted A, T, C, G, or U, or an optionally substituted tautomer of A, T, C, G or U.

[0540] Oligonucleotide type: As used herein, the phrase “oligonucleotide type” is used to define an oligonucleotide that has a particular base sequence, pattern of backbone linkages (i.e., pattern of internucleotidic linkage types, for example, phosphate, phosphorothioate, phosphorothioate triester, etc.), pattern of backbone chiral centers (i.e., pattern of linkage phosphorus stereochemistry (Rp/Sp)), and pattern of backbone phosphorus modifications. In certain embodiments, oligonucleotides of a common designated “type” are structurally identical to one another.

[0541] One of skill in the art will appreciate that synthetic methods of the present disclosure provide for a degree of control during the synthesis of an oligonucleotide strand such that each nucleotide unit of the oligonucleotide strand can be designed and/or selected in advance to have a particular stereochemistry at the linkage phosphorus and/or a particular modification at the linkage phosphorus, and/or a particular base, and/or a particular sugar. In certain embodiments, an oligonucleotide strand is designed and/or selected in advance to have a particular combination of stereocenters at the linkage phosphorus. In certain embodiments, an oligonucleotide strand is designed and/or determined to have a particular combination of modifications at the linkage phosphorus. In certain embodiments, an oligonucleotide strand is designed and/or selected to have a particular combination of bases. In certain embodiments, an oligonucleotide strand is designed and/or selected to have a particular combination of one or more of the above structural characteristics. In certain embodiments, the present disclosure provides compositions comprising or consisting of a plurality of oligonucleotide molecules (e.g., chirally controlled oligonucleotide compositions). In certain embodiments, all such molecules are of the same type (i.e., are structurally identical to one another). In certain embodiments, however, provided compositions comprise a plurality of oligonucleotides of different types, typically in pre-determined relative amounts.

[0542] Optionally Substituted: As described herein, compounds, e.g., oligonucleotides, of the disclosure may contain optionally substituted and/or substituted moieties. In general, the term “substituted,” whether preceded by the term “optionally” or not, means that one or more hydrogens of the designated moiety are replaced with a suitable substituent. Unless otherwise indicated, an “optionally substituted” group may have a suitable substituent at each substitutable position of the group, and when more than one position in any given structure may be substituted with more than one substituent selected from a specified group, the substituent may be either the same or different at every position. In certain embodiments, an optionally substituted group is unsubstituted. Combinations of substituents envisioned by this disclosure are preferably those that result in the formation of stable or chemically feasible compounds. The term “stable,” as used herein, refers to compounds that are not substantially altered when subjected to conditions to allow for their production, detection, and, in certain embodiments, their recovery, purification, and use for one or more of the purposes disclosed herein. Certain substituents are described below.

[0543] Suitable monovalent substituents on a substitutable atom, e.g., a suitable carbon atom, are independently halogen; —(CH₂)₀₋₄R^{∘}; —(CH₂)₀₋₄OR^{∘}; —O(CH₂)₀₋₄R^{∘}, —O—(CH₂)₀₋₄C(O)OR^{∘}; —(CH₂)₀₋₄CH(OR^{∘})₂; —(CH₂)₀₋₄Ph, which may be substituted with R^{∘}; —(CH₂)₀₋₄O(CH₂)₀₋₁Ph which may be substituted with R^{∘}; —CH═CHPh, which may be substituted with R^{∘}; —(CH₂)₀₋₄O(CH₂)₀₋₁-pyridyl which may be substituted with R^{∘}; —NO₂; —CN; —N₃; —(CH₂)₀₋₄N(R^{∘})₂; —(CH₂)₀₋₄N(R^{∘})C(O)R^{∘}; —N(R^{∘})C(S)R^{∘}; —(CH₂)₀₋₄N(R^{∘})C(O)NR^{∘}₂; —N(R^{∘})C(S)NR^{∘}₂; —(CH₂)₀₋₄N(R^{∘})C(O)OR^{∘}; —N(R^{∘})N(R^{∘})C(O)R^{∘}; —N(R^{∘})N(R^{∘})C(O)NR^{∘}₂; —N(R^{∘})N(R^{∘})C(O)OR^{∘}; —(CH₂)₀₋₄C(O)R^{∘}; —C(S)R^{∘}; —(CH₂)₀₋₄C(O)OR^{∘}; —(CH₂)₀₋₄C(O)SR^{∘}; —(CH₂)₀₋₄C(O)OSiR^{∘}₃; —(CH₂)₀₋₄OC(O)R^{∘}; —OC(O)(CH₂)₀₋₄SR^{∘}, —SC(S)SR^{∘}; —(CH₂)₀₋₄SC(O)R^{∘}; —(CH₂)₀₋₄C(O)NR^{∘}₂; —C(S)NR^{∘}₂; —C(S)SR^{∘}; —(CH₂)₀₋₄OC(O)NR^{∘}₂; —C(O)N(OR^{∘})R^{∘}; —C(O)C(O)R^{∘}; —C(O)CH₂C(O)R^{∘}; —C(NOR^{∘})R^{∘}; —(CH₂)₀₋₄SSR^{∘}; —(CH₂)₀₋₄S(O)₂R^{∘}; —(CH₂)₀₋₄S(O)₂OR^{∘}; —(CH₂)₀₋₄OS(O)₂R^{∘}; —S(O)₂NR^{∘}₂; —(CH₂)₀₋₄S(O)R^{∘}; —N(R^{∘})S(O)₂NR^{∘}₂; —N(R^{∘})S(O)₂R^{∘}; —N(OR^{∘})R^{∘}; —C(NH)NR^{∘}₂; —Si(R^{∘})₃; —OSi(R^{∘})₃; —B(R^{∘})₂; —OB(R^{∘})₂; —OB(OR^{∘})₂; —P(R^{∘})₂; —P(OR^{∘})₂; —P(R^{∘})(OR^{∘}); —OP(R^{∘})₂; —OP(OR^{∘})₂; —OP(R^{∘})(OR^{∘}); —P(O)(R^{∘})₂; —P(O)(OR^{∘})₂; —OP(O)(R^{∘})₂; —OP(O)(OR^{∘})₂; —OP(O)(OR^{∘})(SR^{∘}); —SP(O)(R^{∘})₂; —SP(O)(OR^{∘})₂; —N(R^{∘})P(O)(R^{∘})₂; —N(R^{∘})P(O)(OR^{∘})₂; —P(R^{∘})₂[B(R^{∘})₃]; —P(OR^{∘})₂[B(R^{∘})₃]; —OP(R^{∘})₂[B(R^{∘})₃]; —OP(OR^{∘})₂[B(R^{∘})₃]; —(C₁₋₄ straight or branched alkylene)O—N(R^{∘})₂; or —(C₁₋₄ straight or branched alkylene)C(O)O—N(R^{∘})₂, wherein each R^{∘} may be substituted as defined herein and is independently hydrogen, C₁₋₂₀ aliphatic, C₁₋₂₀ heteroaliphatic having 1-5 heteroatoms independently selected from nitrogen, oxygen, sulfur, silicon and phosphorus, —CH₂—(C₆₋₁₄ aryl), —O(CH₂)₀₋₁(C₆₋₁₄ aryl), —CH₂-(5-14 membered heteroaryl ring), a 5-20 membered, monocyclic, bicyclic, or polycyclic, saturated, partially unsaturated or aryl ring having 0-5 heteroatoms independently selected from nitrogen, oxygen, sulfur, silicon and phosphorus, or, notwithstanding the definition above, two independent occurrences of R^{∘}, taken together with their intervening atom(s), form a 5-20 membered, monocyclic, bicyclic, or polycyclic, saturated, partially unsaturated or aryl ring having 0-5 heteroatoms independently selected from nitrogen, oxygen, sulfur, silicon and phosphorus, which may be substituted as defined below.

[0544] Suitable monovalent substituents on R^{∘} (or the ring formed by taking two independent occurrences of R^{∘} together with their intervening atoms), are independently halogen, —(CH₂)₀₋₂R^{●}, -(haloR^{●}), —(CH₂)₀₋₂OH, —(CH₂)₀₋₂OR^{●}, —(CH₂)₀₋₂CH(OR^{●})₂; —O(haloR^{●}), —CN, —N₃, —(CH₂)₀₋₂C(O)R^{●}, —(CH₂)₀₋₂C(O)OH, —(CH₂)₀₋₂C(O)OR^{●}, —(CH₂)₀₋₂SR^{●}, —(CH₂)₀₋₂SH, —(CH₂)₀₋₂NH₂, —(CH₂)₀₋₂NHR^{●}, —(CH₂)₀₋₂NR^{●}₂, —NO₂, —SiR^{●}₃, —OSiR^{●}₃, —C(O)SR^{●}, —(C₁₋₄ straight or branched alkylene)C(O)OR^{●}, or —SSR^{●} wherein each R^{●} is unsubstituted or where preceded by “halo” is substituted only with one or more halogens, and is independently selected from C₁₋₄ aliphatic, —CH₂Ph, —O(CH₂)o-1Ph, and a 5-6-membered saturated, partially unsaturated, or aryl ring having 0-4 heteroatoms independently selected from nitrogen, oxygen, and sulfur. Suitable divalent substituents on a saturated carbon atom of R^{∘} include ═O and ═S.

[0545] Suitable divalent substituents, e.g., on a suitable carbon atom, are independently the following: ═O, ═S, ═NNR*₂, ═NNHC(O)R*, ═NNHC(O)OR*, =NNHS(O)₂R*, ═NR*, =NOR*, —O(C(R*₂))₂₋₃O—, or —S(C(R*₂))₂₋₃S—, wherein each independent occurrence of R* is selected from hydrogen, C₁₋₆ aliphatic which may be substituted as defined below, and an unsubstituted 5-6-membered saturated, partially unsaturated, or aryl ring having 0-4 heteroatoms independently selected from nitrogen, oxygen, and sulfur. Suitable divalent substituents that are bound to vicinal substitutable carbons of an “optionally substituted” group include: —O(CR*₂)₂₋₃O—, wherein each independent occurrence of R* is selected from hydrogen, C₁₋₆ aliphatic which may be substituted as defined below, and an unsubstituted 5-6-membered saturated, partially unsaturated, and aryl ring having 0-4 heteroatoms independently selected from nitrogen, oxygen, and sulfur.

[0546] Suitable substituents on the aliphatic group of R* are independently halogen, —R^{●}, -(haloR^{●}), —OH, —OR^{●}, —O(haloR^{●}), —CN, —C(O)OH, —C(O)OR^{●}, —NH₂, —NHR^{●}, —NR^{●}₂, or —NO₂, wherein each R^{●} is unsubstituted or where preceded by “halo” is substituted only with one or more halogens, and is independently C₁₋₄ aliphatic, —CH₂Ph, —O(CH₂)₀₋₁Ph, or a 5-6-membered saturated, partially unsaturated, or aryl ring having 0-4 heteroatoms independently selected from nitrogen, oxygen, and sulfur.

[0547] In certain embodiments, suitable substituents on a substitutable nitrogen are independently —R^{†}, —NR^{†}₂, —C(O)R^{†}, —C(O)OR^{†}, —C(O)C(O)R^{†}, —C(O)CH₂C(O)R^{†}, —S(O)₂R^{†}, —S(O)₂NR^{†}₂, —C(S)NR^{†}₂, —C(NH)NR^{†}₂, or —N(R^{†})S(O)₂R^{†}; wherein each R^{†} is independently hydrogen, C₁₋₆ aliphatic which may be substituted as defined below, unsubstituted —OPh, or an unsubstituted 5-6-membered saturated, partially unsaturated, or aryl ring having 0-4 heteroatoms independently selected from nitrogen, oxygen, and sulfur, or, notwithstanding the definition above, two independent occurrences of Rt, taken together with their intervening atom(s) form an unsubstituted 3-12-membered saturated, partially unsaturated, or aryl mono- or bicyclic ring having 0-4 heteroatoms independently selected from nitrogen, oxygen, and sulfur.

[0548] Suitable substituents on the aliphatic group of R^{†} are independently halogen, —R^{●}, -(haloR^{●}), —OH, —OR^{●}, —O(haloR^{●}), —CN, —C(O)OH, —C(O)OR^{●}, —NH₂, —NHR^{●}, —NR^{●}₂, or —NO₂, wherein each R^{●} is unsubstituted or where preceded by “halo” is substituted only with one or more halogens, and is independently C₁₋₄ aliphatic, —CH₂Ph, —O(CH₂)₀₋₁Ph, or a 5-6-membered saturated, partially unsaturated, or aryl ring having 0-4 heteroatoms independently selected from nitrogen, oxygen, and sulfur.

[0549] P-modification: as used herein, the term “P-modification” refers to any modification at the linkage phosphorus other than a stereochemical modification. In certain embodiments, a P-modification comprises addition, substitution, or removal of a pendant moiety covalently attached to a linkage phosphorus.

[0550] Partially unsaturated: As used herein, the term “partially unsaturated” refers to a ring moiety that includes at least one double or triple bond. The term “partially unsaturated” is intended to encompass rings having multiple sites of unsaturation, but is not intended to include aryl or heteroaryl moieties, as herein defined.

[0551] Pharmaceutical composition: As used herein, the term “pharmaceutical composition” refers to an active agent, formulated together with one or more pharmaceutically acceptable carriers. In certain embodiments, an active agent is present in unit dose amount appropriate for administration in a therapeutic regimen that shows a statistically significant probability of achieving a predetermined therapeutic effect when administered to a relevant population. In certain embodiments, pharmaceutical compositions may be specially formulated for administration in solid or liquid form, including those adapted for the following: oral administration, for example, drenches (aqueous or non-aqueous solutions or suspensions), tablets, e.g., those targeted for buccal, sublingual, and systemic absorption, boluses, powders, granules, pastes for application to the tongue; parenteral administration, for example, by subcutaneous, intramuscular, intravenous or epidural injection as, for example, a sterile solution or suspension, or sustained-release formulation; topical application, for example, as a cream, ointment, or a controlled-release patch or spray applied to the skin, lungs, or oral cavity; intravaginally or intrarectally, for example, as a pessary, cream, or foam; sublingually; ocularly; transdermally; or nasally, pulmonary, and to other mucosal surfaces.

[0552] Pharmaceutically acceptable: As used herein, the phrase “pharmaceutically acceptable” refers to those compounds, materials, compositions and/or dosage forms which are, within the scope of sound medical judgment, suitable for use in contact with the tissues of human beings and animals without excessive toxicity, irritation, allergic response, or other problem or complication, commensurate with a reasonable benefit/risk ratio.

[0553] Pharmaceutically acceptable carrier: As used herein, the term “pharmaceutically acceptable carrier” means a pharmaceutically-acceptable material, composition or vehicle, such as a liquid or solid filler, diluent, excipient, or solvent encapsulating material, involved in carrying or transporting the subject compound from one organ, or portion of the body, to another organ, or portion of the body. Each carrier must be “acceptable” in the sense of being compatible with the other ingredients of the formulation and not injurious to the patient. Some examples of materials which can serve as pharmaceutically-acceptable carriers include: sugars, such as lactose, glucose and sucrose; starches, such as corn starch and potato starch; cellulose, and its derivatives, such as sodium carboxymethyl cellulose, ethyl cellulose and cellulose acetate; powdered tragacanth; malt; gelatin; talc; excipients, such as cocoa butter and suppository waxes; oils, such as peanut oil, cottonseed oil, safflower oil, sesame oil, olive oil, corn oil and soybean oil; glycols, such as propylene glycol; polyols, such as glycerin, sorbitol, mannitol and polyethylene glycol; esters, such as ethyl oleate and ethyl laurate; agar; buffering agents, such as magnesium hydroxide and aluminum hydroxide; alginic acid; pyrogen-free water; isotonic saline; Ringer's solution; ethyl alcohol; pH buffered solutions; polyesters, polycarbonates and/or polyanhydrides; and other non-toxic compatible substances employed in pharmaceutical formulations.

[0554] Pharmaceutically acceptable salt: The term “pharmaceutically acceptable salt”, as used herein, refers to salts of such compounds that are appropriate for use in pharmaceutical contexts, i.e., salts which are, within the scope of sound medical judgment, suitable for use in contact with the tissues of humans and lower animals without undue toxicity, irritation, allergic response and the like, and are commensurate with a reasonable benefit/risk ratio. Pharmaceutically acceptable salts are well known in the art. For example, S. M. Berge, et al. describes pharmaceutically acceptable salts in detail in J. Pharmaceutical Sciences, 66: 1-19 (1977). In certain embodiments, pharmaceutically acceptable salt include, but are not limited to, nontoxic acid addition salts, which are salts of an amino group formed with inorganic acids such as hydrochloric acid, hydrobromic acid, phosphoric acid, sulfuric acid and perchloric acid or with organic acids such as acetic acid, maleic acid, tartaric acid, citric acid, succinic acid or malonic acid or by using other methods used in the art such as ion exchange. In certain embodiments, pharmaceutically acceptable salts include, but are not limited to, adipate, alginate, ascorbate, aspartate, benzenesulfonate, benzoate, bisulfate, borate, butyrate, camphorate, camphorsulfonate, citrate, cyclopentanepropionate, digluconate, dodecylsulfate, ethanesulfonate, formate, fumarate, glucoheptonate, glycerophosphate, gluconate, hemisulfate, heptanoate, hexanoate, hydroiodide, 2-hydroxy-ethanesulfonate, lactobionate, lactate, laurate, lauryl sulfate, malate, maleate, malonate, methanesulfonate, 2-naphthalenesulfonate, nicotinate, nitrate, oleate, oxalate, palmitate, pamoate, pectinate, persulfate, 3-phenylpropionate, phosphate, picrate, pivalate, propionate, stearate, succinate, sulfate, tartrate, thiocyanate, p-toluenesulfonate, undecanoate, valerate salts, and the like. In certain embodiments, a provided compound comprises one or more acidic groups, e.g., an oligonucleotide, and a pharmaceutically acceptable salt is an alkali, alkaline earth metal, or ammonium (e.g., an ammonium salt of N(R)₃, wherein each R is independently defined and described in the present disclosure) salt. Representative alkali or alkaline earth metal salts include sodium, lithium, potassium, calcium, magnesium, and the like. In certain embodiments, a pharmaceutically acceptable salt is a sodium salt. In certain embodiments, a pharmaceutically acceptable salt is a potassium salt. In certain embodiments, a pharmaceutically acceptable salt is a calcium salt. In certain embodiments, pharmaceutically acceptable salts include, when appropriate, nontoxic ammonium, quatemary ammonium, and amine cations formed using counterions such as halide, hydroxide, carboxylate, sulfate, phosphate, nitrate, alkyl having from 1 to 6 carbon atoms, sulfonate and aryl sulfonate. In certain embodiments, a provided compound comprises more than one acid groups, for example, an oligonucleotide may comprise two or more acidic groups (e.g., in natural phosphate linkages and/or modified internucleotidic linkages). In certain embodiments, a pharmaceutically acceptable salt, or generally a salt, of such a compound comprises two or more cations, which can be the same or different. In certain embodiments, in a pharmaceutically acceptable salt (or generally, a salt), all ionizable hydrogen (e.g., in an aqueous solution with a pKa no more than about 11, 10, 9, 8, 7, 6, 5, 4, 3, or 2; in certain embodiments, no more than about 7; in certain embodiments, no more than about 6; in certain embodiments, no more than about 5; in certain embodiments, no more than about 4; in certain embodiments, no more than about 3) in the acidic groups are replaced with cations. In certain embodiments, each phosphorothioate and phosphate group independently exists in its salt form (e.g., if sodium salt, —O—P(O)(SNa)—O— and —O—P(O)(ONa)—O—, respectively). In certain embodiments, each phosphorothioate and phosphate internucleotidic linkage independently exists in its salt form (e.g., if sodium salt, —O—P(O)(SNa)—O— and —O—P(O)(ONa)—O—, respectively). In certain embodiments, a pharmaceutically acceptable salt is a sodium salt of an oligonucleotide. In certain embodiments, a pharmaceutically acceptable salt is a sodium salt of an oligonucleotide, wherein each acidic phosphate and modified phosphate group (e.g., phosphorothioate, phosphate, etc.), if any, exists as a salt form (all sodium salt).

[0555] Predetermined: By predetermined (or pre-determined) is meant deliberately selected or non-random or controlled, for example as opposed to randomly occurring, random, or achieved without control. Those of ordinary skill in the art, reading the present specification, will appreciate that the present disclosure provides technologies that permit selection of particular chemistry and/or stereochemistry features to be incorporated into oligonucleotide compositions, and further permits controlled preparation of oligonucleotide compositions having such chemistry and/or stereochemistry features. Such provided compositions are “predetermined” as described herein. Compositions that may contain certain oligonucleotides because they happen to have been generated through a process that are not controlled to intentionally generate the particular chemistry and/or stereochemistry features are not “predetermined” compositions. In certain embodiments, a predetermined composition is one that can be intentionally reproduced (e.g., through repetition of a controlled process). In certain embodiments, a predetermined level of a plurality of oligonucleotides in a composition means that the absolute amount, and/or the relative amount (ratio, percentage, etc.) of the plurality of oligonucleotides in the composition is controlled. In certain embodiments, a predetermined level of a plurality of oligonucleotides in a composition is achieved through chirally controlled oligonucleotide preparation.

[0556] Protecting group: The term “protecting group,” as used herein, is well known in the art and includes those described in detail in Protecting Groups in Organic Synthesis, T. W. Greene and P. G. M. Wuts, 3^{rd} edition, John Wiley & Sons, 1999, the entirety of which is incorporated herein by reference. Also included are those protecting groups specially adapted for nucleoside and nucleotide chemistry described in Current Protocols in Nucleic Acid Chemistry, edited by Serge L. Beaucage et al. June 2012, the entirety of Chapter 2 is incorporated herein by reference. Suitable amino-protecting groups include methyl carbamate, ethyl carbamante, 9-fluorenylmethyl carbamate (Fmoc), 9-(2-sulfo)fluorenylmethyl carbamate, 9-(2,7-dibromo)fluoroenylmethyl carbamate, 2,7-di-t-butyl-[9-(10,10-dioxo-10,10,10,10-tetrahydrothioxanthyl)]methyl carbamate (DBD-Tmoc), 4-methoxyphenacyl carbamate (Phenoc), 2,2,2-trichloroethyl carbamate (Troc), 2-trimethylsilylethyl carbamate (Teoc), 2-phenylethyl carbamate (hZ), 1-(1-adamantyl)-1-methylethyl carbamate (Adpoc), 1,1-dimethyl-2-haloethyl carbamate, 1,1-dimethyl-2,2-dibromoethyl carbamate (DB-t-BOC), 1,1-dimethyl-2,2,2-trichloroethyl carbamate (TCBOC), 1-methyl-1-(4-biphenylyl)ethyl carbamate (Bpoc), 1-(3,5-di-t-butylphenyl)-1-methylethyl carbamate (t-Bumeoc), 2-(2′- and 4′-pyridyl)ethyl carbamate (Pyoc), 2-(N,N-dicyclohexylcarboxamido)ethyl carbamate, t-butyl carbamate (BOC), 1-adamantyl carbamate (Adoc), vinyl carbamate (Voc), allyl carbamate (Alloc), 1-isopropylallyl carbamate (Ipaoc), cinnamyl carbamate (Coc), 4-nitrocinnamyl carbamate (Noc), 8-quinolyl carbamate, N-hydroxypiperidinyl carbamate, alkyldithio carbamate, benzyl carbamate (Cbz), p-methoxybenzyl carbamate (Moz), p-nitobenzyl carbamate, p-bromobenzyl carbamate, p-chlorobenzyl carbamate, 2,4-dichlorobenzyl carbamate, 4-methylsulfinylbenzyl carbamate (Msz), 9-anthrylmethyl carbamate, diphenylmethyl carbamate, 2-methylthioethyl carbamate, 2-methylsulfonylethyl carbamate, 2-(p-toluenesulfonyl)ethyl carbamate, [2-(1,3-dithianyl)]methyl carbamate (Dmoc), 4-methylthiophenyl carbamate (Mtpc), 2,4-dimethylthiophenyl carbamate (Bmpc), 2-phosphonioethyl carbamate (Peoc), 2-triphenylphosphonioisopropyl carbamate (Ppoc), 1,1-dimethyl-2-cyanoethyl carbamate, m-chloro-p-acyloxybenzyl carbamate, p-(dihydroxyboryl)benzyl carbamate, 5-benzisoxazolylmethyl carbamate, 2-(trifluoromethyl)-6-chromonylmethyl carbamate (Tcroc), m-nitrophenyl carbamate, 3,5-dimethoxybenzyl carbamate, o-nitrobenzyl carbamate, 3,4-dimethoxy-6-nitrobenzyl carbamate, phenyl(o-nitrophenyl)methyl carbamate, phenothiazinyl-(10)-carbonyl derivative, N′-p-toluenesulfonylaminocarbonyl derivative, N′-phenylaminothiocarbonyl derivative, t-amyl carbamate, S-benzyl thiocarbamate, p-cyanobenzyl carbamate, cyclobutyl carbamate, cyclohexyl carbamate, cyclopentyl carbamate, cyclopropylmethyl carbamate, p-decyloxybenzyl carbamate, 2,2-dimethoxycarbonylvinyl carbamate, o-(N,N-dimethylcarboxamido)benzyl carbamate, 1,1-dimethyl-3-(N,N-dimethylcarboxamido)propyl carbamate, 1,1-dimethylpropynyl carbamate, di(2-pyridyl)methyl carbamate, 2-furanylmethyl carbamate, 2-iodoethyl carbamate, isoborynl carbamate, isobutyl carbamate, isonicotinyl carbamate, p-(p′-methoxyphenylazo)benzyl carbamate, 1-methylcyclobutyl carbamate, 1-methylcyclohexyl carbamate, 1-methyl-1-cyclopropylmethyl carbamate, 1-methyl-1-(3,5-dimethoxyphenyl)ethyl carbamate, 1-methyl-1-(p-phenylazophenyl)ethyl carbamate, 1-methyl-1-phenylethyl carbamate, 1-methyl-1-(4-pyridyl)ethyl carbamate, phenyl carbamate, p-(phenylazo)benzyl carbamate, 2,4,6-tri-t-butylphenyl carbamate, 4-(trimethylammonium)benzyl carbamate, 2,4,6-trimethylbenzyl carbamate, formamide, acetamide, chloroacetamide, trichloroacetamide, trifluoroacetamide, phenylacetamide, 3-phenylpropanamide, picolinamide, 3-pyridylcarboxamide, N-benzoylphenylalanyl derivative, benzamide, p-phenylbenzamide, o-nitophenylacetamide, o-nitrophenoxyacetamide, acetoacetamide, (N′-dithiobenzyloxycarbonylamino)acetamide, 3-(p-hydroxyphenyl)propanamide, 3-(o-nitrophenyl)propanamide, 2-methyl-2-(o-nitrophenoxy)propanamide, 2-methyl-2-(o-phenylazophenoxy)propanamide, 4-chlorobutanamide, 3-methyl-3-nitrobutanamide, o-nitrocinnamide, N-acetylmethionine derivative, o-nitrobenzamide, o-(benzoyloxymethyl)benzamide, 4,5-diphenyl-3-oxazolin-2-one, N-phthalimide, N-dithiasuccinimide (Dts), N-2,3-diphenylmaleimide, N-2,5-dimethylpyrrole, N-1,1,4,4-tetramethyldisilylazacyclopentane adduct (STABASE), 5-substituted 1,3-dimethyl-1,3,5-triazacyclohexan-2-one, 5-substituted 1,3-dibenzyl-1,3,5-triazacyclohexan-2-one, 1-substituted 3,5-dinitro-4-pyridone, N-methylamine, N-allylamine, N-[2-(trimethylsilyl)ethoxy]methylamine (SEM), N-3-acetoxypropylamine, N-(1-isopropyl-4-nitro-2-oxo-3-pyroolin-3-yl)amine, quaternary ammonium salts, N-benzylamine, N-di(4-methoxyphenyl)methylamine, N-5-dibenzosuberylamine, N-triphenylmethylamine (Tr), N-[(4-methoxyphenyl)diphenylmethyl]amine (MMTr), N-9-phenylfluorenylamine (PhF), N-2,7-dichloro-9-fluorenylmethyleneamine, N-ferrocenylmethylamino (Fcm), N-2-picolylamino N′-oxide, N-1,1-dimethylthiomethyleneamine, N-benzylideneamine, N-p-methoxybenzylideneamine, N-diphenylmethyleneamine, N-[(2-pyridyl)mesityl]methyleneamine, N—(N′,N′-dimethylaminomethylene)amine, N,N′-isopropylidenediamine, N-p-nitrobenzylideneamine, N-salicylideneamine, N-5-chlorosalicylideneamine, N-(5-chloro-2-hydroxyphenyl)phenylmethyleneamine, N-cyclohexylideneamine, N-(5,5-dimethyl-3-oxo-1-cyclohexenyl)amine, N-borane derivative, N-diphenylborinic acid derivative, N-[phenyl(pentacarbonylchromium- or tungsten)carbonyl]amine, N-copper chelate, N-zinc chelate, N-nitroamine, N-nitrosoamine, amine N-oxide, diphenylphosphinamide (Dpp), dimethylthiophosphinamide (Mpt), diphenylthiophosphinamide (Ppt), dialkyl phosphoramidates, dibenzyl phosphoramidate, diphenyl phosphoramidate, benzenesulfenamide, o-nitrobenzenesulfenamide (Nps), 2,4-dinitrobenzenesulfenamide, pentachlorobenzenesulfenamide, 2-nitro-4-methoxybenzenesulfenamide, triphenylmethylsulfenamide, 3-nitropyridinesulfenamide (Npys), p-toluenesulfonamide (Ts), benzenesulfonamide, 2,3,6,-trimethyl-4-methoxybenzenesulfonamide (Mtr), 2,4,6-trimethoxybenzenesulfonamide (Mtb), 2,6-dimethyl-4-methoxybenzenesulfonamide (Pme), 2,3,5,6-tetramethyl-4-methoxybenzenesulfonamide (Mte), 4-methoxybenzenesulfonamide (Mbs), 2,4,6-trimethylbenzenesulfonamide (Mts), 2,6-dimethoxy-4-methylbenzenesulfonamide (iMds), 2,2,5,7,8-pentamethylchroman-6-sulfonamide (Pmc), methanesulfonamide (Ms), β-trimethylsilylethanesulfonamide (SES), 9-anthracenesulfonamide, 4-(4′,8′-dimethoxynaphthylmethyl)benzenesulfonamide (DNMBS), benzylsulfonamide, trifluoromethylsulfonamide, and phenacylsulfonamide.

[0557] Suitably protected carboxylic acids further include, but are not limited to, silyl-, alkyl-, alkenyl-, aryl-, and arylalkyl-protected carboxylic acids. Examples of suitable silyl groups include trimethylsilyl, triethylsilyl, t-butyldimethylsilyl, t-butyldiphenylsilyl, triisopropylsilyl, and the like. Examples of suitable alkyl groups include methyl, benzyl, p-methoxybenzyl, 3,4-dimethoxybenzyl, trityl, t-butyl, tetrahydropyran-2-yl. Examples of suitable alkenyl groups include allyl. Examples of suitable aryl groups include optionally substituted phenyl, biphenyl, or naphthyl. Examples of suitable arylalkyl groups include optionally substituted benzyl (e.g., p-methoxybenzyl (MPM), 3,4-dimethoxybenzyl, O-nitrobenzyl, p-nitrobenzyl, p-halobenzyl, 2,6-dichlorobenzyl, p-cyanobenzyl), and 2- and 4-picolyl.

[0558] Suitable hydroxyl protecting groups include methyl, methoxylmethyl (MOM), methylthiomethyl (MTM), t-butylthiomethyl, (phenyldimethylsilyl)methoxymethyl (SMOM), benzyloxymethyl (BOM), p-methoxybenzyloxymethyl (PMBM), (4-methoxyphenoxy)methyl (p-AOM), guaiacolmethyl (GUM), t-butoxymethyl, 4-pentenyloxymethyl (POM), siloxymethyl, 2-methoxyethoxymethyl (MEM), 2,2,2-trichloroethoxymethyl, bis(2-chloroethoxy)methyl, 2-(trimethylsilyl)ethoxymethyl (SEMOR), tetrahydropyranyl (THP), 3-bromotetrahydropyranyl, tetrahydrothiopyranyl, 1-methoxycyclohexyl, 4-methoxytetrahydropyranyl (MTHP), 4-methoxytetrahydrothiopyranyl, 4-methoxytetrahydrothiopyranyl S,S-dioxide, 1-[(2-chloro-4-methyl)phenyl]-4-methoxypiperidin-4-yl (CTMP), 1,4-dioxan-2-yl, tetrahydrofuranyl, tetrahydrothiofuranyl, 2,3,3a, 4,5,6,7,7a-octahydro-7,8,8-trimethyl-4,7-methanobenzofuran-2-yl, 1-ethoxyethyl, 1-(2-chloroethoxy)ethyl, 1-methyl-1-methoxyethyl, 1-methyl-1-benzyloxyethyl, 1-methyl-1-benzyloxy-2-fluoroethyl, 2,2,2-trichloroethyl, 2-trimethylsilylethyl, 2-(phenylselenyl)ethyl, t-butyl, allyl, p-chlorophenyl, p-methoxyphenyl, 2,4-dinitrophenyl, benzyl, p-methoxybenzyl, 3,4-dimethoxybenzyl, o-nitrobenzyl, p-nitrobenzyl, p-halobenzyl, 2,6-dichlorobenzyl, p-cyanobenzyl, p-phenylbenzyl, 2-picolyl, 4-picolyl, 3-methyl-2-picolyl N-oxido, diphenylmethyl, p,p′-dinitrobenzhydryl, 5-dibenzosuberyl, triphenylmethyl, a-naphthyldiphenylmethyl, p-methoxyphenyldiphenylmethyl, di(p-methoxyphenyl)phenylmethyl, tri(p-methoxyphenyl)methyl, 4-(4′-bromophenacyloxyphenyl)diphenylmethyl, 4,4′,4″-tris(4,5-dichlorophthalimidophenyl)methyl, 4,4′,4″-tris(levulinoyloxyphenyl)methyl, 4,4′,4″-tris(benzoyloxyphenyl)methyl, 3-(imidazol-1-yl)bis(4′,4″-dimethoxyphenyl)methyl, 1,1-bis(4-methoxyphenyl)-1′-pyrenylmethyl, 9-anthryl, 9-(9-phenyl)xanthenyl, 9-(9-phenyl-10-oxo)anthryl, 1,3-benzodithiolan-2-yl, benzisothiazolyl S,S-dioxido, trimethylsilyl (TMS), triethylsilyl (TES), triisopropylsilyl (TIPS), dimethylisopropylsilyl (IPDMS), diethylisopropylsilyl (DEIPS), dimethylthexylsilyl, t-butyldimethylsilyl (TBDMS), t-butyldiphenylsilyl (TBDPS), tribenzylsilyl, tri-p-xylylsilyl, triphenylsilyl, diphenylmethylsilyl (DPMS), t-butylmethoxyphenylsilyl (TBMPS), formate, benzoylformate, acetate, chloroacetate, dichloroacetate, trichloroacetate, trifluoroacetate, methoxyacetate, triphenylmethoxyacetate, phenoxyacetate, p-chlorophenoxyacetate, 3-phenylpropionate, 4-oxopentanoate (levulinate), 4,4-(ethylenedithio)pentanoate (levulinoyldithioacetal), pivaloate, adamantoate, crotonate, 4-methoxycrotonate, benzoate, p-phenylbenzoate, 2,4,6-trimethylbenzoate (mesitoate), alkyl methyl carbonate, 9-fluorenylmethyl carbonate (Fmoc), alkyl ethyl carbonate, alkyl 2,2,2-trichloroethyl carbonate (Troc), 2-(trimethylsilyl)ethyl carbonate (TMSEC), 2-(phenylsulfonyl) ethyl carbonate (Psec), 2-(triphenylphosphonio) ethyl carbonate (Peoc), alkyl isobutyl carbonate, alkyl vinyl carbonate alkyl allyl carbonate, alkyl p-nitrophenyl carbonate, alkyl benzyl carbonate, alkyl p-methoxybenzyl carbonate, alkyl 3,4-dimethoxybenzyl carbonate, alkyl o-nitrobenzyl carbonate, alkyl p-nitrobenzyl carbonate, alkyl S-benzyl thiocarbonate, 4-ethoxy-1-napththyl carbonate, methyl dithiocarbonate, 2-iodobenzoate, 4-azidobutyrate, 4-nitro-4-methylpentanoate, o-(dibromomethyl)benzoate, 2-formylbenzenesulfonate, 2-(methylthiomethoxy)ethyl, 4-(methylthiomethoxy)butyrate, 2-(methylthiomethoxymethyl)benzoate, 2,6-dichloro-4-methylphenoxyacetate, 2,6-dichloro-4-(1,1,3,3-tetramethylbutyl)phenoxyacetate, 2,4-bis(1,1-dimethylpropyl)phenoxyacetate, chlorodiphenylacetate, isobutyrate, monosuccinoate, (E)-2-methyl-2-butenoate, o-(methoxycarbonyl)benzoate, u-naphthoate, nitrate, alkyl N,N,N′,N′-tetramethylphosphorodiamidate, alkyl N-phenylcarbamate, borate, dimethylphosphinothioyl, alkyl 2,4-dinitrophenylsulfenate, sulfate, methanesulfonate (mesylate), benzylsulfonate, and tosylate (Ts). For protecting 1,2- or 1,3-diols, the protecting groups include methylene acetal, ethylidene acetal, 1-t-butylethylidene ketal, 1-phenylethylidene ketal, (4-methoxyphenyl)ethylidene acetal, 2,2,2-trichloroethylidene acetal, acetonide, cyclopentylidene ketal, cyclohexylidene ketal, cycloheptylidene ketal, benzylidene acetal, p-methoxybenzylidene acetal, 2,4-dimethoxybenzylidene ketal, 3,4-dimethoxybenzylidene acetal, 2-nitrobenzylidene acetal, methoxymethylene acetal, ethoxymethylene acetal, dimethoxymethylene ortho ester, 1-methoxyethylidene ortho ester, 1-ethoxyethylidine ortho ester, 1,2-dimethoxyethylidene ortho ester, a-methoxybenzylidene ortho ester, 1-(N,N-dimethylamino)ethylidene derivative, u-(N,N′-dimethylamino)benzylidene derivative, 2-oxacyclopentylidene ortho ester, di-t-butylsilylene group (DTBS), 1,3-(1,1,3,3-tetraisopropyldisiloxanylidene) derivative (TIPDS), tetra-t-butoxydisiloxane-1,3-diylidene derivative (TBDS), cyclic carbonates, cyclic boronates, ethyl boronate, and phenyl boronate.

[0559] In certain embodiments, a hydroxyl protecting group is acetyl, t-butyl, t-butoxymethyl, methoxymethyl, tetrahydropyranyl, 1-ethoxyethyl, 1-(2-chloroethoxy)ethyl, 2-trimethylsilylethyl, p-chlorophenyl, 2,4-dinitrophenyl, benzyl, benzoyl, p-phenylbenzoyl, 2,6-dichlorobenzyl, diphenylmethyl, p-nitrobenzyl, triphenylmethyl (trityl), 4,4′-dimethoxytrityl, trimethylsilyl, triethylsilyl, t-butyldimethylsilyl, t-butyldiphenylsilyl, triphenylsilyl, triisopropylsilyl, benzoylformate, chloroacetyl, trichloroacetyl, trifiuoroacetyl, pivaloyl, 9-fluorenylmethyl carbonate, mesylate, tosylate, triflate, trityl, monomethoxytrityl (MMTr), 4,4′-dimethoxytrityl, (DMTr) and 4,4′,4″-trimethoxytrityl (TMTr), 2-cyanoethyl (CE or Cne), 2-(trimethylsilyl)ethyl (TSE), 2-(2-nitrophenyl)ethyl, 2-(4-cyanophenyl)ethyl 2-(4-nitrophenyl)ethyl (NPE), 2-(4-nitrophenylsulfonyl)ethyl, 3,5-dichlorophenyl, 2,4-dimethylphenyl, 2-nitrophenyl, 4-nitrophenyl, 2,4,6-trimethylphenyl, 2-(2-nitrophenyl)ethyl, butylthiocarbonyl, 4,4′,4″-tris(benzoyloxy)trityl, diphenylcarbamoyl, levulinyl, 2-(dibromomethyl)benzoyl (Dbmb), 2-(isopropylthiomethoxymethyl)benzoyl (Ptmt), 9-phenylxanthen-9-yl (pixyl) or 9-(p-methoxyphenyl)xanthine-9-yl (MOX). In certain embodiments, each of the hydroxyl protecting groups is, independently selected from acetyl, benzyl, t-butyldimethylsilyl, t-butyldiphenylsilyl and 4,4′-dimethoxytrityl. In certain embodiments, the hydroxyl protecting group is selected from the group consisting of trityl, monomethoxytrityl and 4,4′-dimethoxytrityl group. In certain embodiments, a phosphorous linkage protecting group is a group attached to the phosphorous linkage (e.g., an internucleotidic linkage) throughout oligonucleotide synthesis. In certain embodiments, a protecting group is attached to a sulfur atom of a phosphorothioate group. In certain embodiments, a protecting group is attached to an oxygen atom of an internucleotide phosphorothioate linkage. In certain embodiments, a protecting group is attached to an oxygen atom of the internucleotide phosphate linkage. In certain embodiments a protecting group is 2-cyanoethyl (CE or Cne), 2-trimethylsilylethyl, 2-nitroethyl, 2-sulfonylethyl, methyl, benzyl, o-nitrobenzyl, 2-(p-nitrophenyl)ethyl (NPE or Npe), 2-phenylethyl, 3-(N-tert-butylcarboxamido)-1-propyl, 4-oxopentyl, 4-methylthio-1-butyl, 2-cyano-1,1-dimethylethyl, 4-N-methylaminobutyl, 3-(2-pyridyl)-1-propyl, 2-[N-methyl-N-(2-pyridyl)]aminoethyl, 2-(N-formyl,N-methyl)aminoethyl, or 4-[N-methyl-N-(2,2,2-trifluoroacetyl)amino]butyl.

[0560] Subject: As used herein, the term “subject” or “test subject” refers to any organism to which a compound (e.g., an oligonucleotide) or composition is administered in accordance with the present disclosure e.g., for experimental, diagnostic, prophylactic and/or therapeutic purposes. Typical subjects include animals (e.g., mammals such as mice, rats, rabbits, non-human primates, and humans; insects; worms; etc.) and plants. In certain embodiments, a subject is a human. In certain embodiments, a subject may be suffering from and/or susceptible to a disease, disorder and/or condition.

[0561] Substantially: As used herein, the term “substantially” refers to the qualitative condition of exhibiting total or near-total extent or degree of a characteristic or property of interest. A base sequence which is substantially identical or complementary to a second sequence is not fully identical or complementary to the second sequence, but is mostly or nearly identical or complementary to the second sequence. In certain embodiments, an oligonucleotide with a substantially complementary sequence to another oligonucleotide or nucleic acid forms duplex with the oligonucleotide or nucleic acid in a similar fashion as an oligonucleotide with a fully complementary sequence. In addition, one of ordinary skill in the biological and/or chemical arts will understand that biological and chemical phenomena rarely, if ever, go to completion and/or proceed to completeness or achieve or avoid an absolute result. The term “substantially” is therefore used herein to capture the potential lack of completeness inherent in many biological and/or chemical phenomena.

[0562] Sugar: The term “sugar” refers to a monosaccharide or polysaccharide in closed and/or open form. In certain embodiments, sugars are monosaccharides. In certain embodiments, sugars are polysaccharides. Sugars include, but are not limited to, ribose, deoxyribose, pentofuranose, pentopyranose, and hexopyranose moieties. As used herein, the term “sugar” also encompasses structural analogs used in lieu of conventional sugar molecules, such as glycol, polymer of which forms the backbone of the nucleic acid analog, glycol nucleic acid (“GNA”), etc. As used herein, the term “sugar” also encompasses structural analogs used in lieu of natural or naturally-occurring nucleotides, such as modified sugars and nucleotide sugars. In certain embodiments, a sugar is an RNA or DNA sugar (ribose or deoxyribose). In certain embodiments, a sugar is a modified ribose or deoxyribose sugar, e.g., 2′-modified, 5′-modified, etc. As described herein, in certain embodiments, when used in oligonucleotides and/or nucleic acids, modified sugars may provide one or more desired properties, activities, etc. In certain embodiments, a sugar is optionally substituted ribose or deoxyribose. In certain embodiments, a “sugar” refers to a sugar unit in an oligonucleotide or a nucleic acid.

[0563] Susceptible to: An individual who is “susceptible to” a disease, disorder and/or condition is one who has a higher risk of developing the disease, disorder and/or condition than does a member of the general public. In certain embodiments, an individual who is susceptible to a disease, disorder and/or condition is predisposed to have that disease, disorder and/or condition. In certain embodiments, an individual who is susceptible to a disease, disorder and/or condition may not have been diagnosed with the disease, disorder and/or condition. In certain embodiments, an individual who is susceptible to a disease, disorder and/or condition may exhibit symptoms of the disease, disorder and/or condition. In certain embodiments, an individual who is susceptible to a disease, disorder and/or condition may not exhibit symptoms of the disease, disorder and/or condition. In certain embodiments, an individual who is susceptible to a disease, disorder, and/or condition will develop the disease, disorder, and/or condition. In certain embodiments, an individual who is susceptible to a disease, disorder, and/or condition will not develop the disease, disorder, and/or condition.

[0564] Therapeutic agent: As used herein, the term “therapeutic agent” in general refers to any agent that elicits a desired effect (e.g., a desired biological, clinical, or pharmacological effect) when administered to a subject. In certain embodiments, an agent, e.g., a dsRNAi agent, is considered to be a therapeutic agent if it demonstrates a statistically significant effect across an appropriate population. In certain embodiments, an appropriate population is a population of subjects suffering from and/or susceptible to a disease, disorder or condition. In certain embodiments, an appropriate population is a population of model organisms. In certain embodiments, an appropriate population may be defined by one or more criterion such as age group, gender, genetic background, preexisting clinical conditions, prior exposure to therapy. In certain embodiments, a therapeutic agent is a substance that alleviates, ameliorates, relieves, inhibits, prevents, delays onset of, reduces severity of, and/or reduces incidence of one or more hepatic symptoms or features of a disease, disorder, and/or condition in a subject when administered to the subject in an effective amount. In certain embodiments, a “therapeutic agent” is an agent that has been or is required to be approved by a government agency before it can be marketed for administration to humans. In certain embodiments, a “therapeutic agent” is an agent for which a medical prescription is required for administration to humans. In certain embodiments, a therapeutic agent is a provided compound, e.g., a provided oligonucleotide.

[0565] Therapeutically effective amount: As used herein, the term “therapeutically effective amount” means an amount of a substance (e.g., a therapeutic agent, composition, and/or formulation) that elicits a desired biological response when administered as part of a therapeutic regimen. In certain embodiments, a therapeutically effective amount of a substance is an amount that is sufficient, when administered to a subject suffering from or susceptible to a disease, disorder, and/or condition, to treat, diagnose, prevent, and/or delay the onset of the disease, disorder, and/or condition. As will be appreciated by those of ordinary skill in this art, the effective amount of a substance may vary depending on such factors as the desired biological endpoint, the substance to be delivered, the target cell or tissue, etc. For example, the effective amount of compound in a formulation to treat a disease, disorder, and/or condition is the amount that alleviates, ameliorates, relieves, inhibits, prevents, delays onset of, reduces severity of and/or reduces incidence of one or more symptoms or features of the disease, disorder, and/or condition. In certain embodiments, a therapeutically effective amount is administered in a single dose; in certain embodiments, multiple unit doses are required to deliver a therapeutically effective amount.

[0566] Treat: As used herein, the term “treat,” “treatment,” or “treating” refers to any method used to partially or completely alleviate, ameliorate, relieve, inhibit, prevent, delay onset of, reduce severity of, and/or reduce incidence of one or more symptoms or features of a disease, disorder, and/or condition. Treatment may be administered to a subject who does not exhibit signs of a disease, disorder, and/or condition. In certain embodiments, treatment may be administered to a subject who exhibits only early signs of the disease, disorder, and/or condition, for example for the purpose of decreasing the risk of developing pathology associated with the disease, disorder, and/or condition.

[0567] Unsaturated: The term “unsaturated,” as used herein, means that a moiety has one or more units of unsaturation.

[0568] Wild-type: As used herein, the term “wild-type” has its art-understood meaning that refers to an entity having a structure and/or activity as found in nature in a “normal” (as contrasted with mutant, diseased, altered, etc.) state or context. Those of ordinary skill in the art will appreciate that wild type genes and polypeptides often exist in multiple different forms (e.g., alleles).

[0569] As those skilled in the art will appreciate, methods and compositions described herein relating to provided compounds (e.g., oligonucleotides) generally also apply to pharmaceutically acceptable salts of such compounds.

### 1. Description of Certain Embodiments

[0570] Oligonucleotides are useful tools for a wide variety of applications. For example, RNAi oligonucleotides are useful in therapeutic, diagnostic, and research applications, including the treatment of a variety of conditions, disorders, and diseases. The use of naturally occurring nucleic acids (e.g., unmodified DNA or RNA) is limited, for example, by their susceptibility to endo- and exo-nucleases. As such, various synthetic counterparts have been developed to circumvent these shortcomings and/or to further improve various properties and activities. These include synthetic oligonucleotides that contain chemical modifications, e.g., base modifications, sugar modifications, backbone modifications, etc., which, among other things, render these molecules less susceptible to degradation and improve other properties and/or activities. From a structural point of view, modifications to internucleotidic linkages can introduce chirality and/or alter charge, and certain properties may be affected by configurations of linkage phosphorus atoms of oligonucleotides. For example, binding affinity, sequence specific binding to complementary RNA, stability against nucleases, cleavage of target nucleic acids, delivery, pharmacokinetics, etc., can be affected by, inter alia, chirality and/or charge of backbone linkage atoms.

[0571] In certain embodiments, the present disclosure demonstrates that compositions comprising ds oligonucleotides (e.g., dsRNAi oligonucleotides, also referred to as dsRNAi agents) with controlled structural elements provide unexpected properties and/or activities.

[0572] In certain embodiments, the present disclosure encompasses the recognition that stereochemistry, e.g., stereochemistry of backbone chiral centers, can unexpectedly maintain or improve properties of ds oligonucleotides. For example, but not by way of limitation, the instant disclosure relates, in part, to ds oligonucleotides comprising a guide strand comprising backbone phosphoryl guanidine chiral centers in Sp configuration.

[0573] In certain embodiments, the guide strand comprises a backbone phosphoryl guanidine chiral center in the Sp configuration between the +3 nucleotide and the immediately downstream (+4) nucleotide, i.e., in the 3′ direction.

[0574] In certain embodiments, the ds oligonucleotides comprising a guide strand backbone phosphoryl guanidine chiral center in the Sp configuration between the +3 nucleotide and the immediately downstream (+4) nucleotide, i.e., in the 3′ direction, further comprise a phosphoryl guanidine chiral center in the Sp configuration between the +7 and the immediately downstream (+8) nucleotide, between the +10 nucleotide and the immediately downstream (+11) nucleotide, between the +18 nucleotide and the immediately downstream (+19) nucleotide, or combinations thereof.

[0575] In certain embodiments, the ds oligonucleotides comprising a guide strand backbone phosphoryl guanidine chiral center in the Sp configuration between the +3 nucleotide and the immediately downstream (+4) nucleotide, i.e., in the 3′ direction, further comprise a phosphoryl guanidine chiral center in the Rp configuration between the +7 nucleotide and the immediately downstream (+8) nucleotide.

[0576] In certain embodiments, the ds oligonucleotides comprising a guide strand backbone phosphoryl guanidine chiral center in the Sp configuration between the +3 nucleotide and the immediately downstream (+4) nucleotide, i.e., in the 3′ direction, further comprise one or a plurality of modified sugars. In certain embodiments, the ds oligonucleotides comprising a guide strand backbone phosphoryl guanidine chiral center in the Sp configuration between the +3 nucleotide and the immediately downstream (+4) nucleotide, i.e., in the 3′ direction, comprise a modified sugar at the 5′ terminal (+1) nucleotide, second (+2) nucleotide, third (+3) nucleotide, fourth (+4) nucleotide, fifth (+5) nucleotide, sixth (+6) nucleotide, seventh (+7) nucleotide, eighth (+8) nucleotide, ninth (+9) nucleotide, tenth (+10) nucleotide, twelfth (+12) nucleotide, sixteenth (+16) nucleotide, seventeenth (+17) nucleotide, eighteenth (+18) nucleotide, nineteenth (+19) nucleotide, twentieth (+20) nucleotide, twenty-first (+21) nucleotide, twenty-second (+22), and/or twenty-third (+23), the 3′ terminal, nucleotide. In certain embodiments, the ds oligonucleotides comprising a guide strand backbone phosphoryl guanidine chiral center in the Sp configuration between the +3 nucleotide and the immediately downstream (+4) nucleotide, i.e., in the 3′ direction, comprise a modified sugar at the 5′ terminal (+1) nucleotide. In certain embodiments, the ds oligonucleotides comprising a guide strand backbone phosphoryl guanidine chiral center in the Sp configuration between the +3 nucleotide and the immediately downstream (+4) nucleotide, i.e., in the 3′ direction, comprise a modified sugar at the second (+2) nucleotide. In certain embodiments, the ds oligonucleotides comprising a guide strand backbone phosphoryl guanidine chiral center in the Sp configuration between the +3 nucleotide and the immediately downstream (+4) nucleotide, i.e., in the 3′ direction, comprise a modified sugar at the third (+3) nucleotide. In certain embodiments, the ds oligonucleotides comprising a guide strand backbone phosphoryl guanidine chiral center in the Sp configuration between the +3 nucleotide and the immediately downstream (+4) nucleotide, i.e., in the 3′ direction, comprise a modified sugar at the fourth (+4) nucleotide. In certain embodiments, the ds oligonucleotides comprising a guide strand backbone phosphoryl guanidine chiral center in the Sp configuration between the +3 nucleotide and the immediately downstream (+4) nucleotide, i.e., in the 3′ direction, comprise a modified sugar at the fifth (+5) nucleotide. In certain embodiments, the ds oligonucleotides comprising a guide strand backbone phosphoryl guanidine chiral center in the Sp configuration between the +3 nucleotide and the immediately downstream (+4) nucleotide, i.e., in the 3′ direction, comprise a modified sugar at the sixth (+6) nucleotide

[0577] In certain embodiments, the modified sugar comprises a 2′-F modification, 2′-H modification, 2′-OH modification, 2′-O-alkyl modification, e.g., 2′-O-methyl (OMe) modification, 2′-methoxyethyl (MOE) modification, 5′-alkyl modification, e.g., 5′-(R)-methyl or 5′-(S)-methyl, DNA, locked nucleic acid (LNA), unlocked nucleic acid (UNA), glycol nucleic acid (GNA), or Homo-DNA.

[0578] In certain embodiments, the ds oligonucleotides comprising a guide strand backbone phosphoryl guanidine chiral center in the Sp configuration between the +3 nucleotide and the immediately downstream (+4) nucleotide, i.e., in the 3′ direction, comprise a 2′-F modification of the 5′ terminal (+1) nucleotide, second (+2) nucleotide, third (+3) nucleotide, fourth (+4) nucleotide, fifth (+5) nucleotide, and/or sixth (+6) nucleotide. In certain embodiments, the ds oligonucleotides comprising a guide strand backbone phosphoryl guanidine chiral center in the Sp configuration between the +3 nucleotide and the immediately downstream (+4) nucleotide, i.e., in the 3′ direction, comprise a 2′-F modification of the 5′ terminal (+1) nucleotide. In certain embodiments, the ds oligonucleotides comprising a guide strand backbone phosphoryl guanidine chiral center in the Sp configuration between the +3 nucleotide and the immediately downstream (+4) nucleotide, i.e., in the 3′ direction, comprise a 2′-F modification of the second (+2) nucleotide. In certain embodiments, the ds oligonucleotides comprising a guide strand backbone phosphoryl guanidine chiral center in the Sp configuration between the +3 nucleotide and the immediately downstream (+4) nucleotide, i.e., in the 3′ direction, comprise a 2′-F modification of the third (+3) nucleotide. In certain embodiments, the ds oligonucleotides comprising a guide strand backbone phosphoryl guanidine chiral center in the Sp configuration between the +3 nucleotide and the immediately downstream (+4) nucleotide, i.e., in the 3′ direction, comprise a 2′-F modification of the fourth (+4) nucleotide. In certain embodiments, the ds oligonucleotides comprising a guide strand backbone phosphoryl guanidine chiral center in the Sp configuration between the +3 nucleotide and the immediately downstream (+4) nucleotide, i.e., in the 3′ direction, comprise a 2′-F modification of the fifth (+5) nucleotide. In certain embodiments, the ds oligonucleotides comprising a guide strand backbone phosphoryl guanidine chiral center in the Sp configuration between the +3 nucleotide and the immediately downstream (+4) nucleotide, i.e., in the 3′ direction, comprise a 2′-F modification of the sixth (+6) nucleotide.

[0579] In certain embodiments, the ds oligonucleotides comprising a guide strand backbone phosphoryl guanidine chiral center in the Sp configuration between the +3 nucleotide and the immediately downstream (+4) nucleotide, i.e., in the 3′ direction, further comprises one or more of.
[0580] (1) a guide strand comprising backbone phosphorothioate chiral centers in Sp configuration between the 3′ terminal nucleotide and the penultimate (N-1) nucleotide and as between the penultimate (N-1) nucleotide and the immediately upstream, i.e., in the 5′ direction, (N-2) nucleotide;
[0581] (2) a guide strand comprising backbone phosphorothioate chiral centers in Rp, Sp, or alternating configurations between the 5′ terminal (+1) nucleotide and the immediately downstream, i.e., in the 3′ direction, (+2) nucleotide and between the +2 nucleotide and the immediately downstream (+3) nucleotide;
[0582] (3) a guide strand comprising one or more backbone phosphorothioate chiral centers upstream, i.e., in the 5′ direction, relative to backbone phosphorothioate chiral centers in Sp configuration between the 3′ terminal nucleotide and the penultimate (N-1) nucleotide and as between the penultimate (N-1) nucleotide and the immediately upstream (N-2) nucleotide, where the upstream backbone phosphorothioate chiral centers are in Rp or Sp configuration;
[0583] (4) a guide strand comprising one or more backbone phosphorothioate chiral centers in Rp or Sp configuration between the 5′ terminal (+1) nucleotide and the immediately downstream (+2) nucleotide; and between the +2 nucleotide and the immediately downstream (+3) nucleotide;
[0584] (5) a guide strand comprising one or more backbone phosphorothioate chiral centers in Rp or Sp configuration where linkage occurs between any two adjacent nucleotides between the penultimate 3′ nucleotide of the guide strand, where N is the 3′ terminal nucleotide, and the upstream N-10 nucleotide;
[0585] (6) a guide strand comprising one or more backbone phosphoryl guanidine chiral centers in the Rp configuration between the +7 and the immediately downstream (+8), i.e., in the 3′ direction.
[0586] (7) a guide strand comprising a 5′ terminal modification;
[0587] (8) a passenger strand in combination with one or more of the aforementioned guide strands, comprising one or more backbone chiral centers in Rp or Sp configuration;
[0588] (9) a passenger strand in combination with one or more of the aforementioned guide strands, comprising one or more backbone phosphoryl guanidine chiral centers in the Rp configuration between the +7 nucleotide and the immediately downstream (+8) nucleotide, i.e., in the 3′ direction;
[0589] (10) a passenger strand in combination with one or more of the aforementioned guide strands, comprising one or more backbone phosphoryl guanidine chiral centers in the Rp configuration between the +15 nucleotide and the immediately downstream (+16) nucleotide, i.e., in the 3′ direction; and
[0590] (11) a passenger strand in combination with one or more of the aforementioned guide strands, comprising backbone phosphorothioate chiral centers in the Sp configuration between the 5′ terminal (+1) nucleotide and the immediately downstream, i.e., in the 3′ direction, (+2) nucleotide and between the 3′ terminal nucleotide and the penultimate (N-1) nucleotide;
   wherein the ds oligonucleotide further comprises one or more of:
[0591] (1) a guide strand where one or both of the 5′ and 3′ terminal dinucleotides are not linked by a Rp, Sp, or stereorandom non-negatively charged internucleotidic linkages, i.e., the guide strand comprises one or more Rp, Sp, or stereorandom non-negatively charged internucleotidic linkages downstream, i.e., in the 3′ direction, relative to the linkage between the 5′ terminal dinucleotide and/or upstream, i.e., in the 5′ direction, relative to the linkage between the 3′ terminal dinucleotide;
[0592] (2) a guide strand where one or more Rp, Sp, or stereorandom non-negatively charged internucleotidic linkage occurs between any two adjacent nucleotides between the second (+2) nucleotide relative to the 5′ terminal nucleotide of the guide strand and the penultimate 3′ (N-1) nucleotide of the guide strand, where N is the 3′ terminal nucleotide;
[0593] (3) a guide strand where an Rp, Sp, or stereorandom non-negatively charged internucleotidic linkage occurs between the tenth (+10) and eleventh (+11) nucleotides, relative to the 5′ terminal nucleotide;
[0594] (4) a guide strand where an Rp, Sp, or stereorandom non-negatively charged internucleotidic linkage occurs between the seventh (+7) and eighth (+8) nucleotides, relative to the 5′ terminal nucleotide;
[0595] (5) a guide strand comprising one or more backbone phosphorothioate chiral centers in Rp or Sp configuration where linkage occurs between any two adjacent nucleotides between the penultimate 3′ nucleotide of the guide strand, where N is the 3′ terminal nucleotide, and the upstream N-10 nucleotide;
[0596] (6) a passenger strand where one or more Rp, Sp, or stereorandom non-negatively charged internucleotidic linkage occurs upstream, i.e., in the 5′ direction, relative to the central nucleotide of the passenger strand;
[0597] (7) a passenger strand where one or more Rp, Sp, or stereorandom non-negatively charged internucleotidic linkage occurs downstream, i.e., in the 3′ direction, relative to the central nucleotide of the passenger strand;
[0598] (8) a passenger strand where one or more backbone phosphorothioate chiral centers in Rp or Sp configuration internucleotidic linkage occurs upstream, i.e., in the 5′ direction, relative to the central nucleotide of the passenger strand;
[0599] (9) a passenger strand where one or more backbone phosphorothioate chiral centers in Rp or Sp configuration internucleotidic linkage internucleotidic linkage occurs downstream, i.e., in the 3′ direction, relative to the central nucleotide of the passenger strand; and
[0600] (10) a passenger strand comprising one or more modified sugars, e.g. Homo-DNA, between the 5′ terminal (+1) nucleotide and the penultimate (N-1) nucleotide.

[0601] In certain embodiments, the ds oligonucleotide further comprises a 2′ modification, e.g., a 2′ F modification, of the 3′ nucleotide of a nucleotide pair linked by a Rp, Sp, or stereorandom non-negatively charged internucleotidic linkage. In certain embodiments, the one or more Rp, Sp, or stereorandom non-negatively charged internucleotidic linkage incorporated into the guide or passenger strand is an Rp non-negatively charged internucleotidic linkage. In certain embodiments, the one or more Rp, Sp, or stereorandom non-negatively charged internucleotidic linkage is an Sp non-negatively charged internucleotidic linkage. In certain embodiments, the one or more Rp, Sp, or stereorandom non-negatively charged internucleotidic linkage is a stereorandom non-negatively charged internucleotidic linkage. In certain embodiments, the ds oligonucleotides comprising a guide strand backbone phosphoryl guanidine chiral center in the Sp configuration between the +3 nucleotide and the immediately downstream (+4) nucleotide, i.e., in the 3′ direction, further comprise one or a plurality of modified sugars. In certain embodiments, the ds oligonucleotides comprising a guide strand backbone phosphoryl guanidine chiral center in the Sp configuration between the +3 nucleotide and the immediately downstream (+4) nucleotide, i.e., in the 3′ direction, comprise a modified sugar at the 5′ terminal (+1) nucleotide, second (+2) nucleotide, third (+3) nucleotide, fourth (+4) nucleotide, fifth (+5) nucleotide, sixth (+6) nucleotide, seventh (+7) nucleotide, eighth (+8) nucleotide, ninth (+9) nucleotide, tenth (+10) nucleotide, twelfth (+12) nucleotide, sixteenth (+16) nucleotide, seventeenth (+17) nucleotide, eighteenth (+18) nucleotide, nineteenth (+19) nucleotide, twentieth (+20) nucleotide, twenty-first (+21) nucleotide, twenty-second (+22), and/or twenty-third (+23), the 3′ terminal, nucleotide.

[0602] In certain embodiments, the ds oligonucleotides comprising a guide strand backbone phosphoryl guanidine chiral center in the Sp configuration between the +3 nucleotide and the immediately downstream (+4) nucleotide, i.e., in the 3′ direction, comprise a modified sugar at the 5′ terminal (+1) nucleotide. In certain embodiments, the ds oligonucleotides comprising a guide strand backbone phosphoryl guanidine chiral center in the Sp configuration between the +3 nucleotide and the immediately downstream (+4) nucleotide, i.e., in the 3′ direction, comprise a modified sugar at the second (+2) nucleotide. In certain embodiments, the ds oligonucleotides comprising a guide strand backbone phosphoryl guanidine chiral center in the Sp configuration between the +3 nucleotide and the immediately downstream (+4) nucleotide, i.e., in the 3′ direction, comprise a modified sugar at the third (+3) nucleotide. In certain embodiments, the ds oligonucleotides comprising a guide strand backbone phosphoryl guanidine chiral center in the Sp configuration between the +3 nucleotide and the immediately downstream (+4) nucleotide, i.e., in the 3′ direction, comprise a modified sugar at the fourth (+4) nucleotide. In certain embodiments, the ds oligonucleotides comprising a guide strand backbone phosphoryl guanidine chiral center in the Sp configuration between the +3 nucleotide and the immediately downstream (+4) nucleotide, i.e., in the 3′ direction, comprise a modified sugar at the fifth (+5) nucleotide. In certain embodiments, the ds oligonucleotides comprising a guide strand backbone phosphoryl guanidine chiral center in the Sp configuration between the +3 nucleotide and the immediately downstream (+4) nucleotide, i.e., in the 3′ direction, comprise a modified sugar at the sixth (+6) nucleotide.

[0603] In certain embodiments, the modified sugar comprises a 2′-F modification, 2′-H modification, 2′-OH modification, 2′-O-alkyl modification, e.g., 2′-O-methyl (OMe) modification, 2′-methoxyethyl (MOE) modification, 5′-alkyl modification, e.g., 5′-(R)-methyl or 5′-(S)-methyl, DNA, locked nucleic acid (LNA), unlocked nucleic acid (UNA), glycol nucleic acid (GNA), or Homo-DNA.

[0604] In certain embodiments, the ds oligonucleotides comprising a guide strand backbone phosphoryl guanidine chiral center in the Sp configuration between the +3 nucleotide and the immediately downstream (+4) nucleotide, i.e., in the 3′ direction, comprise a 2′-F modification of the 5′ terminal (+1) nucleotide, second (+2) nucleotide, third (+3) nucleotide, fourth (+4) nucleotide, fifth (+5) nucleotide, and/or sixth (+6) nucleotide. In certain embodiments, the ds oligonucleotides comprising a guide strand backbone phosphoryl guanidine chiral center in the Sp configuration between the +3 nucleotide and the immediately downstream (+4) nucleotide, i.e., in the 3′ direction, comprise a 2′-F modification of the 5′ terminal (+1) nucleotide. In certain embodiments, the ds oligonucleotides comprising a guide strand backbone phosphoryl guanidine chiral center in the Sp configuration between the +3 nucleotide and the immediately downstream (+4) nucleotide, i.e., in the 3′ direction, comprise a 2′-F modification of the second (+2) nucleotide. In certain embodiments, the ds oligonucleotides comprising a guide strand backbone phosphoryl guanidine chiral center in the Sp configuration between the +3 nucleotide and the immediately downstream (+4) nucleotide, i.e., in the 3′ direction, comprise a 2′-F modification of the third (+3) nucleotide. In certain embodiments, the ds oligonucleotides comprising a guide strand backbone phosphoryl guanidine chiral center in the Sp configuration between the +3 nucleotide and the immediately downstream (+4) nucleotide, i.e., in the 3′ direction, comprise a 2′-F modification of the fourth (+4) nucleotide. In certain embodiments, the ds oligonucleotides comprising a guide strand backbone phosphoryl guanidine chiral center in the Sp configuration between the +3 nucleotide and the immediately downstream (+4) nucleotide, i.e., in the 3′ direction, comprise a 2′-F modification of the fifth (+5) nucleotide. In certain embodiments, the ds oligonucleotides comprising a guide strand backbone phosphoryl guanidine chiral center in the Sp configuration between the +3 nucleotide and the immediately downstream (+4) nucleotide, i.e., in the 3′ direction, comprise a 2′-F modification of the sixth (+6) nucleotide.

[0605] In certain embodiments, the present disclosure encompasses the recognition that stereochemistry, e.g., stereochemistry of chiral centers at a 5′ terminal modification of guide strands, can unexpectedly maintain or improve properties of the ds oligonucleotides described herein. For example, but not by way of limitation, the instant disclosure relates, in part, to ds oligonucleotides comprising a guide stranding comprising one or more of: (1) a backbone phosphoryl guanidine chiral center in the Sp configuration between the +3 nucleotide and the immediately downstream (+4) nucleotide; (2) a phosphorothioate chiral center in Rp or Sp configuration; (3) an Rp, Sp, or stereorandom non-negatively charged internucleotidic linkage where the 3′ nucleotide of a nucleotide pair linked by an Rp, Sp, or stereorandom non-negatively charged internucleotidic linkage comprises a 2′ modification, e.g., a 2′ F or a 2′-OMe; and (4) a 5′ terminal modification selected from:
[0606] (a) 5′ PO modifications, such as, but not limited to:

[chemical structure]

[0607] (b) 5′ VP modifications, such as, but not limited to:

[chemical structure]

[0608] (c) 5′ MeP modifications, such as, but not limited to:

[chemical structure]

[0609] (d) 5′ PN and 5′ Triazole-P modifications, such as, but not limited to:

[chemical structure]

Wherein Base is selected from A, C, G, T, U, abasic and modified nucleobases;
R¹ is selected from an alkyl, methyl, ethyl, isopropyl, propyl, cyclohexyl, benzyl, phenyl, tolyl, xylyl, aryl, or arene group
R^{2′} is selected from H, OH, O-alkyl, O-Me, F, MOE, locked nucleic acid (LNA) bridges and bridged nucleic acid (BNA) bridges to the 4′ C, such as, but not limited to:

[chemical structure]

In certain embodiments, the one or more Rp, Sp, or stereorandom non-negatively charged internucleotidic linkage incorporated into the guide strand is an Rp non-negatively charged internucleotidic linkage. In certain embodiments, the one or more Rp, Sp, or stereorandom non-negatively charged internucleotidic linkage is an Sp non-negatively charged internucleotidic linkage. In certain embodiments, the one or more Rp, Sp, or stereorandom non-negatively charged internucleotidic linkage is a stereorandom non-negatively charged internucleotidic linkage.

[0610] In certain other embodiments, the present disclosure encompasses the recognition that stereochemistry, e.g., stereochemistry of chiral centers at the 5′ terminal nucleotide of guide strands, can unexpectedly maintain or improve properties of ds oligonucleotides wherein the guide strand of the ds oligonucleotide also comprises a phosphorothioate chiral center in Rp or Sp configuration. For example, but not by way of limitation, the instant disclosure relates, in part, to ds oligonucleotides comprising a guide stranding comprising: (1) a phosphorothioate chiral center in Rp or Sp configuration; (2) an Rp, Sp, or stereorandom non-negatively charged internucleotidic linkage where the 3′ nucleotide of a nucleotide pair linked by an Rp, Sp, or stereorandom-negatively charged internucleotidic linkage comprises a 2′ modification, e.g., a 2′ F or a 2′-OMe; and (3) a 5′ terminal modification selected from:
[0611] (a) 5′ PO nucleotides, such as, but not limited to:

[chemical structure]

[0612] (b) 5 VP nucleotides, such as but not limited to:

[chemical structure]

[0613] (c) 5′ MeP nucleotides, such as, but not limited to:

[chemical structure]

[0614] (d) 5′ PN and 5′ Triazole-P nucleotides, such as, but not limited to:

[chemical structure]

[chemical structure]

[0615] (e) 5′ abasic VP and 5′ abasic MeP nucleotides, such as, but not limited to:

[chemical structure]

In certain embodiments, the one or more Rp, Sp, or stereorandom non-negatively charged internucleotidic linkage incorporated into the guide strand is an Rp non-negatively charged internucleotidic linkage. In certain embodiments, the one or more Rp, Sp, or stereorandom non-negatively charged internucleotidic linkage is an Sp non-negatively charged internucleotidic linkage. In certain embodiments, the one or more Rp, Sp, or stereorandom non-negatively charged internucleotidic linkage is a stereorandom non-negatively charged internucleotidic linkage.

[0616] In certain other embodiments, the present disclosure encompasses the recognition that stereochemistry, e.g., stereochemistry of chiral centers at the 5′ terminal nucleotide of guide strands, can unexpectedly maintain or improve properties of ds oligonucleotides wherein the guide strand of the ds oligonucleotide also comprises a phosphorothioate chiral center in Rp or Sp configuration. For example, but not by way of limitation, the instant disclosure relates, in part, to ds oligonucleotides comprising a guide stranding comprising: (1) a backbone phosphoryl guanidine chiral center in the Sp configuration between the +3 nucleotide and the immediately downstream (+4) nucleotide; (2) a backbone phosphoryl guanidine chiral center in the Rp configuration between the +7 nucleotide and the immediately downstream (+8) nucleotide; (3) a phosphorothioate chiral center in Rp or Sp configuration; (4) an Rp, Sp, or stereorandom non-negatively charged internucleotidic linkage where the 3′ nucleotide of a nucleotide pair linked by an Rp, Sp, or stereorandom non-negatively charged internucleotidic linkage comprises a 2′ modification, e.g., a 2′ F or a 2′-OMe; and (5) a 5′ terminal modification selected from:
[0617] (a) 5′ PO nucleotides, such as, but not limited to:

[chemical structure]

[0618] (b) 5′ VP nucleotides, such as, but not limited to:

[chemical structure]

[0619] (c) 5′ MeP nucleotides, such as, but not limited to:

[chemical structure]

[0620] (a) 5′ PN and 5′ Triazole-P nucleotides, such as, but not limited to:

[chemical structure]

[chemical structure]

[0621] (b) 5′ abasic VP and 5′ abasic MeP nucleotides, such as, but not limited to:

[chemical structure]

In certain embodiments, the one or more Rp, Sp, or stereorandom non-negatively charged internucleotidic linkage incorporated into the guide strand is an Rp non-negatively charged internucleotidic linkage. In certain embodiments, the one or more Rp, Sp, or stereorandom non-negatively charged internucleotidic linkage is an Sp non-negatively charged internucleotidic linkage. In certain embodiments, the one or more Rp, Sp, or stereorandom non-negatively charged internucleotidic linkage is a stereorandom non-negatively charged internucleotidic linkage.

[0622] In certain other embodiments, the present disclosure encompasses the recognition that stereochemistry, e.g., stereochemistry of chiral centers at the 5′ terminal nucleotide of guide strands, can unexpectedly maintain or improve properties of ds oligonucleotides wherein the guide strand of the ds oligonucleotide also comprises a phosphorothioate chiral center in Rp or Sp configuration. For example, but not by way of limitation, the instant disclosure relates, in part, to ds oligonucleotides comprising a guide stranding comprising: (1) a backbone phosphoryl guanidine chiral center in the Sp configuration between the +3 nucleotide and the immediately downstream (+4) nucleotide; (2) a backbone phosphoryl guanidine chiral center in the Rp configuration between the +7 nucleotide and the immediately downstream (+8) nucleotide; (3) a phosphorothioate chiral center in Rp or Sp configuration; and (4) a protected phosphonate selected from:

[chemical structure]

[0623] In certain embodiments, the one or more Rp, Sp, or stereorandom non-negatively charged internucleotidic linkage incorporated into the guide strand is an Rp non-negatively charged internucleotidic linkage. In certain embodiments, the one or more Rp, Sp, or stereorandom non-negatively charged internucleotidic linkage is an Sp non-negatively charged internucleotidic linkage. In certain embodiments, the one or more Rp, Sp, or stereorandom non-negatively charged internucleotidic linkage is a stereorandom non-negatively charged internucleotidic linkage. In certain embodiments, the present disclosure encompasses the recognition that non-naturally occurring internucleotidic linkages, e.g., neutral internucleotidic linkages, can, in certain embodiments, be used to link one or more molecules to the double-stranded oligonucleotides described herein. In certain embodiments, such linked molecules can facilitate targeting and/or delivery of the double-stranded oligonucleotide. For example, but not limitation, such linked molecules an include lipophilic molecules. In certain embodiments, the linked molecule is a molecule comprising one or more GalNAc moieties. In certain embodiments, the linked molecule is a receptor. In certain embodiments, the linked molecule is a receptor ligand.

[0624] In certain embodiments, the present disclosure provides technologies for incorporating various additional chemical moieties into ds oligonucleotides. In certain embodiments, the present disclosure provides, for example, reagents and methods for introducing additional chemical moieties through nucleobases (e.g., by covalent linkage, optionally via a linker, to a site on a nucleobase).

[0625] In certain embodiments, the present disclosure provides technologies, e.g., ds oligonucleotide compositions and methods thereof, that achieve allele-specific suppression, wherein transcripts from one allele of a particular target gene is selectively knocked down relative to at least one other allele of the same gene.

[0626] Among other things, the present disclosure provides structural elements, technologies and/or features that can be incorporated into ds oligonucleotides and can impart or tune one or more properties thereof (e.g., relative to an otherwise identical ds oligonucleotide lacking the relevant technology or feature). In certain embodiments, the present disclosure documents that one or more provided technologies and/or features can usefully be incorporated into ds oligonucleotides of various sequences.

[0627] In certain embodiments, the present disclosure demonstrates that certain provided structural elements, technologies and/or features are particularly useful for ds oligonucleotides that participate in and/or direct RNAi mechanisms (e.g., RNAi agents). Regardless, however, the teachings of the present disclosure are not limited to ds oligonucleotides that participate in or operate via any particular mechanism. In certain embodiments, the present disclosure pertains to any ds oligonucleotide, useful for any purpose, which operates through any mechanism, and which comprises any sequence, structure or format (or portion thereof) described herein. In certain embodiments, the present disclosure provides a ds oligonucleotide, useful for any purpose, which operates through any mechanism, and which comprises any sequence, structure or format (or portion thereof) described herein, comprising a guide strand comprising backbone phosphoryl guanidine chiral centers in Sp configuration.

[0628] In certain embodiments, the guide strand comprises a backbone phosphoryl guanidine chiral center in the Sp configuration between the +3 nucleotide and the immediately downstream (+4) nucleotide, i.e., in the 3′ direction.

[0629] In certain embodiments, the ds oligonucleotides comprising a guide strand backbone phosphoryl guanidine chiral center in the Sp configuration between the +3 nucleotide and the immediately downstream (+4) nucleotide, i.e., in the 3′ direction, further comprise a phosphoryl guanidine chiral center in the Sp configuration between the +7 and the immediately downstream (+8) nucleotide, between the +10 nucleotide and the immediately downstream (+11) nucleotide, between the +18 nucleotide and the immediately downstream (+19) nucleotide, or combinations thereof.

[0630] In certain embodiments, the ds oligonucleotides comprising a guide strand backbone phosphoryl guanidine chiral center in the Sp configuration between the +3 nucleotide and the immediately downstream (+4) nucleotide, i.e., in the 3′ direction, further comprise a phosphoryl guanidine chiral center in the Sp configuration between the +7 and the immediately downstream (+8) nucleotide, between the +15 nucleotide and the immediately downstream (+16) nucleotide, or combinations thereof.

[0631] In certain embodiments, the ds oligonucleotides comprising a guide strand backbone phosphoryl guanidine chiral center in the Sp configuration between the +3 nucleotide and the immediately downstream (+4) nucleotide, i.e., in the 3′ direction, further comprise one or a plurality of modified sugars. In certain embodiments, the ds oligonucleotides comprising a guide strand backbone phosphoryl guanidine chiral center in the Sp configuration between the +3 nucleotide and the immediately downstream (+4) nucleotide, i.e., in the 3′ direction, comprise a modified sugar at the 5′ terminal (+1) nucleotide, second (+2) nucleotide, third (+3) nucleotide, fourth (+4) nucleotide, fifth (+5) nucleotide, sixth (+6) nucleotide, seventh (+7) nucleotide, eighth (+8) nucleotide, ninth (+9) nucleotide, tenth (+10) nucleotide, twelfth (+12) nucleotide, sixteenth (+16) nucleotide, seventeenth (+17) nucleotide, eighteenth (+18) nucleotide, nineteenth (+19) nucleotide, twentieth (+20) nucleotide, twenty-first (+21) nucleotide, twenty-second (+22), and/or twenty-third (+23), the 3′ terminal, nucleotide. In certain embodiments, the ds oligonucleotides comprising a guide strand backbone phosphoryl guanidine chiral center in the Sp configuration between the +3 nucleotide and the immediately downstream (+4) nucleotide, i.e., in the 3′ direction, comprise a modified sugar at the 5′ terminal (+1) nucleotide. In certain embodiments, the ds oligonucleotides comprising a guide strand backbone phosphoryl guanidine chiral center in the Sp configuration between the +3 nucleotide and the immediately downstream (+4) nucleotide, i.e., in the 3′ direction, comprise a modified sugar at the second (+2) nucleotide. In certain embodiments, the ds oligonucleotides comprising a guide strand backbone phosphoryl guanidine chiral center in the Sp configuration between the +3 nucleotide and the immediately downstream (+4) nucleotide, i.e., in the 3′ direction, comprise a modified sugar at the third (+3) nucleotide. In certain embodiments, the ds oligonucleotides comprising a guide strand backbone phosphoryl guanidine chiral center in the Sp configuration between the +3 nucleotide and the immediately downstream (+4) nucleotide, i.e., in the 3′ direction, comprise a modified sugar at the fourth (+4) nucleotide. In certain embodiments, the ds oligonucleotides comprising a guide strand backbone phosphoryl guanidine chiral center in the Sp configuration between the +3 nucleotide and the immediately downstream (+4) nucleotide, i.e., in the 3′ direction, comprise a modified sugar at the fifth (+5) nucleotide. In certain embodiments, the ds oligonucleotides comprising a guide strand backbone phosphoryl guanidine chiral center in the Sp configuration between the +3 nucleotide and the immediately downstream (+4) nucleotide, i.e., in the 3′ direction, comprise a modified sugar at the sixth (+6) nucleotide.

[0632] In certain embodiments, the modified sugar comprises a 2′-F modification, 2′-H modification, 2′-OH modification, 2′-O-alkyl modification, e.g., 2′-O-methyl (OMe) modification, 2′-methoxyethyl (MOE) modification, 5′-alkyl modification, e.g., 5′-(R)-methyl or 5′-(S)-methyl, DNA, locked nucleic acid (LNA), unlocked nucleic acid (UNA), glycol nucleic acid (GNA), or Homo-DNA.

[0633] In certain embodiments, the ds oligonucleotides comprising a guide strand backbone phosphoryl guanidine chiral center in the Sp configuration between the +3 nucleotide and the immediately downstream (+4) nucleotide, i.e., in the 3′ direction, comprise a 2′-F modification of the 5′ terminal (+1) nucleotide, second (+2) nucleotide, third (+3) nucleotide, fourth (+4) nucleotide, fifth (+5) nucleotide, and/or sixth (+6) nucleotide. In certain embodiments, the ds oligonucleotides comprising a guide strand backbone phosphoryl guanidine chiral center in the Sp configuration between the +3 nucleotide and the immediately downstream (+4) nucleotide, i.e., in the 3′ direction, comprise a 2′-F modification of the 5′ terminal (+1) nucleotide. In certain embodiments, the ds oligonucleotides comprising a guide strand backbone phosphoryl guanidine chiral center in the Sp configuration between the +3 nucleotide and the immediately downstream (+4) nucleotide, i.e., in the 3′ direction, comprise a 2′-F modification of the second (+2) nucleotide. In certain embodiments, the ds oligonucleotides comprising a guide strand backbone phosphoryl guanidine chiral center in the Sp configuration between the +3 nucleotide and the immediately downstream (+4) nucleotide, i.e., in the 3′ direction, comprise a 2′-F modification of the third (+3) nucleotide. In certain embodiments, the ds oligonucleotides comprising a guide strand backbone phosphoryl guanidine chiral center in the Sp configuration between the +3 nucleotide and the immediately downstream (+4) nucleotide, i.e., in the 3′ direction, comprise a 2′-F modification of the fourth (+4) nucleotide. In certain embodiments, the ds oligonucleotides comprising a guide strand backbone phosphoryl guanidine chiral center in the Sp configuration between the +3 nucleotide and the immediately downstream (+4) nucleotide, i.e., in the 3′ direction, comprise a 2′-F modification of the fifth (+5) nucleotide. In certain embodiments, the ds oligonucleotides comprising a guide strand backbone phosphoryl guanidine chiral center in the Sp configuration between the +3 nucleotide and the immediately downstream (+4) nucleotide, i.e., in the 3′ direction, comprise a 2′-F modification of the sixth (+6) nucleotide.

[0634] In certain embodiments, the present disclosure provides a ds oligonucleotide, useful for any purpose, which operates through any mechanism, and which comprises comprising a guide strand backbone phosphoryl guanidine chiral center in the Sp configuration between the +3 nucleotide and the immediately downstream (+4) nucleotide, i.e., in the 3′ direction, which further comprises:
[0635] (1) a guide strand comprising backbone phosphorothioate chiral centers in Sp configuration between the 3′ terminal nucleotide and the penultimate (N-1) nucleotide and as between the penultimate (N-1) nucleotide and the immediately upstream, i.e., in the 5′ direction, (N-2) nucleotide;
[0636] (2) a guide strand comprising backbone phosphorothioate chiral centers in Rp, Sp, or alternating configurations between the 5′ terminal (+1) nucleotide and the immediately downstream, i.e., in the 3′ direction, (+2) nucleotide and between the +2 nucleotide and the immediately downstream (+3) nucleotide;
[0637] (3) a guide strand comprising one or more backbone phosphorothioate chiral centers upstream, i.e., in the 5′ direction, relative to backbone phosphorothioate chiral centers in Sp configuration between the 3′ terminal nucleotide and the penultimate (N-1) nucleotide and as between the penultimate (N-1) nucleotide and the immediately upstream (N-2) nucleotide, where the upstream backbone phosphorothioate chiral centers are in Rp or Sp configuration;
[0638] (4) a guide strand comprising one or more backbone phosphorothioate chiral centers in Rp or Sp configuration between the 5′ terminal (+1) nucleotide and the immediately downstream (+2) nucleotide; and between the +2 nucleotide and the immediately downstream (+3) nucleotide;
[0639] (5) a guide strand comprising one or more backbone phosphorothioate chiral centers in Rp or Sp configuration where linkage occurs between any two adjacent nucleotides between the penultimate 3′ nucleotide of the guide strand, where N is the 3′ terminal nucleotide, and the upstream N-10 nucleotide;
[0640] (6) a passenger strand in combination with one or more of the aforementioned guide strands, comprising one or more backbone chiral centers in Rp or Sp configuration;
[0641] (7) a passenger strand in combination with one or more of the aforementioned guide strands, comprising one or more backbone phosphoryl guanidine chiral centers in the Rp configuration between the +7 nucleotide and the immediately downstream (+8) nucleotide, i.e., in the 3′ direction;
[0642] (8) a passenger strand in combination with one or more of the aforementioned guide strands, comprising one or more backbone phosphoryl guanidine chiral centers in the Rp configuration between the +15 nucleotide and the immediately downstream (+16) nucleotide, i.e., in the 3′ direction; and
[0643] (9) a passenger strand in combination with one or more of the aforementioned guide strands, comprising backbone phosphorothioate chiral centers in the Sp configuration between the 5′ terminal (+1) nucleotide and the immediately downstream, i.e., in the 3′ direction, (+2) nucleotide and between the 3′ terminal nucleotide and the penultimate (N-1) nucleotide;
   wherein the ds oligonucleotide further comprises one or more of:
[0644] (1) a guide strand where one or both of the 5′ and 3′ terminal dinucleotides are not linked by non-negatively charged internucleotidic linkages, i.e., the guide strand comprises one more Rp, Sp, or stereorandom non-negatively charged internucleotidic linkages downstream, i.e., in the 3′ direction, relative to the linkage between the 5′ terminal dinucleotide and/or upstream, i.e., in the 5′ direction, relative to the linkage between the 3′ terminal dinucleotide;
[0645] (2) a guide strand where one or more Rp, Sp, or stereorandom non-negatively charged internucleotidic linkage occurs between any two adjacent nucleotides between the second (+2) nucleotide relative to the 5′ terminal nucleotide of the guide strand and the penultimate 3′ (N-1) nucleotide of the guide strand, where N is the 3′ terminal nucleotide;
[0646] (3) a guide strand where an Rp, Sp, or stereorandom non-negatively charged internucleotidic linkage occurs between the tenth (+10) and eleventh (+11) nucleotides, relative to the 5′ terminal nucleotide;
[0647] (4) a guide strand where an Rp, Sp, or stereorandom non-negatively charged internucleotidic linkage occurs between the seventh (+7) and eighth (+8) nucleotides, relative to the 5′ terminal nucleotide;
[0648] (5) a guide strand comprising one or more backbone phosphorothioate chiral centers in Rp or Sp configuration where linkage occurs between any two adjacent nucleotides between the penultimate 3′ nucleotide of the guide strand, where N is the 3′ terminal nucleotide, and the upstream N-10 nucleotide;
[0649] (6) a passenger strand where one or more Rp, Sp, or stereorandom non-negatively charged internucleotidic linkage occurs upstream, i.e., in the 5′ direction, relative to the central nucleotide of the passenger strand;
[0650] (7) a passenger strand where one or more Rp, Sp, or stereorandom non-negatively charged internucleotidic linkage occurs downstream, i.e., in the 3′ direction, relative to the central nucleotide of the passenger strand;
[0651] (8) a passenger strand where one or more backbone phosphorothioate chiral centers in Rp or Sp configuration internucleotidic linkage occurs upstream, i.e., in the 5′ direction, relative to the central nucleotide of the passenger strand;
[0652] (9) a passenger strand where one or more backbone phosphorothioate chiral centers in Rp or Sp configuration internucleotidic linkage internucleotidic linkage occurs downstream, i.e., in the 3′ direction, relative to the central nucleotide of the passenger strand; and
[0653] (10) a passenger strand comprising one or more modified sugars, e.g. Homo-DNA, between the 5′ terminal (+1) nucleotide and the penultimate (N-1) nucleotide.

[0654] In certain embodiments, the ds oligonucleotide further comprises a 2′ modification, e.g., a 2′ F modification, of the 3′ nucleotide of a nucleotide pair linked by an Rp, Sp, or stereorandom non-negatively charged internucleotidic linkage. In certain embodiments, the one or more Rp, Sp, or stereorandom non-negatively charged internucleotidic linkage incorporated into the guide or passenger strand is an Rp non-negatively charged internucleotidic linkage. In certain embodiments, the one or more Rp, Sp, or stereorandom non-negatively charged internucleotidic linkage is an Sp non-negatively charged internucleotidic linkage. In certain embodiments, the one or more Rp, Sp, or stereorandom non-negatively charged internucleotidic linkage is a stereorandom non-negatively charged internucleotidic linkage. In certain embodiments, the ds oligonucleotides comprising a guide strand backbone phosphoryl guanidine chiral center in the Sp configuration between the +3 nucleotide and the immediately downstream (+4) nucleotide, i.e., in the 3′ direction, further comprise one or a plurality of modified sugars. In certain embodiments, the ds oligonucleotides comprising a guide strand backbone phosphoryl guanidine chiral center in the Sp configuration between the +3 nucleotide and the immediately downstream (+4) nucleotide, i.e., in the 3′ direction, comprise a modified sugar at the 5′ terminal (+1) nucleotide, second (+2) nucleotide, third (+3) nucleotide, fourth (+4) nucleotide, fifth (+5) nucleotide, sixth (+6) nucleotide, seventh (+7) nucleotide, eighth (+8) nucleotide, ninth (+9) nucleotide, tenth (+10) nucleotide, twelfth (+12) nucleotide, sixteenth (+16) nucleotide, seventeenth (+17) nucleotide, eighteenth (+18) nucleotide, nineteenth (+19) nucleotide, twentieth (+20) nucleotide, twenty-first (+21) nucleotide, twenty-second (+22), and/or twenty-third (+23), the 3′ terminal, nucleotide. In certain embodiments, the ds oligonucleotides comprising a guide strand backbone phosphoryl guanidine chiral center in the Sp configuration between the +3 nucleotide and the immediately downstream (+4) nucleotide, i.e., in the 3′ direction, comprise a modified sugar at the 5′ terminal (+1) nucleotide. In certain embodiments, the ds oligonucleotides comprising a guide strand backbone phosphoryl guanidine chiral center in the Sp configuration between the +3 nucleotide and the immediately downstream (+4) nucleotide, i.e., in the 3′ direction, comprise a modified sugar at the second (+2) nucleotide. In certain embodiments, the ds oligonucleotides comprising a guide strand backbone phosphoryl guanidine chiral center in the Sp configuration between the +3 nucleotide and the immediately downstream (+4) nucleotide, i.e., in the 3′ direction, comprise a modified sugar at the third (+3) nucleotide. In certain embodiments, the ds oligonucleotides comprising a guide strand backbone phosphoryl guanidine chiral center in the Sp configuration between the +3 nucleotide and the immediately downstream (+4) nucleotide, i.e., in the 3′ direction, comprise a modified sugar at the fourth (+4) nucleotide. In certain embodiments, the ds oligonucleotides comprising a guide strand backbone phosphoryl guanidine chiral center in the Sp configuration between the +3 nucleotide and the immediately downstream (+4) nucleotide, i.e., in the 3′ direction, comprise a modified sugar at the fifth (+5) nucleotide. In certain embodiments, the ds oligonucleotides comprising a guide strand backbone phosphoryl guanidine chiral center in the Sp configuration between the +3 nucleotide and the immediately downstream (+4) nucleotide, i.e., in the 3′ direction, comprise a modified sugar at the sixth (+6) nucleotide.

[0655] In certain embodiments, the modified sugar comprises a 2′-F modification, 2′-H modification, 2′-OH modification, 2′-O-alkyl modification, e.g., 2′-O-methyl (OMe) modification, 2′-methoxyethyl (MOE) modification, 5′-alkyl modification, e.g., 5′-(R)-methyl or 5′-(S)-methyl, DNA, locked nucleic acid (LNA), unlocked nucleic acid (UNA), glycol nucleic acid (GNA), or Homo-DNA.

[0656] In certain embodiments, the ds oligonucleotides comprising a guide strand backbone phosphoryl guanidine chiral center in the Sp configuration between the +3 nucleotide and the immediately downstream (+4) nucleotide, i.e., in the 3′ direction, comprise a 2′-F modification of the 5′ terminal (+1) nucleotide, second (+2) nucleotide, third (+3) nucleotide, fourth (+4) nucleotide, fifth (+5) nucleotide, and/or sixth (+6) nucleotide. In certain embodiments, the ds oligonucleotides comprising a guide strand backbone phosphoryl guanidine chiral center in the Sp configuration between the +3 nucleotide and the immediately downstream (+4) nucleotide, i.e., in the 3′ direction, comprise a 2′-F modification of the 5′ terminal (+1) nucleotide. In certain embodiments, the ds oligonucleotides comprising a guide strand backbone phosphoryl guanidine chiral center in the Sp configuration between the +3 nucleotide and the immediately downstream (+4) nucleotide, i.e., in the 3′ direction, comprise a 2′-F modification of the second (+2) nucleotide. In certain embodiments, the ds oligonucleotides comprising a guide strand backbone phosphoryl guanidine chiral center in the Sp configuration between the +3 nucleotide and the immediately downstream (+4) nucleotide, i.e., in the 3′ direction, comprise a 2′-F modification of the third (+3) nucleotide. In certain embodiments, the ds oligonucleotides comprising a guide strand backbone phosphoryl guanidine chiral center in the Sp configuration between the +3 nucleotide and the immediately downstream (+4) nucleotide, i.e., in the 3′ direction, comprise a 2′-F modification of the fourth (+4) nucleotide. In certain embodiments, the ds oligonucleotides comprising a guide strand backbone phosphoryl guanidine chiral center in the Sp configuration between the +3 nucleotide and the immediately downstream (+4) nucleotide, i.e., in the 3′ direction, comprise a 2′-F modification of the fifth (+5) nucleotide. In certain embodiments, the ds oligonucleotides comprising a guide strand backbone phosphoryl guanidine chiral center in the Sp configuration between the +3 nucleotide and the immediately downstream (+4) nucleotide, i.e., in the 3′ direction, comprise a 2′-F modification of the sixth (+6) nucleotide.

[0657] In certain embodiments, the provided ds oligonucleotides may participate in (e.g., direct) RNAi mechanisms. In certain embodiments, provided ds oligonucleotides may participate in RNase H (ribonuclease H) mechanisms. In certain embodiments, provided ds oligonucleotides may act as translational inhibitors (e.g., may provide steric blocks of translation).

[0658] In certain embodiments, the ds oligonucleotide comprises a guide strand backbone phosphoryl guanidine chiral center in the Sp configuration between the +3 nucleotide and the immediately downstream (+4) nucleotide, i.e., in the 3′ direction, and the guide strand further comprises backbone phosphorothioate chiral centers in Sp configuration between the 3′ terminal nucleotide and the penultimate (N-1) nucleotide and as between the penultimate (N-1) nucleotide and the immediately upstream (N-2) nucleotide, and one or more of
[0659] (1) a guide strand comprising backbone phosphorothioate chiral centers in Sp configuration between the 3′ terminal nucleotide and the penultimate (N-1) nucleotide and as between the penultimate (N-1) nucleotide and the immediately upstream, i.e., in the 5′ direction, (N-2) nucleotide;
[0660] (2) a guide strand comprising backbone phosphorothioate chiral centers in Rp, Sp, or alternating configurations between the 5′ terminal (+1) nucleotide and the immediately downstream, i.e., in the 3′ direction, (+2) nucleotide and between the +2 nucleotide and the immediately downstream (+3) nucleotide;
[0661] (3) a guide strand comprising one or more backbone phosphorothioate chiral centers upstream, i.e., in the 5′ direction, relative to backbone phosphorothioate chiral centers in Sp configuration between the 3′ terminal nucleotide and the penultimate (N-1) nucleotide and as between the penultimate (N-1) nucleotide and the immediately upstream (N-2) nucleotide, where the upstream backbone phosphorothioate chiral centers are in Rp or Sp configuration;
[0662] (4) a guide strand comprising one or more backbone phosphorothioate chiral centers in Rp or Sp configuration between the 5′ terminal (+1) nucleotide and the immediately downstream (+2) nucleotide; and between the +2 nucleotide and the immediately downstream (+3) nucleotide;
[0663] (5) a guide strand comprising one or more backbone phosphorothioate chiral centers in Rp or Sp configuration where linkage occurs between any two adjacent nucleotides between the penultimate 3′ nucleotide of the guide strand, where N is the 3′ terminal nucleotide, and the upstream N-10 nucleotide;
[0664] (7) a guide strand comprising a 5′ terminal modification;
[0665] (8) a passenger strand in combination with one or more of the aforementioned guide strands, comprising one or more backbone chiral centers in Rp or Sp configuration;
[0666] (9) a passenger strand in combination with one or more of the aforementioned guide strands, comprising one or more backbone phosphoryl guanidine chiral centers in the Rp configuration between the +7 nucleotide and the immediately downstream (+8) nucleotide, i.e., in the 3′ direction;
[0667] (10) a passenger strand in combination with one or more of the aforementioned guide strands, comprising one or more backbone phosphoryl guanidine chiral centers in the Rp configuration between the +15 nucleotide and the immediately downstream (+16) nucleotide, i.e., in the 3′ direction; and
[0668] (11) a passenger strand in combination with one or more of the aforementioned guide strands, comprising backbone phosphorothioate chiral centers in the Sp configuration between the 5′ terminal (+1) nucleotide and the immediately downstream, i.e., in the 3′ direction, (+2) nucleotide and between the 3′ terminal nucleotide and the penultimate (N-1) nucleotide;

[0669] In certain embodiments, the ds oligonucleotide further comprises a 2′ modification, e.g., a 2′ F modification, of the 3′ nucleotide of a nucleotide pair linked by an Rp, Sp, or stereorandom non-negatively charged internucleotidic linkage, and the passenger strand comprises 0-n Rp, Sp, or stereorandom non-negatively charged internucleotidic linkages, where n is about 1 to 49. In certain embodiments, the ds oligonucleotides comprising a guide strand backbone phosphoryl guanidine chiral center in the Sp configuration between the +3 nucleotide and the immediately downstream (+4) nucleotide, i.e., in the 3′ direction, further comprise one or a plurality of modified sugars. In certain embodiments, the ds oligonucleotides comprising a guide strand backbone phosphoryl guanidine chiral center in the Sp configuration between the +3 nucleotide and the immediately downstream (+4) nucleotide, i.e., in the 3′ direction, comprise a modified sugar at the 5′ terminal (+1) nucleotide, second (+2) nucleotide, third (+3) nucleotide, fourth (+4) nucleotide, fifth (+5) nucleotide, sixth (+6) nucleotide, seventh (+7) nucleotide, eighth (+8) nucleotide, ninth (+9) nucleotide, tenth (+10) nucleotide, twelfth (+12) nucleotide, sixteenth (+16) nucleotide, seventeenth (+17) nucleotide, eighteenth (+18) nucleotide, nineteenth (+19) nucleotide, twentieth (+20) nucleotide, twenty-first (+21) nucleotide, twenty-second (+22), and/or twenty-third (+23), the 3′ terminal, nucleotide. In certain embodiments, the ds oligonucleotides comprising a guide strand backbone phosphoryl guanidine chiral center in the Sp configuration between the +3 nucleotide and the immediately downstream (+4) nucleotide, i.e., in the 3′ direction, comprise a modified sugar at the 5′ terminal (+1) nucleotide. In certain embodiments, the ds oligonucleotides comprising a guide strand backbone phosphoryl guanidine chiral center in the Sp configuration between the +3 nucleotide and the immediately downstream (+4) nucleotide, i.e., in the 3′ direction, comprise a modified sugar at the second (+2) nucleotide. In certain embodiments, the ds oligonucleotides comprising a guide strand backbone phosphoryl guanidine chiral center in the Sp configuration between the +3 nucleotide and the immediately downstream (+4) nucleotide, i.e., in the 3′ direction, comprise a modified sugar at the third (+3) nucleotide. In certain embodiments, the ds oligonucleotides comprising a guide strand backbone phosphoryl guanidine chiral center in the Sp configuration between the +3 nucleotide and the immediately downstream (+4) nucleotide, i.e., in the 3′ direction, comprise a modified sugar at the fourth (+4) nucleotide. In certain embodiments, the ds oligonucleotides comprising a guide strand backbone phosphoryl guanidine chiral center in the Sp configuration between the +3 nucleotide and the immediately downstream (+4) nucleotide, i.e., in the 3′ direction, comprise a modified sugar at the fifth (+5) nucleotide. In certain embodiments, the ds oligonucleotides comprising a guide strand backbone phosphoryl guanidine chiral center in the Sp configuration between the +3 nucleotide and the immediately downstream (+4) nucleotide, i.e., in the 3′ direction, comprise a modified sugar at the sixth (+6) nucleotide. In certain embodiments, the modified sugar comprises a 2′-F modification, 2′-H modification, 2′-OH modification, 2′-O-alkyl modification, e.g., 2′-O— methyl (OMe) modification, 2′-methoxyethyl (MOE) modification, 5′-alkyl modification, e.g., 5′-(R)-methyl or 5′-(S)-methyl, DNA, locked nucleic acid (LNA), unlocked nucleic acid (UNA), glycol nucleic acid (GNA), or Homo-DNA. In certain embodiments, the ds oligonucleotides comprising a guide strand backbone phosphoryl guanidine chiral center in the Sp configuration between the +3 nucleotide and the immediately downstream (+4) nucleotide, i.e., in the 3′ direction, comprise a 2′-F modification of the 5′ terminal (+1) nucleotide, second (+2) nucleotide, third (+3) nucleotide, fourth (+4) nucleotide, fifth (+5) nucleotide, and/or sixth (+6) nucleotide. In certain embodiments, the ds oligonucleotides comprising a guide strand backbone phosphoryl guanidine chiral center in the Sp configuration between the +3 nucleotide and the immediately downstream (+4) nucleotide, i.e., in the 3′ direction, comprise a 2′-F modification of the 5′ terminal (+1) nucleotide. In certain embodiments, the ds oligonucleotides comprising a guide strand backbone phosphoryl guanidine chiral center in the Sp configuration between the +3 nucleotide and the immediately downstream (+4) nucleotide, i.e., in the 3′ direction, comprise a 2′-F modification of the second (+2) nucleotide. In certain embodiments, the ds oligonucleotides comprising a guide strand backbone phosphoryl guanidine chiral center in the Sp configuration between the +3 nucleotide and the immediately downstream (+4) nucleotide, i.e., in the 3′ direction, comprise a 2′-F modification of the third (+3) nucleotide. In certain embodiments, the ds oligonucleotides comprising a guide strand backbone phosphoryl guanidine chiral center in the Sp configuration between the +3 nucleotide and the immediately downstream (+4) nucleotide, i.e., in the 3′ direction, comprise a 2′-F modification of the fourth (+4) nucleotide. In certain embodiments, the ds oligonucleotides comprising a guide strand backbone phosphoryl guanidine chiral center in the Sp configuration between the +3 nucleotide and the immediately downstream (+4) nucleotide, i.e., in the 3′ direction, comprise a 2′-F modification of the fifth (+5) nucleotide. In certain embodiments, the ds oligonucleotides comprising a guide strand backbone phosphoryl guanidine chiral center in the Sp configuration between the +3 nucleotide and the immediately downstream (+4) nucleotide, i.e., in the 3′ direction, comprise a 2′-F modification of the sixth (+6) nucleotide.

[0670] In certain further embodiments, the passenger strand comprises an Sp backbone phosphorothioate chiral center between the 5′ terminal (+1) nucleotide and the immediately downstream (+2) nucleotide and an Sp backbone phosphorothioate chiral center between the penultimate (N-1) nucleotide and the 3′ terminal (N) nucleotide. In certain embodiments, the ds oligonucleotide comprises a guide strand backbone phosphoryl guanidine chiral center in the Sp configuration between the +3 nucleotide and the immediately downstream (+4) nucleotide, i.e., in the 3′ direction, and the guide strand further comprises backbone phosphorothioate chiral centers in Rp, Sp, or alternating configurations between the 5′ terminal (+1) nucleotide and the immediately downstream (+2) nucleotide and between the +2 nucleotide and the immediately downstream (+3) nucleotide, and one or more of:
[0671] (1) a guide strand where one or both of the 5′ and 3′ terminal dinucleotides are not linked by non-negatively charged internucleotidic linkages, i.e., the guide strand comprises one more non-negatively charged internucleotidic linkages downstream, i.e., in the 3′ direction, relative to the linkage between the 5′ terminal dinucleotide and/or upstream, i.e., in the 5′ direction, relative to the linkage between the 3′ terminal dinucleotide;
[0672] (2) a guide strand where one or more Rp, Sp, or stereorandom non-negatively charged internucleotidic linkage occurs between any two adjacent nucleotides between the second (+2) nucleotide relative to the 5′ terminal nucleotide of the guide strand and the penultimate 3′ (N-1) nucleotide of the guide strand, where N is the 3′ terminal nucleotide;
[0673] (3) a guide strand where an Rp, Sp, or stereorandom non-negatively charged internucleotidic linkage occurs between the tenth (+10) and eleventh (+11) nucleotides, relative to the 5′ terminal nucleotide;
[0674] (4) a guide strand where an Rp, Sp, or stereorandom non-negatively charged internucleotidic linkage occurs between the seventh (+7) and eighth (+8) nucleotides, relative to the 5′ terminal nucleotide;
[0675] (5) a guide strand comprising one or more backbone phosphorothioate chiral centers in Rp or Sp configuration where linkage occurs between any two adjacent nucleotides between the penultimate 3′ nucleotide of the guide strand, where N is the 3′ terminal nucleotide, and the upstream N-10 nucleotide;
[0676] (6) a passenger strand where one or more Rp, Sp, or stereorandom non-negatively charged internucleotidic linkage occurs upstream, i.e., in the 5′ direction, relative to the central nucleotide of the passenger strand;
[0677] (7) a passenger strand where one or more Rp, Sp, or stereorandom non-negatively charged internucleotidic linkage occurs downstream, i.e., in the 3′ direction, relative to the central nucleotide of the passenger strand;
[0678] (8) a passenger strand where one or more backbone phosphorothioate chiral centers in Rp or Sp configuration internucleotidic linkage occurs upstream, i.e., in the 5′ direction, relative to the central nucleotide of the passenger strand;
[0679] (9) a passenger strand where one or more backbone phosphorothioate chiral centers in Rp or Sp configuration internucleotidic linkage internucleotidic linkage occurs downstream, i.e., in the 3′ direction, relative to the central nucleotide of the passenger strand; and
[0680] (10) a passenger strand comprising one or more modified sugars, e.g. Homo-DNA, between the 5′ terminal (+1) nucleotide and the penultimate (N-1) nucleotide.

[0681] In certain embodiments, the ds oligonucleotide further comprises a 2′ modification, e.g., a 2′ F modification, of the 3′ nucleotide of a nucleotide pair linked by an Rp, Sp, or stereorandom non-negatively charged internucleotidic linkage, and the passenger strand comprises 0-n Rp, Sp, or stereorandom non-negatively charged internucleotidic linkages, where n is about 1 to 49.

[0682] In certain embodiments, the ds oligonucleotides comprising a guide strand backbone phosphoryl guanidine chiral center in the Sp configuration between the +3 nucleotide and the immediately downstream (+4) nucleotide, i.e., in the 3′ direction, further comprise one or a plurality of modified sugars. In certain embodiments, the ds oligonucleotides comprising a guide strand backbone phosphoryl guanidine chiral center in the Sp configuration between the +3 nucleotide and the immediately downstream (+4) nucleotide, i.e., in the 3′ direction, comprise a modified sugar at the 5′ terminal (+1) nucleotide, second (+2) nucleotide, third (+3) nucleotide, fourth (+4) nucleotide, fifth (+5) nucleotide, sixth (+6) nucleotide, seventh (+7) nucleotide, eighth (+8) nucleotide, ninth (+9) nucleotide, tenth (+10) nucleotide, twelfth (+12) nucleotide, sixteenth (+16) nucleotide, seventeenth (+17) nucleotide, eighteenth (+18) nucleotide, nineteenth (+19) nucleotide, twentieth (+20) nucleotide, twenty-first (+21) nucleotide, twenty-second (+22), and/or twenty-third (+23), the 3′ terminal, nucleotide. In certain embodiments, the ds oligonucleotides comprising a guide strand backbone phosphoryl guanidine chiral center in the Sp configuration between the +3 nucleotide and the immediately downstream (+4) nucleotide, i.e., in the 3′ direction, comprise a modified sugar at the 5′ terminal (+1) nucleotide. In certain embodiments, the ds oligonucleotides comprising a guide strand backbone phosphoryl guanidine chiral center in the Sp configuration between the +3 nucleotide and the immediately downstream (+4) nucleotide, i.e., in the 3′ direction, comprise a modified sugar at the second (+2) nucleotide. In certain embodiments, the ds oligonucleotides comprising a guide strand backbone phosphoryl guanidine chiral center in the Sp configuration between the +3 nucleotide and the immediately downstream (+4) nucleotide, i.e., in the 3′ direction, comprise a modified sugar at the third (+3) nucleotide. In certain embodiments, the ds oligonucleotides comprising a guide strand backbone phosphoryl guanidine chiral center in the Sp configuration between the +3 nucleotide and the immediately downstream (+4) nucleotide, i.e., in the 3′ direction, comprise a modified sugar at the fourth (+4) nucleotide. In certain embodiments, the ds oligonucleotides comprising a guide strand backbone phosphoryl guanidine chiral center in the Sp configuration between the +3 nucleotide and the immediately downstream (+4) nucleotide, i.e., in the 3′ direction, comprise a modified sugar at the fifth (+5) nucleotide. In certain embodiments, the ds oligonucleotides comprising a guide strand backbone phosphoryl guanidine chiral center in the Sp configuration between the +3 nucleotide and the immediately downstream (+4) nucleotide, i.e., in the 3′ direction, comprise a modified sugar at the sixth (+6) nucleotide.

[0683] In certain embodiments, the modified sugar comprises a 2′-F modification, 2′-H modification, 2′-OH modification, 2′-O-alkyl modification, e.g., 2′-O-methyl (OMe) modification, 2′-methoxyethyl (MOE) modification, 5′-alkyl modification, e.g., 5′-(R)-methyl or 5′-(S)-methyl, DNA, locked nucleic acid (LNA), unlocked nucleic acid (UNA), glycol nucleic acid (GNA), or Homo-DNA.

[0684] In certain embodiments, the ds oligonucleotides comprising a guide strand backbone phosphoryl guanidine chiral center in the Sp configuration between the +3 nucleotide and the immediately downstream (+4) nucleotide, i.e., in the 3′ direction, comprise a 2′-F modification of the 5′ terminal (+1) nucleotide, second (+2) nucleotide, third (+3) nucleotide, fourth (+4) nucleotide, fifth (+5) nucleotide, and/or sixth (+6) nucleotide. In certain embodiments, the ds oligonucleotides comprising a guide strand backbone phosphoryl guanidine chiral center in the Sp configuration between the +3 nucleotide and the immediately downstream (+4) nucleotide, i.e., in the 3′ direction, comprise a 2′-F modification of the 5′ terminal (+1) nucleotide. In certain embodiments, the ds oligonucleotides comprising a guide strand backbone phosphoryl guanidine chiral center in the Sp configuration between the +3 nucleotide and the immediately downstream (+4) nucleotide, i.e., in the 3′ direction, comprise a 2′-F modification of the second (+2) nucleotide. In certain embodiments, the ds oligonucleotides comprising a guide strand backbone phosphoryl guanidine chiral center in the Sp configuration between the +3 nucleotide and the immediately downstream (+4) nucleotide, i.e., in the 3′ direction, comprise a 2′-F modification of the third (+3) nucleotide. In certain embodiments, the ds oligonucleotides comprising a guide strand backbone phosphoryl guanidine chiral center in the Sp configuration between the +3 nucleotide and the immediately downstream (+4) nucleotide, i.e., in the 3′ direction, comprise a 2′-F modification of the fourth (+4) nucleotide. In certain embodiments, the ds oligonucleotides comprising a guide strand backbone phosphoryl guanidine chiral center in the Sp configuration between the +3 nucleotide and the immediately downstream (+4) nucleotide, i.e., in the 3′ direction, comprise a 2′-F modification of the fifth (+5) nucleotide. In certain embodiments, the ds oligonucleotides comprising a guide strand backbone phosphoryl guanidine chiral center in the Sp configuration between the +3 nucleotide and the immediately downstream (+4) nucleotide, i.e., in the 3′ direction, comprise a 2′-F modification of the sixth (+6) nucleotide.

[0685] In certain further embodiments, the passenger strand comprises an Sp backbone phosphorothioate chiral center between the 5′ terminal (+1) nucleotide and the immediately downstream (+2) nucleotide, an Rp backbone phosphoryl guanidine between the +7 nucleotide and the immediately downstream (+8) nucleotide, and an Sp backbone phosphorothioate chiral center between the penultimate (N-1) nucleotide and the 3′ terminal (N) nucleotide. In certain embodiments, the ds oligonucleotide comprises a guide strand backbone phosphoryl guanidine chiral center in the Sp configuration between the +3 nucleotide and the immediately downstream (+4) nucleotide, i.e., in the 3′ direction, a guide strand backbone phosphoryl guanidine chiral center in the Rp configuration between the +7 nucleotide and the immediately downstream (+8) nucleotide, i.e., in the 3′ direction and the guide strand further comprises backbone phosphorothioate chiral centers in Rp, Sp, or alternating configurations between the 5′ terminal (+1) nucleotide and the immediately downstream (+2) nucleotide and between the +2 nucleotide and the immediately downstream (+3) nucleotide, and one or more of
[0686] (1) a guide strand where one or both of the 5′ and 3′ terminal dinucleotides are not linked by non-negatively charged internucleotidic linkages, i.e., the guide strand comprises one more non-negatively charged internucleotidic linkages downstream, i.e., in the 3′ direction, relative to the linkage between the 5′ terminal dinucleotide and/or upstream, i.e., in the 5′ direction, relative to the linkage between the 3′ terminal dinucleotide;
[0687] (2) a guide strand where one or more Rp, Sp, or stereorandom non-negatively charged internucleotidic linkage occurs between any two adjacent nucleotides between the second (+2) nucleotide relative to the 5′ terminal nucleotide of the guide strand and the penultimate 3′ (N-1) nucleotide of the guide strand, where N is the 3′ terminal nucleotide;
[0688] (3) a guide strand where an Rp, Sp, or stereorandom non-negatively charged internucleotidic linkage occurs between the tenth (+10) and eleventh (+11) nucleotides, relative to the 5′ terminal nucleotide;
[0689] (4) a guide strand where an Rp, Sp, or stereorandom non-negatively charged internucleotidic linkage occurs between the seventh (+7) and eighth (+8) nucleotides, relative to the 5′ terminal nucleotide;
[0690] (5) a guide strand comprising one or more backbone phosphorothioate chiral centers in Rp or Sp configuration where linkage occurs between any two adjacent nucleotides between the penultimate 3′ nucleotide of the guide strand, where N is the 3′ terminal nucleotide, and the upstream N-10 nucleotide;
[0691] (6) a passenger strand where one or more Rp, Sp, or stereorandom non-negatively charged internucleotidic linkage occurs upstream, i.e., in the 5′ direction, relative to the central nucleotide of the passenger strand;
[0692] (7) a passenger strand where one or more Rp, Sp, or stereorandom non-negatively charged internucleotidic linkage occurs downstream, i.e., in the 3′ direction, relative to the central nucleotide of the passenger strand;
[0693] (8) a passenger strand where one or more backbone phosphorothioate chiral centers in Rp or Sp configuration internucleotidic linkage occurs upstream, i.e., in the 5′ direction, relative to the central nucleotide of the passenger strand;
[0694] (9) a passenger strand where one or more backbone phosphorothioate chiral centers in Rp or Sp configuration internucleotidic linkage internucleotidic linkage occurs downstream, i.e., in the 3′ direction, relative to the central nucleotide of the passenger strand; and
[0695] (10) a passenger strand comprising one or more modified sugars, e.g. Homo-DNA, between the 5′ terminal (+1) nucleotide and the penultimate (N-1) nucleotide.

[0696] In certain embodiments, the ds oligonucleotide further comprises a 2′ modification, e.g., a 2′ F modification, of the 3′ nucleotide of a nucleotide pair linked by an Rp, Sp, or stereorandom non-negatively charged internucleotidic linkage, and the passenger strand comprises 0-n Rp, Sp, or stereorandom non-negatively charged internucleotidic linkages, where n is about 1 to 49.

[0697] In certain embodiments, the ds oligonucleotides comprising a guide strand backbone phosphoryl guanidine chiral center in the Sp configuration between the +3 nucleotide and the immediately downstream (+4) nucleotide, i.e., in the 3′ direction, further comprise one or a plurality of modified sugars. In certain embodiments, the ds oligonucleotides comprising a guide strand backbone phosphoryl guanidine chiral center in the Sp configuration between the +3 nucleotide and the immediately downstream (+4) nucleotide, i.e., in the 3′ direction, comprise a modified sugar at the 5′ terminal (+1) nucleotide, second (+2) nucleotide, third (+3) nucleotide, fourth (+4) nucleotide, fifth (+5) nucleotide, sixth (+6) nucleotide, seventh (+7) nucleotide, eighth (+8) nucleotide, ninth (+9) nucleotide, tenth (+10) nucleotide, twelfth (+12) nucleotide, sixteenth (+16) nucleotide, seventeenth (+17) nucleotide, eighteenth (+18) nucleotide, nineteenth (+19) nucleotide, twentieth (+20) nucleotide, twenty-first (+21) nucleotide, twenty-second (+22), and/or twenty-third (+23), the 3′ terminal, nucleotide. In certain embodiments, the ds oligonucleotides comprising a guide strand backbone phosphoryl guanidine chiral center in the Sp configuration between the +3 nucleotide and the immediately downstream (+4) nucleotide, i.e., in the 3′ direction, comprise a modified sugar at the 5′ terminal (+1) nucleotide. In certain embodiments, the ds oligonucleotides comprising a guide strand backbone phosphoryl guanidine chiral center in the Sp configuration between the +3 nucleotide and the immediately downstream (+4) nucleotide, i.e., in the 3′ direction, comprise a modified sugar at the second (+2) nucleotide. In certain embodiments, the ds oligonucleotides comprising a guide strand backbone phosphoryl guanidine chiral center in the Sp configuration between the +3 nucleotide and the immediately downstream (+4) nucleotide, i.e., in the 3′ direction, comprise a modified sugar at the third (+3) nucleotide. In certain embodiments, the ds oligonucleotides comprising a guide strand backbone phosphoryl guanidine chiral center in the Sp configuration between the +3 nucleotide and the immediately downstream (+4) nucleotide, i.e., in the 3′ direction, comprise a modified sugar at the fourth (+4) nucleotide. In certain embodiments, the ds oligonucleotides comprising a guide strand backbone phosphoryl guanidine chiral center in the Sp configuration between the +3 nucleotide and the immediately downstream (+4) nucleotide, i.e., in the 3′ direction, comprise a modified sugar at the fifth (+5) nucleotide. In certain embodiments, the ds oligonucleotides comprising a guide strand backbone phosphoryl guanidine chiral center in the Sp configuration between the +3 nucleotide and the immediately downstream (+4) nucleotide, i.e., in the 3′ direction, comprise a modified sugar at the sixth (+6) nucleotide. In certain embodiments, the modified sugar comprises a 2′-F modification, 2′-H modification, 2′-OH modification, 2′-O-alkyl modification, e.g., 2′-O— methyl (OMe) modification, 2′-methoxyethyl (MOE) modification, 5′-alkyl modification, e.g., 5′-(R)-methyl or 5′-(S)-methyl, DNA, locked nucleic acid (LNA), unlocked nucleic acid (UNA), glycol nucleic acid (GNA), or Homo-DNA. In certain embodiments, the ds oligonucleotides comprising a guide strand backbone phosphoryl guanidine chiral center in the Sp configuration between the +3 nucleotide and the immediately downstream (+4) nucleotide, i.e., in the 3′ direction, comprise a 2′-F modification of the 5′ terminal (+1) nucleotide, second (+2) nucleotide, third (+3) nucleotide, fourth (+4) nucleotide, fifth (+5) nucleotide, and/or sixth (+6) nucleotide. In certain embodiments, the ds oligonucleotides comprising a guide strand backbone phosphoryl guanidine chiral center in the Sp configuration between the +3 nucleotide and the immediately downstream (+4) nucleotide, i.e., in the 3′ direction, comprise a 2′-F modification of the 5′ terminal (+1) nucleotide. In certain embodiments, the ds oligonucleotides comprising a guide strand backbone phosphoryl guanidine chiral center in the Sp configuration between the +3 nucleotide and the immediately downstream (+4) nucleotide, i.e., in the 3′ direction, comprise a 2′-F modification of the second (+2) nucleotide. In certain embodiments, the ds oligonucleotides comprising a guide strand backbone phosphoryl guanidine chiral center in the Sp configuration between the +3 nucleotide and the immediately downstream (+4) nucleotide, i.e., in the 3′ direction, comprise a 2′-F modification of the third (+3) nucleotide. In certain embodiments, the ds oligonucleotides comprising a guide strand backbone phosphoryl guanidine chiral center in the Sp configuration between the +3 nucleotide and the immediately downstream (+4) nucleotide, i.e., in the 3′ direction, comprise a 2′-F modification of the fourth (+4) nucleotide. In certain embodiments, the ds oligonucleotides comprising a guide strand backbone phosphoryl guanidine chiral center in the Sp configuration between the +3 nucleotide and the immediately downstream (+4) nucleotide, i.e., in the 3′ direction, comprise a 2′-F modification of the fifth (+5) nucleotide. In certain embodiments, the ds oligonucleotides comprising a guide strand backbone phosphoryl guanidine chiral center in the Sp configuration between the +3 nucleotide and the immediately downstream (+4) nucleotide, i.e., in the 3′ direction, comprise a 2′-F modification of the sixth (+6) nucleotide.

[0698] In certain further embodiments, the passenger strand comprises an Sp backbone phosphorothioate chiral center between the 5′ terminal (+1) nucleotide and the immediately downstream (+2) nucleotide, an Rp backbone phosphoryl guanidine between the +7 nucleotide and the immediately downstream (+8) nucleotide, and an Sp backbone phosphorothioate chiral center between the penultimate (N-1) nucleotide and the 3′ terminal (N) nucleotide. In certain embodiments, the ds oligonucleotide comprises a guide strand backbone phosphoryl guanidine chiral center in the Sp configuration between the +3 nucleotide and the immediately downstream (+4) nucleotide, i.e., in the 3′ direction, a guide strand backbone phosphoryl guanidine chiral center in the Sp configuration between the +7 nucleotide and the immediately downstream (+8) nucleotide, i.e., in the 3′ direction and the guide strand further comprises backbone phosphorothioate chiral centers in Rp, Sp, or alternating configurations between the 5′ terminal (+1) nucleotide and the immediately downstream (+2) nucleotide and between the +2 nucleotide and the immediately downstream (+3) nucleotide, and one or more of:
[0699] (1) a guide strand where one or both of the 5′ and 3′ terminal dinucleotides are not linked by non-negatively charged internucleotidic linkages, i.e., the guide strand comprises one more non-negatively charged internucleotidic linkages downstream, i.e., in the 3′ direction, relative to the linkage between the 5′ terminal dinucleotide and/or upstream, i.e., in the 5′ direction, relative to the linkage between the 3′ terminal dinucleotide;
[0700] (2) a guide strand where one or more Rp, Sp, or stereorandom non-negatively charged internucleotidic linkage occurs between any two adjacent nucleotides between the second (+2) nucleotide relative to the 5′ terminal nucleotide of the guide strand and the penultimate 3′ (N-1) nucleotide of the guide strand, where N is the 3′ terminal nucleotide;
[0701] (3) a guide strand where an Rp, Sp, or stereorandom non-negatively charged internucleotidic linkage occurs between the tenth (+10) and eleventh (+11) nucleotides, relative to the 5′ terminal nucleotide;
[0702] (4) a guide strand where an Rp, Sp, or stereorandom non-negatively charged internucleotidic linkage occurs between the seventh (+7) and eighth (+8) nucleotides, relative to the 5′ terminal nucleotide;
[0703] (5) a guide strand comprising one or more backbone phosphorothioate chiral centers in Rp or Sp configuration where linkage occurs between any two adjacent nucleotides between the penultimate 3′ nucleotide of the guide strand, where N is the 3′ terminal nucleotide, and the upstream N-10 nucleotide;
[0704] (6) a passenger strand where one or more Rp, Sp, or stereorandom non-negatively charged internucleotidic linkage occurs upstream, i.e., in the 5′ direction, relative to the central nucleotide of the passenger strand;
[0705] (7) a passenger strand where one or more Rp, Sp, or stereorandom non-negatively charged internucleotidic linkage occurs downstream, i.e., in the 3′ direction, relative to the central nucleotide of the passenger strand;
[0706] (8) a passenger strand where one or more backbone phosphorothioate chiral centers in Rp or Sp configuration internucleotidic linkage occurs upstream, i.e., in the 5′ direction, relative to the central nucleotide of the passenger strand;
[0707] (9) a passenger strand where one or more backbone phosphorothioate chiral centers in Rp or Sp configuration internucleotidic linkage internucleotidic linkage occurs downstream, i.e., in the 3′ direction, relative to the central nucleotide of the passenger strand; and
[0708] (10) a passenger strand comprising one or more modified sugars, e.g. Homo-DNA, between the 5′ terminal (+1) nucleotide and the penultimate (N-1) nucleotide.

[0709] In certain embodiments, the ds oligonucleotide further comprises a 2′ modification, e.g., a 2′ F modification, of the 3′ nucleotide of a nucleotide pair linked by an Rp, Sp, or stereorandom non-negatively charged internucleotidic linkage, and the passenger strand comprises 0-n Rp, Sp, or stereorandom non-negatively charged internucleotidic linkages, where n is about 1 to 49.

[0710] In certain embodiments, the ds oligonucleotides comprising a guide strand backbone phosphoryl guanidine chiral center in the Sp configuration between the +3 nucleotide and the immediately downstream (+4) nucleotide, i.e., in the 3′ direction, further comprise one or a plurality of modified sugars. In certain embodiments, the ds oligonucleotides comprising a guide strand backbone phosphoryl guanidine chiral center in the Sp configuration between the +3 nucleotide and the immediately downstream (+4) nucleotide, i.e., in the 3′ direction, comprise a modified sugar at the 5′ terminal (+1) nucleotide, second (+2) nucleotide, third (+3) nucleotide, fourth (+4) nucleotide, fifth (+5) nucleotide, sixth (+6) nucleotide, seventh (+7) nucleotide, eighth (+8) nucleotide, ninth (+9) nucleotide, tenth (+10) nucleotide, twelfth (+12) nucleotide, sixteenth (+16) nucleotide, seventeenth (+17) nucleotide, eighteenth (+18) nucleotide, nineteenth (+19) nucleotide, twentieth (+20) nucleotide, twenty-first (+21) nucleotide, twenty-second (+22), and/or twenty-third (+23), the 3′ terminal, nucleotide. In certain embodiments, the ds oligonucleotides comprising a guide strand backbone phosphoryl guanidine chiral center in the Sp configuration between the +3 nucleotide and the immediately downstream (+4) nucleotide, i.e., in the 3′ direction, comprise a modified sugar at the 5′ terminal (+1) nucleotide. In certain embodiments, the ds oligonucleotides comprising a guide strand backbone phosphoryl guanidine chiral center in the Sp configuration between the +3 nucleotide and the immediately downstream (+4) nucleotide, i.e., in the 3′ direction, comprise a modified sugar at the second (+2) nucleotide. In certain embodiments, the ds oligonucleotides comprising a guide strand backbone phosphoryl guanidine chiral center in the Sp configuration between the +3 nucleotide and the immediately downstream (+4) nucleotide, i.e., in the 3′ direction, comprise a modified sugar at the third (+3) nucleotide. In certain embodiments, the ds oligonucleotides comprising a guide strand backbone phosphoryl guanidine chiral center in the Sp configuration between the +3 nucleotide and the immediately downstream (+4) nucleotide, i.e., in the 3′ direction, comprise a modified sugar at the fourth (+4) nucleotide. In certain embodiments, the ds oligonucleotides comprising a guide strand backbone phosphoryl guanidine chiral center in the Sp configuration between the +3 nucleotide and the immediately downstream (+4) nucleotide, i.e., in the 3′ direction, comprise a modified sugar at the fifth (+5) nucleotide. In certain embodiments, the ds oligonucleotides comprising a guide strand backbone phosphoryl guanidine chiral center in the Sp configuration between the +3 nucleotide and the immediately downstream (+4) nucleotide, i.e., in the 3′ direction, comprise a modified sugar at the sixth (+6) nucleotide. In certain embodiments, the modified sugar comprises a 2′-F modification, 2′-H modification, 2′-OH modification, 2′-O-alkyl modification, e.g., 2′-O— methyl (OMe) modification, 2′-methoxyethyl (MOE) modification, 5′-alkyl modification, e.g., 5′-(R)-methyl or 5′-(S)-methyl, DNA, locked nucleic acid (LNA), unlocked nucleic acid (UNA), glycol nucleic acid (GNA), or Homo-DNA. In certain embodiments, the ds oligonucleotides comprising a guide strand backbone phosphoryl guanidine chiral center in the Sp configuration between the +3 nucleotide and the immediately downstream (+4) nucleotide, i.e., in the 3′ direction, comprise a 2′-F modification of the 5′ terminal (+1) nucleotide, second (+2) nucleotide, third (+3) nucleotide, fourth (+4) nucleotide, fifth (+5) nucleotide, and/or sixth (+6) nucleotide. In certain embodiments, the ds oligonucleotides comprising a guide strand backbone phosphoryl guanidine chiral center in the Sp configuration between the +3 nucleotide and the immediately downstream (+4) nucleotide, i.e., in the 3′ direction, comprise a 2′-F modification of the 5′ terminal (+1) nucleotide. In certain embodiments, the ds oligonucleotides comprising a guide strand backbone phosphoryl guanidine chiral center in the Sp configuration between the +3 nucleotide and the immediately downstream (+4) nucleotide, i.e., in the 3′ direction, comprise a 2′-F modification of the second (+2) nucleotide. In certain embodiments, the ds oligonucleotides comprising a guide strand backbone phosphoryl guanidine chiral center in the Sp configuration between the +3 nucleotide and the immediately downstream (+4) nucleotide, i.e., in the 3′ direction, comprise a 2′-F modification of the third (+3) nucleotide. In certain embodiments, the ds oligonucleotides comprising a guide strand backbone phosphoryl guanidine chiral center in the Sp configuration between the +3 nucleotide and the immediately downstream (+4) nucleotide, i.e., in the 3′ direction, comprise a 2′-F modification of the fourth (+4) nucleotide. In certain embodiments, the ds oligonucleotides comprising a guide strand backbone phosphoryl guanidine chiral center in the Sp configuration between the +3 nucleotide and the immediately downstream (+4) nucleotide, i.e., in the 3′ direction, comprise a 2′-F modification of the fifth (+5) nucleotide. In certain embodiments, the ds oligonucleotides comprising a guide strand backbone phosphoryl guanidine chiral center in the Sp configuration between the +3 nucleotide and the immediately downstream (+4) nucleotide, i.e., in the 3′ direction, comprise a 2′-F modification of the sixth (+6) nucleotide.

[0711] In certain further embodiments, the passenger strand comprises an Sp backbone phosphorothioate chiral center between the 5′ terminal (+1) nucleotide and the immediately downstream (+2) nucleotide and an Rp backbone phosphoryl guanidine between the +7 nucleotide and the immediately downstream (+8) nucleotide. In certain embodiments, the ds oligonucleotide comprises a guide strand backbone phosphoryl guanidine chiral center in the Sp configuration between the +7 nucleotide and the immediately downstream (+8) nucleotide, i.e., in the 3′ direction and the guide strand further comprises backbone phosphorothioate chiral centers in Rp, Sp, or alternating configurations between the 5′ terminal (+1) nucleotide and the immediately downstream (+2) nucleotide and between the +2 nucleotide and the immediately downstream (+3) nucleotide, and one or more of
[0712] (1) a guide strand where one or both of the 5′ and 3′ terminal dinucleotides are not linked by non-negatively charged internucleotidic linkages, i.e., the guide strand comprises one more non-negatively charged internucleotidic linkages downstream, i.e., in the 3′ direction, relative to the linkage between the 5′ terminal dinucleotide and/or upstream, i.e., in the 5′ direction, relative to the linkage between the 3′ terminal dinucleotide;
[0713] (2) a guide strand where one or more Rp, Sp, or stereorandom non-negatively charged internucleotidic linkage occurs between any two adjacent nucleotides between the second (+2) nucleotide relative to the 5′ terminal nucleotide of the guide strand and the penultimate 3′ (N-1) nucleotide of the guide strand, where N is the 3′ terminal nucleotide;
[0714] (3) a guide strand where an Rp, Sp, or stereorandom non-negatively charged internucleotidic linkage occurs between the tenth (+10) and eleventh (+11) nucleotides, relative to the 5′ terminal nucleotide;
[0715] (4) a guide strand where an Rp, Sp, or stereorandom non-negatively charged internucleotidic linkage occurs between the seventh (+7) and eighth (+8) nucleotides, relative to the 5′ terminal nucleotide;
[0716] (5) a guide strand comprising one or more backbone phosphorothioate chiral centers in Rp or Sp configuration where linkage occurs between any two adjacent nucleotides between the penultimate 3′ nucleotide of the guide strand, where N is the 3′ terminal nucleotide, and the upstream N-10 nucleotide;
[0717] (6) a passenger strand where one or more Rp, Sp, or stereorandom non-negatively charged internucleotidic linkage occurs upstream, i.e., in the 5′ direction, relative to the central nucleotide of the passenger strand;
[0718] (7) a passenger strand where one or more Rp, Sp, or stereorandom non-negatively charged internucleotidic linkage occurs downstream, i.e., in the 3′ direction, relative to the central nucleotide of the passenger strand;
[0719] (8) a passenger strand where one or more backbone phosphorothioate chiral centers in Rp or Sp configuration internucleotidic linkage occurs upstream, i.e., in the 5′ direction, relative to the central nucleotide of the passenger strand;
[0720] (9) a passenger strand where one or more backbone phosphorothioate chiral centers in Rp or Sp configuration internucleotidic linkage internucleotidic linkage occurs downstream, i.e., in the 3′ direction, relative to the central nucleotide of the passenger strand; and
[0721] (10) a passenger strand comprising one or more modified sugars, e.g. Homo-DNA, between the 5′ terminal (+1) nucleotide and the penultimate (N-1) nucleotide.

[0722] In certain embodiments, the ds oligonucleotide further comprises a 2′ modification, e.g., a 2′ F modification, of the 3′ nucleotide of a nucleotide pair linked by an Rp, Sp, or stereorandom non-negatively charged internucleotidic linkage, and the passenger strand comprises 0-n Rp, Sp, or stereorandom non-negatively charged internucleotidic linkages, where n is about 1 to 49.

[0723] In certain embodiments, the ds oligonucleotides comprising a guide strand backbone phosphoryl guanidine chiral center in the Sp configuration between the +3 nucleotide and the immediately downstream (+4) nucleotide, i.e., in the 3′ direction, further comprise one or a plurality of modified sugars. In certain embodiments, the ds oligonucleotides comprising a guide strand backbone phosphoryl guanidine chiral center in the Sp configuration between the +3 nucleotide and the immediately downstream (+4) nucleotide, i.e., in the 3′ direction, comprise a modified sugar at the 5′ terminal (+1) nucleotide, second (+2) nucleotide, third (+3) nucleotide, fourth (+4) nucleotide, fifth (+5) nucleotide, sixth (+6) nucleotide, seventh (+7) nucleotide, eighth (+8) nucleotide, ninth (+9) nucleotide, tenth (+10) nucleotide, twelfth (+12) nucleotide, sixteenth (+16) nucleotide, seventeenth (+17) nucleotide, eighteenth (+18) nucleotide, nineteenth (+19) nucleotide, twentieth (+20) nucleotide, twenty-first (+21) nucleotide, twenty-second (+22), and/or twenty-third (+23), the 3′ terminal, nucleotide. In certain embodiments, the ds oligonucleotides comprising a guide strand backbone phosphoryl guanidine chiral center in the Sp configuration between the +3 nucleotide and the immediately downstream (+4) nucleotide, i.e., in the 3′ direction, comprise a modified sugar at the 5′ terminal (+1) nucleotide. In certain embodiments, the ds oligonucleotides comprising a guide strand backbone phosphoryl guanidine chiral center in the Sp configuration between the +3 nucleotide and the immediately downstream (+4) nucleotide, i.e., in the 3′ direction, comprise a modified sugar at the second (+2) nucleotide. In certain embodiments, the ds oligonucleotides comprising a guide strand backbone phosphoryl guanidine chiral center in the Sp configuration between the +3 nucleotide and the immediately downstream (+4) nucleotide, i.e., in the 3′ direction, comprise a modified sugar at the third (+3) nucleotide. In certain embodiments, the ds oligonucleotides comprising a guide strand backbone phosphoryl guanidine chiral center in the Sp configuration between the +3 nucleotide and the immediately downstream (+4) nucleotide, i.e., in the 3′ direction, comprise a modified sugar at the fourth (+4) nucleotide. In certain embodiments, the ds oligonucleotides comprising a guide strand backbone phosphoryl guanidine chiral center in the Sp configuration between the +3 nucleotide and the immediately downstream (+4) nucleotide, i.e., in the 3′ direction, comprise a modified sugar at the fifth (+5) nucleotide. In certain embodiments, the ds oligonucleotides comprising a guide strand backbone phosphoryl guanidine chiral center in the Sp configuration between the +3 nucleotide and the immediately downstream (+4) nucleotide, i.e., in the 3′ direction, comprise a modified sugar at the sixth (+6) nucleotide. In certain embodiments, the modified sugar comprises a 2′-F modification, 2′-H modification, 2′-OH modification, 2′-O-alkyl modification, e.g., 2′-O— methyl (OMe) modification, 2′-methoxyethyl (MOE) modification, 5′-alkyl modification, e.g., 5′-(R)-methyl or 5′-(S)-methyl, DNA, locked nucleic acid (LNA), unlocked nucleic acid (UNA), glycol nucleic acid (GNA), or Homo-DNA. In certain embodiments, the ds oligonucleotides comprising a guide strand backbone phosphoryl guanidine chiral center in the Sp configuration between the +3 nucleotide and the immediately downstream (+4) nucleotide, i.e., in the 3′ direction, comprise a 2′-F modification of the 5′ terminal (+1) nucleotide, second (+2) nucleotide, third (+3) nucleotide, fourth (+4) nucleotide, fifth (+5) nucleotide, and/or sixth (+6) nucleotide. In certain embodiments, the ds oligonucleotides comprising a guide strand backbone phosphoryl guanidine chiral center in the Sp configuration between the +3 nucleotide and the immediately downstream (+4) nucleotide, i.e., in the 3′ direction, comprise a 2′-F modification of the 5′ terminal (+1) nucleotide. In certain embodiments, the ds oligonucleotides comprising a guide strand backbone phosphoryl guanidine chiral center in the Sp configuration between the +3 nucleotide and the immediately downstream (+4) nucleotide, i.e., in the 3′ direction, comprise a 2′-F modification of the second (+2) nucleotide. In certain embodiments, the ds oligonucleotides comprising a guide strand backbone phosphoryl guanidine chiral center in the Sp configuration between the +3 nucleotide and the immediately downstream (+4) nucleotide, i.e., in the 3′ direction, comprise a 2′-F modification of the third (+3) nucleotide. In certain embodiments, the ds oligonucleotides comprising a guide strand backbone phosphoryl guanidine chiral center in the Sp configuration between the +3 nucleotide and the immediately downstream (+4) nucleotide, i.e., in the 3′ direction, comprise a 2′-F modification of the fourth (+4) nucleotide. In certain embodiments, the ds oligonucleotides comprising a guide strand backbone phosphoryl guanidine chiral center in the Sp configuration between the +3 nucleotide and the immediately downstream (+4) nucleotide, i.e., in the 3′ direction, comprise a 2′-F modification of the fifth (+5) nucleotide. In certain embodiments, the ds oligonucleotides comprising a guide strand backbone phosphoryl guanidine chiral center in the Sp configuration between the +3 nucleotide and the immediately downstream (+4) nucleotide, i.e., in the 3′ direction, comprise a 2′-F modification of the sixth (+6) nucleotide.

[0724] In certain further embodiments, the passenger strand comprises an Sp backbone phosphorothioate chiral center between the 5′ terminal (+1) nucleotide and the immediately downstream (+2) nucleotide, an Rp backbone phosphoryl guanidine between the +7 nucleotide and the immediately downstream (+8) nucleotide, and an Rp backbone phosphoryl guanidine between the +15 nucleotide and the immediately downstream (+16) nucleotide. In certain embodiments, the ds oligonucleotide comprises a guide strand backbone phosphoryl guanidine chiral center in the Sp configuration between the +7 nucleotide and the immediately downstream (+8) nucleotide, i.e., in the 3′ direction and the guide strand further comprises backbone phosphorothioate chiral centers in Rp, Sp, or alternating configurations between the 5′ terminal (+1) nucleotide and the immediately downstream (+2) nucleotide and between the +2 nucleotide and the immediately downstream (+3) nucleotide, and one or more of
[0725] (1) a guide strand where one or both of the 5′ and 3′ terminal dinucleotides are not linked by non-negatively charged internucleotidic linkages, i.e., the guide strand comprises one more non-negatively charged internucleotidic linkages downstream, i.e., in the 3′ direction, relative to the linkage between the 5′ terminal dinucleotide and/or upstream, i.e., in the 5′ direction, relative to the linkage between the 3′ terminal dinucleotide;
[0726] (2) a guide strand where one or more Rp, Sp, or stereorandom non-negatively charged internucleotidic linkage occurs between any two adjacent nucleotides between the second (+2) nucleotide relative to the 5′ terminal nucleotide of the guide strand and the penultimate 3′ (N-1) nucleotide of the guide strand, where N is the 3′ terminal nucleotide;
[0727] (3) a guide strand where an Rp, Sp, or stereorandom non-negatively charged internucleotidic linkage occurs between the tenth (+10) and eleventh (+11) nucleotides, relative to the 5′ terminal nucleotide;
[0728] (4) a guide strand where an Rp, Sp, or stereorandom non-negatively charged internucleotidic linkage occurs between the seventh (+7) and eighth (+8) nucleotides, relative to the 5′ terminal nucleotide;
[0729] (5) a guide strand comprising one or more backbone phosphorothioate chiral centers in Rp or Sp configuration where linkage occurs between any two adjacent nucleotides between the penultimate 3′ nucleotide of the guide strand, where N is the 3′ terminal nucleotide, and the upstream N-10 nucleotide;
[0730] (6) a passenger strand where one or more Rp, Sp, or stereorandom non-negatively charged internucleotidic linkage occurs upstream, i.e., in the 5′ direction, relative to the central nucleotide of the passenger strand;
[0731] (7) a passenger strand where one or more Rp, Sp, or stereorandom non-negatively charged internucleotidic linkage occurs downstream, i.e., in the 3′ direction, relative to the central nucleotide of the passenger strand;
[0732] (8) a passenger strand where one or more backbone phosphorothioate chiral centers in Rp or Sp configuration internucleotidic linkage occurs upstream, i.e., in the 5′ direction, relative to the central nucleotide of the passenger strand;
[0733] (9) a passenger strand where one or more backbone phosphorothioate chiral centers in Rp or Sp configuration internucleotidic linkage internucleotidic linkage occurs downstream, i.e., in the 3′ direction, relative to the central nucleotide of the passenger strand; and
[0734] (10) a passenger strand comprising one or more modified sugars, e.g. Homo-DNA, between the 5′ terminal (+1) nucleotide and the penultimate (N-1) nucleotide.

[0735] In certain embodiments, the ds oligonucleotide further comprises a 2′ modification, e.g., a 2′ F modification, of the 3′ nucleotide of a nucleotide pair linked by an Rp, Sp, or stereorandom non-negatively charged internucleotidic linkage, and the passenger strand comprises 0-n Rp, Sp, or stereorandom non-negatively charged internucleotidic linkages, where n is about 1 to 49.

[0736] In certain embodiments, the ds oligonucleotides comprising a guide strand backbone phosphoryl guanidine chiral center in the Sp configuration between the +3 nucleotide and the immediately downstream (+4) nucleotide, i.e., in the 3′ direction, further comprise one or a plurality of modified sugars. In certain embodiments, the ds oligonucleotides comprising a guide strand backbone phosphoryl guanidine chiral center in the Sp configuration between the +3 nucleotide and the immediately downstream (+4) nucleotide, i.e., in the 3′ direction, comprise a modified sugar at the 5′ terminal (+1) nucleotide, second (+2) nucleotide, third (+3) nucleotide, fourth (+4) nucleotide, fifth (+5) nucleotide, sixth (+6) nucleotide, seventh (+7) nucleotide, eighth (+8) nucleotide, ninth (+9) nucleotide, tenth (+10) nucleotide, twelfth (+12) nucleotide, sixteenth (+16) nucleotide, seventeenth (+17) nucleotide, eighteenth (+18) nucleotide, nineteenth (+19) nucleotide, twentieth (+20) nucleotide, twenty-first (+21) nucleotide, twenty-second (+22), and/or twenty-third (+23), the 3′ terminal, nucleotide. In certain embodiments, the ds oligonucleotides comprising a guide strand backbone phosphoryl guanidine chiral center in the Sp configuration between the +3 nucleotide and the immediately downstream (+4) nucleotide, i.e., in the 3′ direction, comprise a modified sugar at the 5′ terminal (+1) nucleotide. In certain embodiments, the ds oligonucleotides comprising a guide strand backbone phosphoryl guanidine chiral center in the Sp configuration between the +3 nucleotide and the immediately downstream (+4) nucleotide, i.e., in the 3′ direction, comprise a modified sugar at the second (+2) nucleotide. In certain embodiments, the ds oligonucleotides comprising a guide strand backbone phosphoryl guanidine chiral center in the Sp configuration between the +3 nucleotide and the immediately downstream (+4) nucleotide, i.e., in the 3′ direction, comprise a modified sugar at the third (+3) nucleotide. In certain embodiments, the ds oligonucleotides comprising a guide strand backbone phosphoryl guanidine chiral center in the Sp configuration between the +3 nucleotide and the immediately downstream (+4) nucleotide, i.e., in the 3′ direction, comprise a modified sugar at the fourth (+4) nucleotide. In certain embodiments, the ds oligonucleotides comprising a guide strand backbone phosphoryl guanidine chiral center in the Sp configuration between the +3 nucleotide and the immediately downstream (+4) nucleotide, i.e., in the 3′ direction, comprise a modified sugar at the fifth (+5) nucleotide. In certain embodiments, the ds oligonucleotides comprising a guide strand backbone phosphoryl guanidine chiral center in the Sp configuration between the +3 nucleotide and the immediately downstream (+4) nucleotide, i.e., in the 3′ direction, comprise a modified sugar at the sixth (+6) nucleotide. In certain embodiments, the modified sugar comprises a 2′-F modification, 2′-H modification, 2′-OH modification, 2′-O-alkyl modification, e.g., 2′-O— methyl (OMe) modification, 2′-methoxyethyl (MOE) modification, 5′-alkyl modification, e.g., 5′-(R)-methyl or 5′-(S)-methyl, DNA, locked nucleic acid (LNA), unlocked nucleic acid (UNA), glycol nucleic acid (GNA), or Homo-DNA. In certain embodiments, the ds oligonucleotides comprising a guide strand backbone phosphoryl guanidine chiral center in the Sp configuration between the +3 nucleotide and the immediately downstream (+4) nucleotide, i.e., in the 3′ direction, comprise a 2′-F modification of the 5′ terminal (+1) nucleotide, second (+2) nucleotide, third (+3) nucleotide, fourth (+4) nucleotide, fifth (+5) nucleotide, and/or sixth (+6) nucleotide. In certain embodiments, the ds oligonucleotides comprising a guide strand backbone phosphoryl guanidine chiral center in the Sp configuration between the +3 nucleotide and the immediately downstream (+4) nucleotide, i.e., in the 3′ direction, comprise a 2′-F modification of the 5′ terminal (+1) nucleotide. In certain embodiments, the ds oligonucleotides comprising a guide strand backbone phosphoryl guanidine chiral center in the Sp configuration between the +3 nucleotide and the immediately downstream (+4) nucleotide, i.e., in the 3′ direction, comprise a 2′-F modification of the second (+2) nucleotide. In certain embodiments, the ds oligonucleotides comprising a guide strand backbone phosphoryl guanidine chiral center in the Sp configuration between the +3 nucleotide and the immediately downstream (+4) nucleotide, i.e., in the 3′ direction, comprise a 2′-F modification of the third (+3) nucleotide. In certain embodiments, the ds oligonucleotides comprising a guide strand backbone phosphoryl guanidine chiral center in the Sp configuration between the +3 nucleotide and the immediately downstream (+4) nucleotide, i.e., in the 3′ direction, comprise a 2′-F modification of the fourth (+4) nucleotide. In certain embodiments, the ds oligonucleotides comprising a guide strand backbone phosphoryl guanidine chiral center in the Sp configuration between the +3 nucleotide and the immediately downstream (+4) nucleotide, i.e., in the 3′ direction, comprise a 2′-F modification of the fifth (+5) nucleotide. In certain embodiments, the ds oligonucleotides comprising a guide strand backbone phosphoryl guanidine chiral center in the Sp configuration between the +3 nucleotide and the immediately downstream (+4) nucleotide, i.e., in the 3′ direction, comprise a 2′-F modification of the sixth (+6) nucleotide.

[0737] In certain embodiments, the one or more Rp, Sp, or stereorandom non-negatively charged internucleotidic linkage incorporated into the guide or passenger strand is an Rp non-negatively charged internucleotidic linkage. In certain embodiments, the one or more Rp, Sp, or stereorandom non-negatively charged internucleotidic linkage is an Sp non-negatively charged internucleotidic linkage. In certain embodiments, the one or more Rp, Sp, or stereorandom non-negatively charged internucleotidic linkage is a stereorandom non-negatively charged internucleotidic linkage. In certain further embodiments, the passenger strand comprises an Sp backbone phosphorothioate chiral center between the 5′ terminal (+1) nucleotide and the immediately downstream (+2) nucleotide and an Sp backbone phosphorothioate chiral center between the penultimate (N-1) nucleotide and the 3′ terminal (N) nucleotide.

[0738] In certain embodiments, the ds oligonucleotide comprises a guide strand backbone phosphoryl guanidine chiral center in the Sp configuration between the +3 nucleotide and the immediately downstream (+4) nucleotide, i.e., in the 3′ direction, and the guide strand further comprises one or more backbone phosphorothioate chiral centers in Rp or Sp configuration upstream of backbone phosphorothioate chiral centers in Sp configuration between the 3′ terminal nucleotide and the penultimate (N-1) nucleotide and as between the penultimate (N-1) nucleotide and the immediately upstream (N-2) nucleotide, and one or more of:
[0739] (1) a guide strand where one or both of the 5′ and 3′ terminal dinucleotides are not linked by non-negatively charged internucleotidic linkages, i.e., the guide strand comprises one more non-negatively charged internucleotidic linkages downstream, i.e., in the 3′ direction, relative to the linkage between the 5′ terminal dinucleotide and/or upstream, i.e., in the 5′ direction, relative to the linkage between the 3′ terminal dinucleotide;
[0740] (2) a guide strand where one or more Rp, Sp, or stereorandom non-negatively charged internucleotidic linkage occurs between any two adjacent nucleotides between the second (+2) nucleotide relative to the 5′ terminal nucleotide of the guide strand and the penultimate 3′ (N-1) nucleotide of the guide strand, where N is the 3′ terminal nucleotide;
[0741] (3) a guide strand where an Rp, Sp, or stereorandom non-negatively charged internucleotidic linkage occurs between the tenth (+10) and eleventh (+11) nucleotides, relative to the 5′ terminal nucleotide;
[0742] (4) a guide strand where an Rp, Sp, or stereorandom non-negatively charged internucleotidic linkage occurs between the seventh (+7) and eighth (+8) nucleotides, relative to the 5′ terminal nucleotide;
[0743] (5) a guide strand comprising one or more backbone phosphorothioate chiral centers in Rp or Sp configuration where linkage occurs between any two adjacent nucleotides between the penultimate 3′ nucleotide of the guide strand, where N is the 3′ terminal nucleotide, and the upstream N-10 nucleotide;
[0744] (6) a passenger strand where one or more Rp, Sp, or stereorandom non-negatively charged internucleotidic linkage occurs upstream, i.e., in the 5′ direction, relative to the central nucleotide of the passenger strand;
[0745] (7) a passenger strand where one or more Rp, Sp, or stereorandom non-negatively charged internucleotidic linkage occurs downstream, i.e., in the 3′ direction, relative to the central nucleotide of the passenger strand;
[0746] (8) a passenger strand where one or more backbone phosphorothioate chiral centers in Rp or Sp configuration internucleotidic linkage occurs upstream, i.e., in the 5′ direction, relative to the central nucleotide of the passenger strand;
[0747] (9) a passenger strand where one or more backbone phosphorothioate chiral centers in Rp or Sp configuration internucleotidic linkage internucleotidic linkage occurs downstream, i.e., in the 3′ direction, relative to the central nucleotide of the passenger strand; and
[0748] (10) a passenger strand comprising one or more modified sugars, e.g. Homo-DNA, between the 5′ terminal (+1) nucleotide and the penultimate (N-1) nucleotide.

[0749] In certain embodiments, the ds oligonucleotide further comprises a 2′ modification, e.g., a 2′ F modification, of the 3′ nucleotide of a nucleotide pair linked by an Rp, Sp, or stereorandom non-negatively charged internucleotidic linkage, and the passenger strand comprises 0-n Rp, Sp, or stereorandom non-negatively charged internucleotidic linkages, where n is about 1 to 49.

[0750] In certain embodiments, the ds oligonucleotides comprising a guide strand backbone phosphoryl guanidine chiral center in the Sp configuration between the +3 nucleotide and the immediately downstream (+4) nucleotide, i.e., in the 3′ direction, further comprise one or a plurality of modified sugars. In certain embodiments, the ds oligonucleotides comprising a guide strand backbone phosphoryl guanidine chiral center in the Sp configuration between the +3 nucleotide and the immediately downstream (+4) nucleotide, i.e., in the 3′ direction, comprise a modified sugar at the 5′ terminal (+1) nucleotide, second (+2) nucleotide, third (+3) nucleotide, fourth (+4) nucleotide, fifth (+5) nucleotide, sixth (+6) nucleotide, seventh (+7)nucleotide, eighth (+8) nucleotide, ninth (+9) nucleotide, tenth (+10) nucleotide, twelfth (+12) nucleotide, sixteenth (+16) nucleotide, seventeenth (+17) nucleotide, eighteenth (+18) nucleotide, nineteenth (+19) nucleotide, twentieth (+20) nucleotide, twenty-first (+21) nucleotide, twenty-second (+22), and/or twenty-third (+23), the 3′ terminal, nucleotide. In certain embodiments, the ds oligonucleotides comprising a guide strand backbone phosphoryl guanidine chiral center in the Sp configuration between the +3 nucleotide and the immediately downstream (+4) nucleotide, i.e., in the 3′ direction, comprise a modified sugar at the 5′ terminal (+1) nucleotide. In certain embodiments, the ds oligonucleotides comprising a guide strand backbone phosphoryl guanidine chiral center in the Sp configuration between the +3 nucleotide and the immediately downstream (+4) nucleotide, i.e., in the 3′ direction, comprise a modified sugar at the second (+2) nucleotide. In certain embodiments, the ds oligonucleotides comprising a guide strand backbone phosphoryl guanidine chiral center in the Sp configuration between the +3 nucleotide and the immediately downstream (+4) nucleotide, i.e., in the 3′ direction, comprise a modified sugar at the third (+3) nucleotide. In certain embodiments, the ds oligonucleotides comprising a guide strand backbone phosphoryl guanidine chiral center in the Sp configuration between the +3 nucleotide and the immediately downstream (+4) nucleotide, i.e., in the 3′ direction, comprise a modified sugar at the fourth (+4) nucleotide. In certain embodiments, the ds oligonucleotides comprising a guide strand backbone phosphoryl guanidine chiral center in the Sp configuration between the +3 nucleotide and the immediately downstream (+4) nucleotide, i.e., in the 3′ direction, comprise a modified sugar at the fifth (+5) nucleotide. In certain embodiments, the ds oligonucleotides comprising a guide strand backbone phosphoryl guanidine chiral center in the Sp configuration between the +3 nucleotide and the immediately downstream (+4) nucleotide, i.e., in the 3′ direction, comprise a modified sugar at the sixth (+6) nucleotide. In certain embodiments, the modified sugar comprises a 2′-F modification, 2′-H modification, 2′-OH modification, 2′-O-alkyl modification, e.g., 2′-O-methyl (OMe) modification, 2′-methoxyethyl (MOE) modification, 5′-alkyl modification, e.g., 5′-(R)-methyl or 5′-(S)-methyl, DNA, locked nucleic acid (LNA), unlocked nucleic acid (UNA), glycol nucleic acid (GNA), or Homo-DNA. In certain embodiments, the ds oligonucleotides comprising a guide strand backbone phosphoryl guanidine chiral center in the Sp configuration between the +3 nucleotide and the immediately downstream (+4) nucleotide, i.e., in the 3′ direction, comprise a 2′-F modification of the 5′ terminal (+1) nucleotide, second (+2) nucleotide, third (+3) nucleotide, fourth (+4) nucleotide, fifth (+5) nucleotide, and/or sixth (+6) nucleotide. In certain embodiments, the ds oligonucleotides comprising a guide strand backbone phosphoryl guanidine chiral center in the Sp configuration between the +3 nucleotide and the immediately downstream (+4) nucleotide, i.e., in the 3′ direction, comprise a 2′-F modification of the 5′ terminal (+1) nucleotide. In certain embodiments, the ds oligonucleotides comprising a guide strand backbone phosphoryl guanidine chiral center in the Sp configuration between the +3 nucleotide and the immediately downstream (+4) nucleotide, i.e., in the 3′ direction, comprise a 2′-F modification of the second (+2) nucleotide. In certain embodiments, the ds oligonucleotides comprising a guide strand backbone phosphoryl guanidine chiral center in the Sp configuration between the +3 nucleotide and the immediately downstream (+4) nucleotide, i.e., in the 3′ direction, comprise a 2′-F modification of the third (+3) nucleotide. In certain embodiments, the ds oligonucleotides comprising a guide strand backbone phosphoryl guanidine chiral center in the Sp configuration between the +3 nucleotide and the immediately downstream (+4) nucleotide, i.e., in the 3′ direction, comprise a 2′-F modification of the fourth (+4) nucleotide. In certain embodiments, the ds oligonucleotides comprising a guide strand backbone phosphoryl guanidine chiral center in the Sp configuration between the +3 nucleotide and the immediately downstream (+4) nucleotide, i.e., in the 3′ direction, comprise a 2′-F modification of the fifth (+5) nucleotide. In certain embodiments, the ds oligonucleotides comprising a guide strand backbone phosphoryl guanidine chiral center in the Sp configuration between the +3 nucleotide and the immediately downstream (+4) nucleotide, i.e., in the 3′ direction, comprise a 2′-F modification of the sixth (+6) nucleotide.

[0751] In certain embodiments, the one or more Rp, Sp, or stereorandom non-negatively charged internucleotidic linkage incorporated into the guide or passenger strand is an Rp non-negatively charged internucleotidic linkage. In certain embodiments, the one or more Rp, Sp, or stereorandom non-negatively charged internucleotidic linkage is an Sp non-negatively charged internucleotidic linkage. In certain embodiments, the one or more Rp, Sp, or stereorandom non-negatively charged internucleotidic linkage is a stereorandom non-negatively charged internucleotidic linkage. In certain further embodiments, the passenger strand comprises an Sp backbone phosphorothioate chiral center between the 5′ terminal (+1) nucleotide and the immediately downstream (+2) nucleotide and an Sp backbone phosphorothioate chiral center between the penultimate (N-1) nucleotide and the 3′ terminal (N) nucleotide.

[0752] In certain embodiments, the ds oligonucleotide comprises a guide strand backbone phosphoryl guanidine chiral center in the Sp configuration between the +3 nucleotide and the immediately downstream (+4) nucleotide, i.e., in the 3′ direction, and the guide strand further comprises one or more Rp, Sp, or stereorandom non-negatively charged internucleotidic linkage occurs between the second (+2) and third (+3) nucleotides, relative to the 5′ terminal nucleotide, of the guide strand and the internucleotidic linkage to the penultimate 3′ (N-1) nucleotide, and one or more of.
[0753] (1) a guide strand where one or both of the 5′ and 3′ terminal dinucleotides are not linked by non-negatively charged internucleotidic linkages, i.e., the guide strand comprises one more non-negatively charged internucleotidic linkages downstream, i.e., in the 3′ direction, relative to the linkage between the 5′ terminal dinucleotide and/or upstream, i.e., in the 5′ direction, relative to the linkage between the 3′ terminal dinucleotide;
[0754] (2) a guide strand where one or more Rp, Sp, or stereorandom non-negatively charged internucleotidic linkage occurs between any two adjacent nucleotides between the second (+2) nucleotide relative to the 5′ terminal nucleotide of the guide strand and the penultimate 3′ (N-1) nucleotide of the guide strand, where N is the 3′ terminal nucleotide;
[0755] (3) a guide strand where an Rp, Sp, or stereorandom non-negatively charged internucleotidic linkage occurs between the tenth (+10) and eleventh (+11) nucleotides, relative to the 5′ terminal nucleotide;
[0756] (4) a guide strand where an Rp, Sp, or stereorandom non-negatively charged internucleotidic linkage occurs between the seventh (+7) and eighth (+8) nucleotides, relative to the 5′ terminal nucleotide;
[0757] (5) a guide strand comprising one or more backbone phosphorothioate chiral centers in Rp or Sp configuration where linkage occurs between any two adjacent nucleotides between the penultimate 3′ nucleotide of the guide strand, where N is the 3′ terminal nucleotide, and the upstream N-10 nucleotide;
[0758] (6) a passenger strand where one or more Rp, Sp, or stereorandom non-negatively charged internucleotidic linkage occurs upstream, i.e., in the 5′ direction, relative to the central nucleotide of the passenger strand;
[0759] (7) a passenger strand where one or more Rp, Sp, or stereorandom non-negatively charged internucleotidic linkage occurs downstream, i.e., in the 3′ direction, relative to the central nucleotide of the passenger strand;
[0760] (8) a passenger strand where one or more backbone phosphorothioate chiral centers in Rp or Sp configuration internucleotidic linkage occurs upstream, i.e., in the 5′ direction, relative to the central nucleotide of the passenger strand;
[0761] (9) a passenger strand where one or more backbone phosphorothioate chiral centers in Rp or Sp configuration internucleotidic linkage internucleotidic linkage occurs downstream, i.e., in the 3′ direction, relative to the central nucleotide of the passenger strand; and
[0762] (10) a passenger strand comprising one or more modified sugars, e.g. Homo-DNA, between the 5′ terminal (+1) nucleotide and the penultimate (N-1) nucleotide.

[0763] In certain embodiments, the ds oligonucleotide further comprises a 2′ modification, e.g., a 2′ F modification, of the 3′ nucleotide of a nucleotide pair linked by an Rp, Sp, or stereorandom non-negatively charged internucleotidic linkage, and the passenger strand comprises 0-n Rp, Sp, or stereorandom non-negatively charged internucleotidic linkages, where n is about 1 to 49.

[0764] In certain embodiments, the ds oligonucleotides comprising a guide strand backbone phosphoryl guanidine chiral center in the Sp configuration between the +3 nucleotide and the immediately downstream (+4) nucleotide, i.e., in the 3′ direction, further comprise one or a plurality of modified sugars. In certain embodiments, the ds oligonucleotides comprising a guide strand backbone phosphoryl guanidine chiral center in the Sp configuration between the +3 nucleotide and the immediately downstream (+4) nucleotide, i.e., in the 3′ direction, comprise a modified sugar at the 5′ terminal (+1) nucleotide, second (+2) nucleotide, third (+3) nucleotide, fourth (+4) nucleotide, fifth (+5) nucleotide, sixth (+6) nucleotide, seventh (+7)nucleotide, eighth (+8) nucleotide, ninth (+9) nucleotide, tenth (+10) nucleotide, twelfth (+12) nucleotide, sixteenth (+16) nucleotide, seventeenth (+17) nucleotide, eighteenth (+18) nucleotide, nineteenth (+19) nucleotide, twentieth (+20) nucleotide, twenty-first (+21) nucleotide, twenty-second (+22), and/or twenty-third (+23), the 3′ terminal, nucleotide. In certain embodiments, the ds oligonucleotides comprising a guide strand backbone phosphoryl guanidine chiral center in the Sp configuration between the +3 nucleotide and the immediately downstream (+4) nucleotide, i.e., in the 3′ direction, comprise a modified sugar at the 5′ terminal (+1) nucleotide. In certain embodiments, the ds oligonucleotides comprising a guide strand backbone phosphoryl guanidine chiral center in the Sp configuration between the +3 nucleotide and the immediately downstream (+4) nucleotide, i.e., in the 3′ direction, comprise a modified sugar at the second (+2) nucleotide. In certain embodiments, the ds oligonucleotides comprising a guide strand backbone phosphoryl guanidine chiral center in the Sp configuration between the +3 nucleotide and the immediately downstream (+4) nucleotide, i.e., in the 3′ direction, comprise a modified sugar at the third (+3) nucleotide. In certain embodiments, the ds oligonucleotides comprising a guide strand backbone phosphoryl guanidine chiral center in the Sp configuration between the +3 nucleotide and the immediately downstream (+4) nucleotide, i.e., in the 3′ direction, comprise a modified sugar at the fourth (+4) nucleotide. In certain embodiments, the ds oligonucleotides comprising a guide strand backbone phosphoryl guanidine chiral center in the Sp configuration between the +3 nucleotide and the immediately downstream (+4) nucleotide, i.e., in the 3′ direction, comprise a modified sugar at the fifth (+5) nucleotide. In certain embodiments, the ds oligonucleotides comprising a guide strand backbone phosphoryl guanidine chiral center in the Sp configuration between the +3 nucleotide and the immediately downstream (+4) nucleotide, i.e., in the 3′ direction, comprise a modified sugar at the sixth (+6) nucleotide. In certain embodiments, the modified sugar comprises a 2′-F modification, 2′-H modification, 2′-OH modification, 2′-O-alkyl modification, e.g., 2′-O-methyl (OMe) modification, 2′-methoxyethyl (MOE) modification, 5′-alkyl modification, e.g., 5′-(R)-methyl or 5′-(S)-methyl, DNA, locked nucleic acid (LNA), unlocked nucleic acid (UNA), glycol nucleic acid (GNA), or Homo-DNA. In certain embodiments, the ds oligonucleotides comprising a guide strand backbone phosphoryl guanidine chiral center in the Sp configuration between the +3 nucleotide and the immediately downstream (+4) nucleotide, i.e., in the 3′ direction, comprise a 2′-F modification of the 5′ terminal (+1) nucleotide, second (+2) nucleotide, third (+3) nucleotide, fourth (+4) nucleotide, fifth (+5) nucleotide, and/or sixth (+6) nucleotide. In certain embodiments, the ds oligonucleotides comprising a guide strand backbone phosphoryl guanidine chiral center in the Sp configuration between the +3 nucleotide and the immediately downstream (+4) nucleotide, i.e., in the 3′ direction, comprise a 2′-F modification of the 5′ terminal (+1) nucleotide. In certain embodiments, the ds oligonucleotides comprising a guide strand backbone phosphoryl guanidine chiral center in the Sp configuration between the +3 nucleotide and the immediately downstream (+4) nucleotide, i.e., in the 3′ direction, comprise a 2′-F modification of the second (+2) nucleotide. In certain embodiments, the ds oligonucleotides comprising a guide strand backbone phosphoryl guanidine chiral center in the Sp configuration between the +3 nucleotide and the immediately downstream (+4) nucleotide, i.e., in the 3′ direction, comprise a 2′-F modification of the third (+3) nucleotide. In certain embodiments, the ds oligonucleotides comprising a guide strand backbone phosphoryl guanidine chiral center in the Sp configuration between the +3 nucleotide and the immediately downstream (+4) nucleotide, i.e., in the 3′ direction, comprise a 2′-F modification of the fourth (+4) nucleotide. In certain embodiments, the ds oligonucleotides comprising a guide strand backbone phosphoryl guanidine chiral center in the Sp configuration between the +3 nucleotide and the immediately downstream (+4) nucleotide, i.e., in the 3′ direction, comprise a 2′-F modification of the fifth (+5) nucleotide. In certain embodiments, the ds oligonucleotides comprising a guide strand backbone phosphoryl guanidine chiral center in the Sp configuration between the +3 nucleotide and the immediately downstream (+4) nucleotide, i.e., in the 3′ direction, comprise a 2′-F modification of the sixth (+6) nucleotide.

[0765] In certain embodiments, the one or more Rp, Sp, or stereorandom non-negatively charged internucleotidic linkage incorporated into the guide or passenger strand is an Rp non-negatively charged internucleotidic linkage. In certain embodiments, the one or more Rp, Sp, or stereorandom non-negatively charged internucleotidic linkage is an Sp non-negatively charged internucleotidic linkage. In certain embodiments, the one or more Rp, Sp, or stereorandom non-negatively charged internucleotidic linkage is a stereorandom non-negatively charged internucleotidic linkage. In certain further embodiments, the passenger strand comprises an Sp backbone phosphorothioate chiral center between the 5′ terminal (+1) nucleotide and the immediately downstream (+2) nucleotide and an Sp backbone phosphorothioate chiral center between the penultimate (N-1) nucleotide and the 3′ terminal (N) nucleotide.

[0766] In certain embodiments, the ds oligonucleotide comprises a guide strand backbone phosphoryl guanidine chiral center in the Sp configuration between the +3 nucleotide and the immediately downstream (+4) nucleotide, i.e., in the 3′ direction, and the guide strand further comprises backbone phosphorothioate chiral centers in Sp configuration between the 3′ terminal nucleotide and the penultimate (N-1) nucleotide and as between the penultimate (N-1) nucleotide and the immediately upstream (N-2) nucleotide, and one or more of.
[0767] (1) a guide strand where one or both of the 5′ and 3′ terminal dinucleotides are not linked by non-negatively charged internucleotidic linkages, i.e., the guide strand comprises one more non-negatively charged internucleotidic linkages downstream, i.e., in the 3′ direction, relative to the linkage between the 5′ terminal dinucleotide and/or upstream, i.e., in the 5′ direction, relative to the linkage between the 3′ terminal dinucleotide;
[0768] (2) a guide strand where one or more Rp, Sp, or stereorandom non-negatively charged internucleotidic linkage occurs between any two adjacent nucleotides between the second (+2) nucleotide relative to the 5′ terminal nucleotide of the guide strand and the penultimate 3′ (N-1) nucleotide of the guide strand, where N is the 3′ terminal nucleotide;
[0769] (3) a guide strand where an Rp, Sp, or stereorandom non-negatively charged internucleotidic linkage occurs between the tenth (+10) and eleventh (+11) nucleotides, relative to the 5′ terminal nucleotide;
[0770] (4) a guide strand where an Rp, Sp, or stereorandom non-negatively charged internucleotidic linkage occurs between the seventh (+7) and eighth (+8) nucleotides, relative to the 5′ terminal nucleotide;
[0771] (5) a guide strand comprising one or more backbone phosphorothioate chiral centers in Rp or Sp configuration where linkage occurs between any two adjacent nucleotides between the penultimate 3′ nucleotide of the guide strand, where N is the 3′ terminal nucleotide, and the upstream N-10 nucleotide;
[0772] (6) a passenger strand where one or more Rp, Sp, or stereorandom non-negatively charged internucleotidic linkage occurs upstream, i.e., in the 5′ direction, relative to the central nucleotide of the passenger strand;
[0773] (7) a passenger strand where one or more Rp, Sp, or stereorandom non-negatively charged internucleotidic linkage occurs downstream, i.e., in the 3′ direction, relative to the central nucleotide of the passenger strand;
[0774] (8) a passenger strand where one or more backbone phosphorothioate chiral centers in Rp or Sp configuration internucleotidic linkage occurs upstream, i.e., in the 5′ direction, relative to the central nucleotide of the passenger strand;
[0775] (9) a passenger strand where one or more backbone phosphorothioate chiral centers in Rp or Sp configuration internucleotidic linkage internucleotidic linkage occurs downstream, i.e., in the 3′ direction, relative to the central nucleotide of the passenger strand; and
[0776] (10) a passenger strand comprising one or more modified sugars, e.g. Homo-DNA, between the 5′ terminal (+1) nucleotide and the penultimate (N-1) nucleotide.

[0777] In certain embodiments, the ds oligonucleotide further comprises a 2′ modification, e.g., a 2′ F modification, of the 3′ nucleotide of a nucleotide pair linked by an Rp, Sp, or stereorandom non-negatively charged internucleotidic linkage, and the passenger strand comprises one or more backbone phosphorothioate chiral centers in Rp or Sp configuration. In certain embodiments, the one or more Rp, Sp, or stereorandom non-negatively charged internucleotidic linkage incorporated into the guide or passenger strand is an Rp non-negatively charged internucleotidic linkage. In certain embodiments, the one or more Rp, Sp, or stereorandom non-negatively charged internucleotidic linkage is an Sp non-negatively charged internucleotidic linkage. In certain embodiments, the one or more Rp, Sp, or stereorandom non-negatively charged internucleotidic linkage is a stereorandom non-negatively charged internucleotidic linkage. In certain embodiments, the ds oligonucleotides comprising a guide strand backbone phosphoryl guanidine chiral center in the Sp configuration between the +3 nucleotide and the immediately downstream (+4) nucleotide, i.e., in the 3′ direction, further comprise one or a plurality of modified sugars. In certain embodiments, the ds oligonucleotides comprising a guide strand backbone phosphoryl guanidine chiral center in the Sp configuration between the +3 nucleotide and the immediately downstream (+4) nucleotide, i.e., in the 3′ direction, comprise a modified sugar at the 5′ terminal (+1) nucleotide, second (+2) nucleotide, third (+3) nucleotide, fourth (+4) nucleotide, fifth (+5) nucleotide, sixth (+6) nucleotide, seventh (+7) nucleotide, eighth (+8) nucleotide, ninth (+9) nucleotide, tenth (+10) nucleotide, twelfth (+12) nucleotide, sixteenth (+16) nucleotide, seventeenth (+17) nucleotide, eighteenth (+18) nucleotide, nineteenth (+19) nucleotide, twentieth (+20) nucleotide, twenty-first (+21) nucleotide, twenty-second (+22), and/or twenty-third (+23), the 3′ terminal, nucleotide. In certain embodiments, the ds oligonucleotides comprising a guide strand backbone phosphoryl guanidine chiral center in the Sp configuration between the +3 nucleotide and the immediately downstream (+4) nucleotide, i.e., in the 3′ direction, comprise a modified sugar at the 5′ terminal (+1) nucleotide. In certain embodiments, the ds oligonucleotides comprising a guide strand backbone phosphoryl guanidine chiral center in the Sp configuration between the +3 nucleotide and the immediately downstream (+4) nucleotide, i.e., in the 3′ direction, comprise a modified sugar at the second (+2) nucleotide. In certain embodiments, the ds oligonucleotides comprising a guide strand backbone phosphoryl guanidine chiral center in the Sp configuration between the +3 nucleotide and the immediately downstream (+4) nucleotide, i.e., in the 3′ direction, comprise a modified sugar at the third (+3) nucleotide. In certain embodiments, the ds oligonucleotides comprising a guide strand backbone phosphoryl guanidine chiral center in the Sp configuration between the +3 nucleotide and the immediately downstream (+4) nucleotide, i.e., in the 3′ direction, comprise a modified sugar at the fourth (+4) nucleotide. In certain embodiments, the ds oligonucleotides comprising a guide strand backbone phosphoryl guanidine chiral center in the Sp configuration between the +3 nucleotide and the immediately downstream (+4) nucleotide, i.e., in the 3′ direction, comprise a modified sugar at the fifth (+5) nucleotide. In certain embodiments, the ds oligonucleotides comprising a guide strand backbone phosphoryl guanidine chiral center in the Sp configuration between the +3 nucleotide and the immediately downstream (+4) nucleotide, i.e., in the 3′ direction, comprise a modified sugar at the sixth (+6) nucleotide. In certain embodiments, the modified sugar comprises a 2′-F modification, 2′-H modification, 2′-OH modification, 2′-O-alkyl modification, e.g., 2′-O-methyl (OMe) modification, 2′-methoxyethyl (MOE) modification, 5′-alkyl modification, e.g., 5′-(R)-methyl or 5′-(S)-methyl, DNA, locked nucleic acid (LNA), unlocked nucleic acid (UNA), glycol nucleic acid (GNA), or Homo-DNA. In certain embodiments, the ds oligonucleotides comprising a guide strand backbone phosphoryl guanidine chiral center in the Sp configuration between the +3 nucleotide and the immediately downstream (+4) nucleotide, i.e., in the 3′ direction, comprise a 2′-F modification of the 5′ terminal (+1) nucleotide, second (+2) nucleotide, third (+3) nucleotide, fourth (+4) nucleotide, fifth (+5) nucleotide, and/or sixth (+6) nucleotide. In certain embodiments, the ds oligonucleotides comprising a guide strand backbone phosphoryl guanidine chiral center in the Sp configuration between the +3 nucleotide and the immediately downstream (+4) nucleotide, i.e., in the 3′ direction, comprise a 2′-F modification of the 5′ terminal (+1) nucleotide. In certain embodiments, the ds oligonucleotides comprising a guide strand backbone phosphoryl guanidine chiral center in the Sp configuration between the +3 nucleotide and the immediately downstream (+4) nucleotide, i.e., in the 3′ direction, comprise a 2′-F modification of the second (+2) nucleotide. In certain embodiments, the ds oligonucleotides comprising a guide strand backbone phosphoryl guanidine chiral center in the Sp configuration between the +3 nucleotide and the immediately downstream (+4) nucleotide, i.e., in the 3′ direction, comprise a 2′-F modification of the third (+3) nucleotide. In certain embodiments, the ds oligonucleotides comprising a guide strand backbone phosphoryl guanidine chiral center in the Sp configuration between the +3 nucleotide and the immediately downstream (+4) nucleotide, i.e., in the 3′ direction, comprise a 2′-F modification of the fourth (+4) nucleotide. In certain embodiments, the ds oligonucleotides comprising a guide strand backbone phosphoryl guanidine chiral center in the Sp configuration between the +3 nucleotide and the immediately downstream (+4) nucleotide, i.e., in the 3′ direction, comprise a 2′-F modification of the fifth (+5) nucleotide. In certain embodiments, the ds oligonucleotides comprising a guide strand backbone phosphoryl guanidine chiral center in the Sp configuration between the +3 nucleotide and the immediately downstream (+4) nucleotide, i.e., in the 3′ direction, comprise a 2′-F modification of the sixth (+6) nucleotide.

[0778] In certain embodiments, the ds oligonucleotide comprises a guide strand backbone phosphoryl guanidine chiral center in the Sp configuration between the +3 nucleotide and the immediately downstream (+4) nucleotide, i.e., in the 3′ direction, and the guide strand comprises backbone phosphorothioate chiral centers in Rp, Sp, or alternating configurations between the 5′ terminal (+1) nucleotide and the immediately downstream (+2) nucleotide and between the +2 nucleotide and the immediately downstream (+3) nucleotide, and one or more of:
[0779] (1) a guide strand where one or both of the 5′ and 3′ terminal dinucleotides are not linked by non-negatively charged internucleotidic linkages, i.e., the guide strand comprises one more non-negatively charged internucleotidic linkages downstream, i.e., in the 3′ direction, relative to the linkage between the 5′ terminal dinucleotide and/or upstream, i.e., in the 5′ direction, relative to the linkage between the 3′ terminal dinucleotide;
[0780] (2) a guide strand where one or more Rp, Sp, or stereorandom non-negatively charged internucleotidic linkage occurs between any two adjacent nucleotides between the second (+2) nucleotide relative to the 5′ terminal nucleotide of the guide strand and the penultimate 3′ (N-1) nucleotide of the guide strand, where N is the 3′ terminal nucleotide;
[0781] (3) a guide strand where an Rp, Sp, or stereorandom non-negatively charged internucleotidic linkage occurs between the tenth (+10) and eleventh (+11) nucleotides, relative to the 5′ terminal nucleotide;
[0782] (4) a guide strand where an Rp, Sp, or stereorandom non-negatively charged internucleotidic linkage occurs between the seventh (+7) and eighth (+8) nucleotides, relative to the 5′ terminal nucleotide;
[0783] (5) a guide strand comprising one or more backbone phosphorothioate chiral centers in Rp or Sp configuration where linkage occurs between any two adjacent nucleotides between the penultimate 3′ nucleotide of the guide strand, where N is the 3′ terminal nucleotide, and the upstream N-10 nucleotide;
[0784] (6) a passenger strand where one or more Rp, Sp, or stereorandom non-negatively charged internucleotidic linkage occurs upstream, i.e., in the 5′ direction, relative to the central nucleotide of the passenger strand;
[0785] (7) a passenger strand where one or more Rp, Sp, or stereorandom non-negatively charged internucleotidic linkage occurs downstream, i.e., in the 3′ direction, relative to the central nucleotide of the passenger strand;
[0786] (8) a passenger strand where one or more backbone phosphorothioate chiral centers in Rp or Sp configuration internucleotidic linkage occurs upstream, i.e., in the 5′ direction, relative to the central nucleotide of the passenger strand;
[0787] (9) a passenger strand where one or more backbone phosphorothioate chiral centers in Rp or Sp configuration internucleotidic linkage internucleotidic linkage occurs downstream, i.e., in the 3′ direction, relative to the central nucleotide of the passenger strand; and
[0788] (10) a passenger strand comprising one or more modified sugars, e.g. Homo-DNA, between the 5′ terminal (+1) nucleotide and the penultimate (N-1) nucleotide.
   wherein the ds oligonucleotide further comprises a 2′ modification, e.g., a 2′ F modification, of the 3′ nucleotide of a nucleotide pair linked by an Rp, Sp, or stereorandom non-negatively charged internucleotidic linkage, and the passenger strand comprises one or more backbone chiral centers in Rp or Sp configuration. In certain embodiments, the one or more Rp, Sp, or stereorandom non-negatively charged internucleotidic linkage incorporated into the guide or passenger strand is an Rp non-negatively charged internucleotidic linkage. In certain embodiments, the one or more Rp, Sp, or stereorandom non-negatively charged internucleotidic linkage is an Sp non-negatively charged internucleotidic linkage. In certain embodiments, the one or more Rp, Sp, or stereorandom non-negatively charged internucleotidic linkage is a stereorandom non-negatively charged internucleotidic linkage. In certain embodiments, the ds oligonucleotides comprising a guide strand backbone phosphoryl guanidine chiral center in the Sp configuration between the +3 nucleotide and the immediately downstream (+4) nucleotide, i.e., in the 3′ direction, further comprise one or a plurality of modified sugars. In certain embodiments, the ds oligonucleotides comprising a guide strand backbone phosphoryl guanidine chiral center in the Sp configuration between the +3 nucleotide and the immediately downstream (+4) nucleotide, i.e., in the 3′ direction, comprise a modified sugar at the 5′ terminal (+1) nucleotide, second (+2) nucleotide, third (+3) nucleotide, fourth (+4) nucleotide, fifth (+5) nucleotide, sixth (+6) nucleotide, seventh (+7)nucleotide, eighth (+8) nucleotide, ninth (+9) nucleotide, tenth (+10) nucleotide, twelfth (+12) nucleotide, sixteenth (+16) nucleotide, seventeenth (+17) nucleotide, eighteenth (+18) nucleotide, nineteenth (+19) nucleotide, twentieth (+20) nucleotide, twenty-first (+21) nucleotide, twenty-second (+22), and/or twenty-third (+23), the 3′ terminal, nucleotide. In certain embodiments, the ds oligonucleotides comprising a guide strand backbone phosphoryl guanidine chiral center in the Sp configuration between the +3 nucleotide and the immediately downstream (+4) nucleotide, i.e., in the 3′ direction, comprise a modified sugar at the 5′ terminal (+1) nucleotide. In certain embodiments, the ds oligonucleotides comprising a guide strand backbone phosphoryl guanidine chiral center in the Sp configuration between the +3 nucleotide and the immediately downstream (+4) nucleotide, i.e., in the 3′ direction, comprise a modified sugar at the second (+2) nucleotide. In certain embodiments, the ds oligonucleotides comprising a guide strand backbone phosphoryl guanidine chiral center in the Sp configuration between the +3 nucleotide and the immediately downstream (+4) nucleotide, i.e., in the 3′ direction, comprise a modified sugar at the third (+3) nucleotide. In certain embodiments, the ds oligonucleotides comprising a guide strand backbone phosphoryl guanidine chiral center in the Sp configuration between the +3 nucleotide and the immediately downstream (+4) nucleotide, i.e., in the 3′ direction, comprise a modified sugar at the fourth (+4) nucleotide. In certain embodiments, the ds oligonucleotides comprising a guide strand backbone phosphoryl guanidine chiral center in the Sp configuration between the +3 nucleotide and the immediately downstream (+4) nucleotide, i.e., in the 3′ direction, comprise a modified sugar at the fifth (+5) nucleotide. In certain embodiments, the ds oligonucleotides comprising a guide strand backbone phosphoryl guanidine chiral center in the Sp configuration between the +3 nucleotide and the immediately downstream (+4) nucleotide, i.e., in the 3′ direction, comprise a modified sugar at the sixth (+6) nucleotide. In certain embodiments, the modified sugar comprises a 2′-F modification, 2′-H modification, 2′-OH modification, 2′-O-alkyl modification, e.g., 2′-O-methyl (OMe) modification, 2′-methoxyethyl (MOE) modification, 5′-alkyl modification, e.g., 5′-(R)-methyl or 5′-(S)-methyl, DNA, locked nucleic acid (LNA), unlocked nucleic acid (UNA), glycol nucleic acid (GNA), or Homo-DNA. In certain embodiments, the ds oligonucleotides comprising a guide strand backbone phosphoryl guanidine chiral center in the Sp configuration between the +3 nucleotide and the immediately downstream (+4) nucleotide, i.e., in the 3′ direction, comprise a 2′-F modification of the 5′ terminal (+1) nucleotide, second (+2) nucleotide, third (+3) nucleotide, fourth (+4) nucleotide, fifth (+5) nucleotide, and/or sixth (+6) nucleotide. In certain embodiments, the ds oligonucleotides comprising a guide strand backbone phosphoryl guanidine chiral center in the Sp configuration between the +3 nucleotide and the immediately downstream (+4) nucleotide, i.e., in the 3′ direction, comprise a 2′-F modification of the 5′ terminal (+1) nucleotide. In certain embodiments, the ds oligonucleotides comprising a guide strand backbone phosphoryl guanidine chiral center in the Sp configuration between the +3 nucleotide and the immediately downstream (+4) nucleotide, i.e., in the 3′ direction, comprise a 2′-F modification of the second (+2) nucleotide. In certain embodiments, the ds oligonucleotides comprising a guide strand backbone phosphoryl guanidine chiral center in the Sp configuration between the +3 nucleotide and the immediately downstream (+4) nucleotide, i.e., in the 3′ direction, comprise a 2′-F modification of the third (+3) nucleotide. In certain embodiments, the ds oligonucleotides comprising a guide strand backbone phosphoryl guanidine chiral center in the Sp configuration between the +3 nucleotide and the immediately downstream (+4) nucleotide, i.e., in the 3′ direction, comprise a 2′-F modification of the fourth (+4) nucleotide. In certain embodiments, the ds oligonucleotides comprising a guide strand backbone phosphoryl guanidine chiral center in the Sp configuration between the +3 nucleotide and the immediately downstream (+4) nucleotide, i.e., in the 3′ direction, comprise a 2′-F modification of the fifth (+5) nucleotide. In certain embodiments, the ds oligonucleotides comprising a guide strand backbone phosphoryl guanidine chiral center in the Sp configuration between the +3 nucleotide and the immediately downstream (+4) nucleotide, i.e., in the 3′ direction, comprise a 2′-F modification of the sixth (+6) nucleotide.

[0789] In certain embodiments, the ds oligonucleotide comprises a guide strand backbone phosphoryl guanidine chiral center in the Sp configuration between the +3 nucleotide and the immediately downstream (+4) nucleotide, i.e., in the 3′ direction, and the guide strand further comprises one or more backbone phosphorothioate chiral centers in Rp or Sp configuration upstream of backbone chiral centers in Sp configuration between the 3′ terminal nucleotide and the penultimate (N-1) nucleotide and as between the penultimate (N-1) nucleotide and the immediately upstream (N-2) nucleotide, and one or more of.
[0790] (1) a guide strand where one or both of the 5′ and 3′ terminal dinucleotides are not linked by non-negatively charged internucleotidic linkages, i.e., the guide strand comprises one more non-negatively charged internucleotidic linkages downstream, i.e., in the 3′ direction, relative to the linkage between the 5′ terminal dinucleotide and/or upstream, i.e., in the 5′ direction, relative to the linkage between the 3′ terminal dinucleotide;
[0791] (2) a guide strand where one or more Rp, Sp, or stereorandom non-negatively charged internucleotidic linkage occurs between any two adjacent nucleotides between the second (+2) nucleotide relative to the 5′ terminal nucleotide of the guide strand and the penultimate 3′ (N-1) nucleotide of the guide strand, where N is the 3′ terminal nucleotide;
[0792] (3) a guide strand where an Rp, Sp, or stereorandom non-negatively charged internucleotidic linkage occurs between the tenth (+10) and eleventh (+11) nucleotides, relative to the 5′ terminal nucleotide;
[0793] (4) a guide strand where an Rp, Sp, or stereorandom non-negatively charged internucleotidic linkage occurs between the seventh (+7) and eighth (+8) nucleotides, relative to the 5′ terminal nucleotide;
[0794] (5) a guide strand comprising one or more backbone phosphorothioate chiral centers in Rp or Sp configuration where linkage occurs between any two adjacent nucleotides between the penultimate 3′ nucleotide of the guide strand, where N is the 3′ terminal nucleotide, and the upstream N-10 nucleotide;
[0795] (6) a passenger strand where one or more Rp, Sp, or stereorandom non-negatively charged internucleotidic linkage occurs upstream, i.e., in the 5′ direction, relative to the central nucleotide of the passenger strand;
[0796] (7) a passenger strand where one or more Rp, Sp, or stereorandom non-negatively charged internucleotidic linkage occurs downstream, i.e., in the 3′ direction, relative to the central nucleotide of the passenger strand;
[0797] (8) a passenger strand where one or more backbone phosphorothioate chiral centers in Rp or Sp configuration internucleotidic linkage occurs upstream, i.e., in the 5′ direction, relative to the central nucleotide of the passenger strand;
[0798] (9) a passenger strand where one or more backbone phosphorothioate chiral centers in Rp or Sp configuration internucleotidic linkage internucleotidic linkage occurs downstream, i.e., in the 3′ direction, relative to the central nucleotide of the passenger strand; and
[0799] (10) a passenger strand comprising one or more modified sugars, e.g. Homo-DNA, between the 5′ terminal (+1) nucleotide and the penultimate (N-1) nucleotide.

[0800] In certain embodiments, the ds oligonucleotide further comprises a 2′ modification, e.g., a 2′ F modification, of the 3′ nucleotide of a nucleotide pair linked by an Rp, Sp, or stereorandom non-negatively charged internucleotidic linkage, and the passenger strand comprises one or more backbone chiral centers in Rp or Sp configuration. In certain embodiments, the one or more Rp, Sp, or stereorandom non-negatively charged internucleotidic linkage incorporated into the guide or passenger strand is an Rp non-negatively charged internucleotidic linkage. In certain embodiments, the one or more Rp, Sp, or stereorandom non-negatively charged internucleotidic linkage is an Sp non-negatively charged internucleotidic linkage. In certain embodiments, the one or more Rp, Sp, or stereorandom non-negatively charged internucleotidic linkage is a stereorandom non-negatively charged internucleotidic linkage. In certain embodiments, the ds oligonucleotides comprising a guide strand backbone phosphoryl guanidine chiral center in the Sp configuration between the +3 nucleotide and the immediately downstream (+4) nucleotide, i.e., in the 3′ direction, further comprise one or a plurality of modified sugars. In certain embodiments, the ds oligonucleotides comprising a guide strand backbone phosphoryl guanidine chiral center in the Sp configuration between the +3 nucleotide and the immediately downstream (+4) nucleotide, i.e., in the 3′ direction, comprise a modified sugar at the 5′ terminal (+1) nucleotide, second (+2) nucleotide, third (+3) nucleotide, fourth (+4) nucleotide, fifth (+5) nucleotide, sixth (+6) nucleotide, seventh (+7) nucleotide, eighth (+8) nucleotide, ninth (+9) nucleotide, tenth (+10) nucleotide, twelfth (+12) nucleotide, sixteenth (+16) nucleotide, seventeenth (+17) nucleotide, eighteenth (+18) nucleotide, nineteenth (+19) nucleotide, twentieth (+20) nucleotide, twenty-first (+21) nucleotide, twenty-second (+22), and/or twenty-third (+23), the 3′ terminal, nucleotide. In certain embodiments, the ds oligonucleotides comprising a guide strand backbone phosphoryl guanidine chiral center in the Sp configuration between the +3 nucleotide and the immediately downstream (+4) nucleotide, i.e., in the 3′ direction, comprise a modified sugar at the 5′ terminal (+1) nucleotide. In certain embodiments, the ds oligonucleotides comprising a guide strand backbone phosphoryl guanidine chiral center in the Sp configuration between the +3 nucleotide and the immediately downstream (+4) nucleotide, i.e., in the 3′ direction, comprise a modified sugar at the second (+2) nucleotide. In certain embodiments, the ds oligonucleotides comprising a guide strand backbone phosphoryl guanidine chiral center in the Sp configuration between the +3 nucleotide and the immediately downstream (+4) nucleotide, i.e., in the 3′ direction, comprise a modified sugar at the third (+3) nucleotide. In certain embodiments, the ds oligonucleotides comprising a guide strand backbone phosphoryl guanidine chiral center in the Sp configuration between the +3 nucleotide and the immediately downstream (+4) nucleotide, i.e., in the 3′ direction, comprise a modified sugar at the fourth (+4) nucleotide. In certain embodiments, the ds oligonucleotides comprising a guide strand backbone phosphoryl guanidine chiral center in the Sp configuration between the +3 nucleotide and the immediately downstream (+4) nucleotide, i.e., in the 3′ direction, comprise a modified sugar at the fifth (+5) nucleotide. In certain embodiments, the ds oligonucleotides comprising a guide strand backbone phosphoryl guanidine chiral center in the Sp configuration between the +3 nucleotide and the immediately downstream (+4) nucleotide, i.e., in the 3′ direction, comprise a modified sugar at the sixth (+6) nucleotide. In certain embodiments, the modified sugar comprises a 2′-F modification, 2′-H modification, 2′-OH modification, 2′-O-alkyl modification, e.g., 2′-O-methyl (OMe) modification, 2′-methoxyethyl (MOE) modification, 5′-alkyl modification, e.g., 5′-(R)-methyl or 5′-(S)-methyl, DNA, locked nucleic acid (LNA), unlocked nucleic acid (UNA), glycol nucleic acid (GNA), or Homo-DNA. In certain embodiments, the ds oligonucleotides comprising a guide strand backbone phosphoryl guanidine chiral center in the Sp configuration between the +3 nucleotide and the immediately downstream (+4) nucleotide, i.e., in the 3′ direction, comprise a 2′-F modification of the 5′ terminal (+1) nucleotide, second (+2) nucleotide, third (+3) nucleotide, fourth (+4) nucleotide, fifth (+5) nucleotide, and/or sixth (+6) nucleotide. In certain embodiments, the ds oligonucleotides comprising a guide strand backbone phosphoryl guanidine chiral center in the Sp configuration between the +3 nucleotide and the immediately downstream (+4) nucleotide, i.e., in the 3′ direction, comprise a 2′-F modification of the 5′ terminal (+1) nucleotide. In certain embodiments, the ds oligonucleotides comprising a guide strand backbone phosphoryl guanidine chiral center in the Sp configuration between the +3 nucleotide and the immediately downstream (+4) nucleotide, i.e., in the 3′ direction, comprise a 2′-F modification of the second (+2) nucleotide. In certain embodiments, the ds oligonucleotides comprising a guide strand backbone phosphoryl guanidine chiral center in the Sp configuration between the +3 nucleotide and the immediately downstream (+4) nucleotide, i.e., in the 3′ direction, comprise a 2′-F modification of the third (+3) nucleotide. In certain embodiments, the ds oligonucleotides comprising a guide strand backbone phosphoryl guanidine chiral center in the Sp configuration between the +3 nucleotide and the immediately downstream (+4) nucleotide, i.e., in the 3′ direction, comprise a 2′-F modification of the fourth (+4) nucleotide. In certain embodiments, the ds oligonucleotides comprising a guide strand backbone phosphoryl guanidine chiral center in the Sp configuration between the +3 nucleotide and the immediately downstream (+4) nucleotide, i.e., in the 3′ direction, comprise a 2′-F modification of the fifth (+5) nucleotide. In certain embodiments, the ds oligonucleotides comprising a guide strand backbone phosphoryl guanidine chiral center in the Sp configuration between the +3 nucleotide and the immediately downstream (+4) nucleotide, i.e., in the 3′ direction, comprise a 2′-F modification of the sixth (+6) nucleotide.

[0801] In certain embodiments, the ds oligonucleotide comprises a guide strand backbone phosphoryl guanidine chiral center in the Sp configuration between the +3 nucleotide and the immediately downstream (+4) nucleotide, i.e., in the 3′ direction, and the guide strand further comprises one or more backbone phosphorothioate chiral centers in Rp or Sp configuration between the 5′ terminal (+1) nucleotide and the immediately downstream (+2) nucleotide and between the (+2) nucleotide and the immediately downstream (+3) nucleotide, as well as between the (+5) nucleotide and the (+6) nucleotide, and one or more of
[0802] (1) a guide strand where one or both of the 5′ and 3′ terminal dinucleotides are not linked by non-negatively charged internucleotidic linkages, i.e., the guide strand comprises one more non-negatively charged internucleotidic linkages downstream, i.e., in the 3′ direction, relative to the linkage between the 5′ terminal dinucleotide and/or upstream, i.e., in the 5′ direction, relative to the linkage between the 3′ terminal dinucleotide;
[0803] (2) a guide strand where one or more Rp, Sp, or stereorandom non-negatively charged internucleotidic linkage occurs between any two adjacent nucleotides between the second (+2) nucleotide relative to the 5′ terminal nucleotide of the guide strand and the penultimate 3′ (N-1) nucleotide of the guide strand, where N is the 3′ terminal nucleotide;
[0804] (3) a guide strand where an Rp, Sp, or stereorandom non-negatively charged internucleotidic linkage occurs between the tenth (+10) and eleventh (+11) nucleotides, relative to the 5′ terminal nucleotide;
[0805] (4) a guide strand where an Rp, Sp, or stereorandom non-negatively charged internucleotidic linkage occurs between the seventh (+7) and eighth (+8) nucleotides, relative to the 5′ terminal nucleotide;
[0806] (5) a guide strand comprising one or more backbone phosphorothioate chiral centers in Rp or Sp configuration where linkage occurs between any two adjacent nucleotides between the penultimate 3′ nucleotide of the guide strand, where N is the 3′ terminal nucleotide, and the upstream N-10 nucleotide;
[0807] (6) a passenger strand where one or more Rp, Sp, or stereorandom non-negatively charged internucleotidic linkage occurs upstream, i.e., in the 5′ direction, relative to the central nucleotide of the passenger strand;
[0808] (7) a passenger strand where one or more Rp, Sp, or stereorandom non-negatively charged internucleotidic linkage occurs downstream, i.e., in the 3′ direction, relative to the central nucleotide of the passenger strand;
[0809] (8) a passenger strand where one or more backbone phosphorothioate chiral centers in Rp or Sp configuration internucleotidic linkage occurs upstream, i.e., in the 5′ direction, relative to the central nucleotide of the passenger strand;
[0810] (9) a passenger strand where one or more backbone phosphorothioate chiral centers in Rp or Sp configuration internucleotidic linkage internucleotidic linkage occurs downstream, i.e., in the 3′ direction, relative to the central nucleotide of the passenger strand; and
[0811] (10) a passenger strand comprising one or more modified sugars, e.g. Homo-DNA, between the 5′ terminal (+1) nucleotide and the penultimate (N-1) nucleotide.

[0812] In certain embodiments, the ds oligonucleotide further comprises a 2′ modification, e.g., a 2′ F modification, of the 3′ nucleotide of a nucleotide pair linked by an Rp, Sp, or stereorandom non-negatively charged internucleotidic linkage, and the passenger strand comprises one or more backbone chiral centers in Rp or Sp configuration. In certain embodiments, the one or more Rp, Sp, or stereorandom non-negatively charged internucleotidic linkage incorporated into the guide or passenger strand is an Rp non-negatively charged internucleotidic linkage. In certain embodiments, the one or more Rp, Sp, or stereorandom non-negatively charged internucleotidic linkage is an Sp non-negatively charged internucleotidic linkage. In certain embodiments, the one or more Rp, Sp, or stereorandom non-negatively charged internucleotidic linkage is a stereorandom non-negatively charged internucleotidic linkage. In certain embodiments, the ds oligonucleotides comprising a guide strand backbone phosphoryl guanidine chiral center in the Sp configuration between the +3 nucleotide and the immediately downstream (+4) nucleotide, i.e., in the 3′ direction, further comprise one or a plurality of modified sugars. In certain embodiments, the ds oligonucleotides comprising a guide strand backbone phosphoryl guanidine chiral center in the Sp configuration between the +3 nucleotide and the immediately downstream (+4) nucleotide, i.e., in the 3′ direction, comprise a modified sugar at the 5′ terminal (+1) nucleotide, second (+2) nucleotide, third (+3) nucleotide, fourth (+4) nucleotide, fifth (+5) nucleotide, sixth (+6) nucleotide, seventh (+7) nucleotide, eighth (+8) nucleotide, ninth (+9) nucleotide, tenth (+10) nucleotide, twelfth (+12) nucleotide, sixteenth (+16) nucleotide, seventeenth (+17) nucleotide, eighteenth (+18) nucleotide, nineteenth (+19) nucleotide, twentieth (+20) nucleotide, twenty-first (+21) nucleotide, twenty-second (+22), and/or twenty-third (+23), the 3′ terminal, nucleotide. In certain embodiments, the ds oligonucleotides comprising a guide strand backbone phosphoryl guanidine chiral center in the Sp configuration between the +3 nucleotide and the immediately downstream (+4) nucleotide, i.e., in the 3′ direction, comprise a modified sugar at the 5′ terminal (+1) nucleotide. In certain embodiments, the ds oligonucleotides comprising a guide strand backbone phosphoryl guanidine chiral center in the Sp configuration between the +3 nucleotide and the immediately downstream (+4) nucleotide, i.e., in the 3′ direction, comprise a modified sugar at the second (+2) nucleotide. In certain embodiments, the ds oligonucleotides comprising a guide strand backbone phosphoryl guanidine chiral center in the Sp configuration between the +3 nucleotide and the immediately downstream (+4) nucleotide, i.e., in the 3′ direction, comprise a modified sugar at the third (+3) nucleotide. In certain embodiments, the ds oligonucleotides comprising a guide strand backbone phosphoryl guanidine chiral center in the Sp configuration between the +3 nucleotide and the immediately downstream (+4) nucleotide, i.e., in the 3′ direction, comprise a modified sugar at the fourth (+4) nucleotide. In certain embodiments, the ds oligonucleotides comprising a guide strand backbone phosphoryl guanidine chiral center in the Sp configuration between the +3 nucleotide and the immediately downstream (+4) nucleotide, i.e., in the 3′ direction, comprise a modified sugar at the fifth (+5) nucleotide. In certain embodiments, the ds oligonucleotides comprising a guide strand backbone phosphoryl guanidine chiral center in the Sp configuration between the +3 nucleotide and the immediately downstream (+4) nucleotide, i.e., in the 3′ direction, comprise a modified sugar at the sixth (+6) nucleotide. In certain embodiments, the modified sugar comprises a 2′-F modification, 2′-H modification, 2′-OH modification, 2′-O-alkyl modification, e.g., 2′-O— methyl (OMe) modification, 2′-methoxyethyl (MOE) modification, 5′-alkyl modification, e.g., 5′-(R)-methyl or 5′-(S)-methyl, DNA, locked nucleic acid (LNA), unlocked nucleic acid (UNA), glycol nucleic acid (GNA), or Homo-DNA. In certain embodiments, the ds oligonucleotides comprising a guide strand backbone phosphoryl guanidine chiral center in the Sp configuration between the +3 nucleotide and the immediately downstream (+4) nucleotide, i.e., in the 3′ direction, comprise a 2′-F modification of the 5′ terminal (+1) nucleotide, second (+2) nucleotide, third (+3) nucleotide, fourth (+4) nucleotide, fifth (+5) nucleotide, and/or sixth (+6) nucleotide. In certain embodiments, the ds oligonucleotides comprising a guide strand backbone phosphoryl guanidine chiral center in the Sp configuration between the +3 nucleotide and the immediately downstream (+4) nucleotide, i.e., in the 3′ direction, comprise a 2′-F modification of the 5′ terminal (+1) nucleotide. In certain embodiments, the ds oligonucleotides comprising a guide strand backbone phosphoryl guanidine chiral center in the Sp configuration between the +3 nucleotide and the immediately downstream (+4) nucleotide, i.e., in the 3′ direction, comprise a 2′-F modification of the second (+2) nucleotide. In certain embodiments, the ds oligonucleotides comprising a guide strand backbone phosphoryl guanidine chiral center in the Sp configuration between the +3 nucleotide and the immediately downstream (+4) nucleotide, i.e., in the 3′ direction, comprise a 2′-F modification of the third (+3) nucleotide. In certain embodiments, the ds oligonucleotides comprising a guide strand backbone phosphoryl guanidine chiral center in the Sp configuration between the +3 nucleotide and the immediately downstream (+4) nucleotide, i.e., in the 3′ direction, comprise a 2′-F modification of the fourth (+4) nucleotide. In certain embodiments, the ds oligonucleotides comprising a guide strand backbone phosphoryl guanidine chiral center in the Sp configuration between the +3 nucleotide and the immediately downstream (+4) nucleotide, i.e., in the 3′ direction, comprise a 2′-F modification of the fifth (+5) nucleotide. In certain embodiments, the ds oligonucleotides comprising a guide strand backbone phosphoryl guanidine chiral center in the Sp configuration between the +3 nucleotide and the immediately downstream (+4) nucleotide, i.e., in the 3′ direction, comprise a 2′-F modification of the sixth (+6) nucleotide.

[0813] In certain embodiments, the ds oligonucleotide comprises a guide strand backbone phosphoryl guanidine chiral center in the Sp configuration between the +3 nucleotide and the immediately downstream (+4) nucleotide, i.e., in the 3′ direction, and the guide strand further comprises one or more Rp, Sp, or stereorandom non-negatively charged internucleotidic linkage occurs between any two adjacent nucleotides between the second (+2) nucleotide relative to the 5′ terminal nucleotide of the guide strand and the penultimate 3′ (N-1) nucleotide of the guide strand, where N is the 3′ terminal nucleotide, a 2′ modification, e.g., a 2′ F modification, of the 3′ nucleotide of a nucleotide pair linked by an Rp, Sp, or stereorandom non-negatively charged internucleotidic linkage, and the passenger strand comprises one or more backbone chiral centers in Rp or Sp configuration. In certain embodiments, the one or more Rp, Sp, or stereorandom non-negatively charged internucleotidic linkage incorporated into the guide strand is an Rp non-negatively charged internucleotidic linkage. In certain embodiments, the one or more Rp, Sp, or stereorandom non-negatively charged internucleotidic linkage is an Sp non-negatively charged internucleotidic linkage. In certain embodiments, the one or more Rp, Sp, or stereorandom non-negatively charged internucleotidic linkage is a stereorandom non-negatively charged internucleotidic linkage. In certain embodiments, the ds oligonucleotides comprising a guide strand backbone phosphoryl guanidine chiral center in the Sp configuration between the +3 nucleotide and the immediately downstream (+4) nucleotide, i.e., in the 3′ direction, further comprise one or a plurality of modified sugars. In certain embodiments, the ds oligonucleotides comprising a guide strand backbone phosphoryl guanidine chiral center in the Sp configuration between the +3 nucleotide and the immediately downstream (+4) nucleotide, i.e., in the 3′ direction, comprise a modified sugar at the 5′ terminal (+1) nucleotide, second (+2) nucleotide, third (+3) nucleotide, fourth (+4) nucleotide, fifth (+5) nucleotide, sixth (+6) nucleotide, seventh (+7) nucleotide, eighth (+8) nucleotide, ninth (+9) nucleotide, tenth (+10) nucleotide, twelfth (+12) nucleotide, sixteenth (+16) nucleotide, seventeenth (+17) nucleotide, eighteenth (+18) nucleotide, nineteenth (+19) nucleotide, twentieth (+20) nucleotide, twenty-first (+21) nucleotide, twenty-second (+22), and/or twenty-third (+23), the 3′ terminal, nucleotide. In certain embodiments, the ds oligonucleotides comprising a guide strand backbone phosphoryl guanidine chiral center in the Sp configuration between the +3 nucleotide and the immediately downstream (+4) nucleotide, i.e., in the 3′ direction, comprise a modified sugar at the 5′ terminal (+1) nucleotide. In certain embodiments, the ds oligonucleotides comprising a guide strand backbone phosphoryl guanidine chiral center in the Sp configuration between the +3 nucleotide and the immediately downstream (+4) nucleotide, i.e., in the 3′ direction, comprise a modified sugar at the second (+2) nucleotide. In certain embodiments, the ds oligonucleotides comprising a guide strand backbone phosphoryl guanidine chiral center in the Sp configuration between the +3 nucleotide and the immediately downstream (+4) nucleotide, i.e., in the 3′ direction, comprise a modified sugar at the third (+3) nucleotide. In certain embodiments, the ds oligonucleotides comprising a guide strand backbone phosphoryl guanidine chiral center in the Sp configuration between the +3 nucleotide and the immediately downstream (+4) nucleotide, i.e., in the 3′ direction, comprise a modified sugar at the fourth (+4) nucleotide. In certain embodiments, the ds oligonucleotides comprising a guide strand backbone phosphoryl guanidine chiral center in the Sp configuration between the +3 nucleotide and the immediately downstream (+4) nucleotide, i.e., in the 3′ direction, comprise a modified sugar at the fifth (+5) nucleotide. In certain embodiments, the ds oligonucleotides comprising a guide strand backbone phosphoryl guanidine chiral center in the Sp configuration between the +3 nucleotide and the immediately downstream (+4) nucleotide, i.e., in the 3′ direction, comprise a modified sugar at the sixth (+6) nucleotide. In certain embodiments, the modified sugar comprises a 2′-F modification, 2′-H modification, 2′-OH modification, 2′-O-alkyl modification, e.g., 2′-O— methyl (OMe) modification, 2′-methoxyethyl (MOE) modification, 5′-alkyl modification, e.g., 5′-(R)-methyl or 5′-(S)-methyl, DNA, locked nucleic acid (LNA), unlocked nucleic acid (UNA), glycol nucleic acid (GNA), or Homo-DNA. In certain embodiments, the ds oligonucleotides comprising a guide strand backbone phosphoryl guanidine chiral center in the Sp configuration between the +3 nucleotide and the immediately downstream (+4) nucleotide, i.e., in the 3′ direction, comprise a 2′-F modification of the 5′ terminal (+1) nucleotide, second (+2) nucleotide, third (+3) nucleotide, fourth (+4) nucleotide, fifth (+5) nucleotide, and/or sixth (+6) nucleotide. In certain embodiments, the ds oligonucleotides comprising a guide strand backbone phosphoryl guanidine chiral center in the Sp configuration between the +3 nucleotide and the immediately downstream (+4) nucleotide, i.e., in the 3′ direction, comprise a 2′-F modification of the 5′ terminal (+1) nucleotide. In certain embodiments, the ds oligonucleotides comprising a guide strand backbone phosphoryl guanidine chiral center in the Sp configuration between the +3 nucleotide and the immediately downstream (+4) nucleotide, i.e., in the 3′ direction, comprise a 2′-F modification of the second (+2) nucleotide. In certain embodiments, the ds oligonucleotides comprising a guide strand backbone phosphoryl guanidine chiral center in the Sp configuration between the +3 nucleotide and the immediately downstream (+4) nucleotide, i.e., in the 3′ direction, comprise a 2′-F modification of the third (+3) nucleotide. In certain embodiments, the ds oligonucleotides comprising a guide strand backbone phosphoryl guanidine chiral center in the Sp configuration between the +3 nucleotide and the immediately downstream (+4) nucleotide, i.e., in the 3′ direction, comprise a 2′-F modification of the fourth (+4) nucleotide. In certain embodiments, the ds oligonucleotides comprising a guide strand backbone phosphoryl guanidine chiral center in the Sp configuration between the +3 nucleotide and the immediately downstream (+4) nucleotide, i.e., in the 3′ direction, comprise a 2′-F modification of the fifth (+5) nucleotide. In certain embodiments, the ds oligonucleotides comprising a guide strand backbone phosphoryl guanidine chiral center in the Sp configuration between the +3 nucleotide and the immediately downstream (+4) nucleotide, i.e., in the 3′ direction, comprise a 2′-F modification of the sixth (+6) nucleotide.

[0814] In certain embodiments, the ds oligonucleotide comprises a guide strand backbone phosphoryl guanidine chiral center in the Sp configuration between the +3 nucleotide and the immediately downstream (+4) nucleotide, i.e., in the 3′ direction, and the guide strand further comprises backbone phosphorothioate chiral centers in Sp configuration between the 3′ terminal nucleotide and the penultimate (N-1) nucleotide and as between the penultimate (N-1) nucleotide and the immediately upstream (N-2) nucleotide, a 2′ modification, e.g., a 2′ F modification, of the 3′ nucleotide of a nucleotide pair linked by an Rp, Sp, or stereorandom non-negatively charged internucleotidic linkage, and the passenger strand comprises 0-n Rp, Sp, or stereorandom non-negatively charged internucleotidic linkages, where n is about 1 to 49 and one or more backbone chiral centers in Rp or Sp configuration.

[0815] In certain embodiments, the ds oligonucleotides comprising a guide strand backbone phosphoryl guanidine chiral center in the Sp configuration between the +3 nucleotide and the immediately downstream (+4) nucleotide, i.e., in the 3′ direction, further comprise one or a plurality of modified sugars. In certain embodiments, the ds oligonucleotides comprising a guide strand backbone phosphoryl guanidine chiral center in the Sp configuration between the +3 nucleotide and the immediately downstream (+4) nucleotide, i.e., in the 3′ direction, comprise a modified sugar at the 5′ terminal (+1) nucleotide, second (+2) nucleotide, third (+3) nucleotide, fourth (+4) nucleotide, fifth (+5) nucleotide, sixth (+6) nucleotide, seventh (+7) nucleotide, eighth (+8) nucleotide, ninth (+9) nucleotide, tenth (+10) nucleotide, twelfth (+12) nucleotide, sixteenth (+16) nucleotide, seventeenth (+17) nucleotide, eighteenth (+18) nucleotide, nineteenth (+19) nucleotide, twentieth (+20) nucleotide, twenty-first (+21) nucleotide, twenty-second (+22), and/or twenty-third (+23), the 3′ terminal, nucleotide. In certain embodiments, the ds oligonucleotides comprising a guide strand backbone phosphoryl guanidine chiral center in the Sp configuration between the +3 nucleotide and the immediately downstream (+4) nucleotide, i.e., in the 3′ direction, comprise a modified sugar at the 5′ terminal (+1) nucleotide. In certain embodiments, the ds oligonucleotides comprising a guide strand backbone phosphoryl guanidine chiral center in the Sp configuration between the +3 nucleotide and the immediately downstream (+4) nucleotide, i.e., in the 3′ direction, comprise a modified sugar at the second (+2) nucleotide. In certain embodiments, the ds oligonucleotides comprising a guide strand backbone phosphoryl guanidine chiral center in the Sp configuration between the +3 nucleotide and the immediately downstream (+4) nucleotide, i.e., in the 3′ direction, comprise a modified sugar at the third (+3) nucleotide. In certain embodiments, the ds oligonucleotides comprising a guide strand backbone phosphoryl guanidine chiral center in the Sp configuration between the +3 nucleotide and the immediately downstream (+4) nucleotide, i.e., in the 3′ direction, comprise a modified sugar at the fourth (+4) nucleotide. In certain embodiments, the ds oligonucleotides comprising a guide strand backbone phosphoryl guanidine chiral center in the Sp configuration between the +3 nucleotide and the immediately downstream (+4) nucleotide, i.e., in the 3′ direction, comprise a modified sugar at the fifth (+5) nucleotide. In certain embodiments, the ds oligonucleotides comprising a guide strand backbone phosphoryl guanidine chiral center in the Sp configuration between the +3 nucleotide and the immediately downstream (+4) nucleotide, i.e., in the 3′ direction, comprise a modified sugar at the sixth (+6) nucleotide. In certain embodiments, the modified sugar comprises a 2′-F modification, 2′-H modification, 2′-OH modification, 2′-O-alkyl modification, e.g., 2′-O— methyl (OMe) modification, 2′-methoxyethyl (MOE) modification, 5′-alkyl modification, e.g., 5′-(R)-methyl or 5′-(S)-methyl, DNA, locked nucleic acid (LNA), unlocked nucleic acid (UNA), glycol nucleic acid (GNA), or Homo-DNA. In certain embodiments, the ds oligonucleotides comprising a guide strand backbone phosphoryl guanidine chiral center in the Sp configuration between the +3 nucleotide and the immediately downstream (+4) nucleotide, i.e., in the 3′ direction, comprise a 2′-F modification of the 5′ terminal (+1) nucleotide, second (+2) nucleotide, third (+3) nucleotide, fourth (+4) nucleotide, fifth (+5) nucleotide, and/or sixth (+6) nucleotide. In certain embodiments, the ds oligonucleotides comprising a guide strand backbone phosphoryl guanidine chiral center in the Sp configuration between the +3 nucleotide and the immediately downstream (+4) nucleotide, i.e., in the 3′ direction, comprise a 2′-F modification of the 5′ terminal (+1) nucleotide. In certain embodiments, the ds oligonucleotides comprising a guide strand backbone phosphoryl guanidine chiral center in the Sp configuration between the +3 nucleotide and the immediately downstream (+4) nucleotide, i.e., in the 3′ direction, comprise a 2′-F modification of the second (+2) nucleotide. In certain embodiments, the ds oligonucleotides comprising a guide strand backbone phosphoryl guanidine chiral center in the Sp configuration between the +3 nucleotide and the immediately downstream (+4) nucleotide, i.e., in the 3′ direction, comprise a 2′-F modification of the third (+3) nucleotide. In certain embodiments, the ds oligonucleotides comprising a guide strand backbone phosphoryl guanidine chiral center in the Sp configuration between the +3 nucleotide and the immediately downstream (+4) nucleotide, i.e., in the 3′ direction, comprise a 2′-F modification of the fourth (+4) nucleotide. In certain embodiments, the ds oligonucleotides comprising a guide strand backbone phosphoryl guanidine chiral center in the Sp configuration between the +3 nucleotide and the immediately downstream (+4) nucleotide, i.e., in the 3′ direction, comprise a 2′-F modification of the fifth (+5) nucleotide. In certain embodiments, the ds oligonucleotides comprising a guide strand backbone phosphoryl guanidine chiral center in the Sp configuration between the +3 nucleotide and the immediately downstream (+4) nucleotide, i.e., in the 3′ direction, comprise a 2′-F modification of the sixth (+6) nucleotide.

[0816] In certain embodiments, the one or more Rp, Sp, or stereorandom non-negatively charged internucleotidic linkage incorporated into the guide strand is an Rp non-negatively charged internucleotidic linkage. In certain embodiments, the one or more Rp, Sp, or stereorandom non-negatively charged internucleotidic linkage is an Sp non-negatively charged internucleotidic linkage. In certain embodiments, the one or more Rp, Sp, or stereorandom non-negatively charged internucleotidic linkage is a stereorandom non-negatively charged internucleotidic linkage. In certain further embodiments, the passenger strand comprises an Sp backbone phosphorothioate chiral center between the 5′ terminal (+1) nucleotide and the immediately downstream (+2) nucleotide and an Sp backbone phosphorothioate chiral center between the penultimate (N-1) nucleotide and the 3′ terminal (N) nucleotide.

[0817] In certain embodiments, the ds oligonucleotide comprises a guide strand backbone phosphoryl guanidine chiral center in the Sp configuration between the +3 nucleotide and the immediately downstream (+4) nucleotide, i.e., in the 3′ direction, and the guide strand further comprises backbone phosphorothioate chiral centers in Rp, Sp, or alternating configurations between the 5′ terminal (+1) nucleotide and the immediately downstream (+2) nucleotide and between the +2 nucleotide and the immediately downstream (+3) nucleotide, a 2′ modification, e.g., a 2′ F modification, of the 3′ nucleotide of a nucleotide pair linked by an Rp, Sp, or stereorandom non-negatively charged internucleotidic linkage, and the passenger strand comprises 0-n Rp, Sp, or stereorandom non-negatively charged internucleotidic linkages, where n is about 1 to 49 and one or more backbone chiral centers in Rp or Sp configuration.

[0818] In certain embodiments, the ds oligonucleotides comprising a guide strand backbone phosphoryl guanidine chiral center in the Sp configuration between the +3 nucleotide and the immediately downstream (+4) nucleotide, i.e., in the 3′ direction, further comprise one or a plurality of modified sugars. In certain embodiments, the ds oligonucleotides comprising a guide strand backbone phosphoryl guanidine chiral center in the Sp configuration between the +3 nucleotide and the immediately downstream (+4) nucleotide, i.e., in the 3′ direction, comprise a modified sugar at the 5′ terminal (+1) nucleotide, second (+2) nucleotide, third (+3) nucleotide, fourth (+4) nucleotide, fifth (+5) nucleotide, sixth (+6) nucleotide, seventh (+7) nucleotide, eighth (+8) nucleotide, ninth (+9) nucleotide, tenth (+10) nucleotide, twelfth (+12) nucleotide, sixteenth (+16) nucleotide, seventeenth (+17) nucleotide, eighteenth (+18) nucleotide, nineteenth (+19) nucleotide, twentieth (+20) nucleotide, twenty-first (+21) nucleotide, twenty-second (+22), and/or twenty-third (+23), the 3′ terminal, nucleotide. In certain embodiments, the ds oligonucleotides comprising a guide strand backbone phosphoryl guanidine chiral center in the Sp configuration between the +3 nucleotide and the immediately downstream (+4) nucleotide, i.e., in the 3′ direction, comprise a modified sugar at the 5′ terminal (+1) nucleotide. In certain embodiments, the ds oligonucleotides comprising a guide strand backbone phosphoryl guanidine chiral center in the Sp configuration between the +3 nucleotide and the immediately downstream (+4) nucleotide, i.e., in the 3′ direction, comprise a modified sugar at the second (+2) nucleotide. In certain embodiments, the ds oligonucleotides comprising a guide strand backbone phosphoryl guanidine chiral center in the Sp configuration between the +3 nucleotide and the immediately downstream (+4) nucleotide, i.e., in the 3′ direction, comprise a modified sugar at the third (+3) nucleotide. In certain embodiments, the ds oligonucleotides comprising a guide strand backbone phosphoryl guanidine chiral center in the Sp configuration between the +3 nucleotide and the immediately downstream (+4) nucleotide, i.e., in the 3′ direction, comprise a modified sugar at the fourth (+4) nucleotide. In certain embodiments, the ds oligonucleotides comprising a guide strand backbone phosphoryl guanidine chiral center in the Sp configuration between the +3 nucleotide and the immediately downstream (+4) nucleotide, i.e., in the 3′ direction, comprise a modified sugar at the fifth (+5) nucleotide. In certain embodiments, the ds oligonucleotides comprising a guide strand backbone phosphoryl guanidine chiral center in the Sp configuration between the +3 nucleotide and the immediately downstream (+4) nucleotide, i.e., in the 3′ direction, comprise a modified sugar at the sixth (+6) nucleotide. In certain embodiments, the modified sugar comprises a 2′-F modification, 2′-H modification, 2′-OH modification, 2′-O-alkyl modification, e.g., 2′-O— methyl (OMe) modification, 2′-methoxyethyl (MOE) modification, 5′-alkyl modification, e.g., 5′-(R)-methyl or 5′-(S)-methyl, DNA, locked nucleic acid (LNA), unlocked nucleic acid (UNA), glycol nucleic acid (GNA), or Homo-DNA. In certain embodiments, the ds oligonucleotides comprising a guide strand backbone phosphoryl guanidine chiral center in the Sp configuration between the +3 nucleotide and the immediately downstream (+4) nucleotide, i.e., in the 3′ direction, comprise a 2′-F modification of the 5′ terminal (+1) nucleotide, second (+2) nucleotide, third (+3) nucleotide, fourth (+4) nucleotide, fifth (+5) nucleotide, and/or sixth (+6) nucleotide. In certain embodiments, the ds oligonucleotides comprising a guide strand backbone phosphoryl guanidine chiral center in the Sp configuration between the +3 nucleotide and the immediately downstream (+4) nucleotide, i.e., in the 3′ direction, comprise a 2′-F modification of the 5′ terminal (+1) nucleotide. In certain embodiments, the ds oligonucleotides comprising a guide strand backbone phosphoryl guanidine chiral center in the Sp configuration between the +3 nucleotide and the immediately downstream (+4) nucleotide, i.e., in the 3′ direction, comprise a 2′-F modification of the second (+2) nucleotide. In certain embodiments, the ds oligonucleotides comprising a guide strand backbone phosphoryl guanidine chiral center in the Sp configuration between the +3 nucleotide and the immediately downstream (+4) nucleotide, i.e., in the 3′ direction, comprise a 2′-F modification of the third (+3) nucleotide. In certain embodiments, the ds oligonucleotides comprising a guide strand backbone phosphoryl guanidine chiral center in the Sp configuration between the +3 nucleotide and the immediately downstream (+4) nucleotide, i.e., in the 3′ direction, comprise a 2′-F modification of the fourth (+4) nucleotide. In certain embodiments, the ds oligonucleotides comprising a guide strand backbone phosphoryl guanidine chiral center in the Sp configuration between the +3 nucleotide and the immediately downstream (+4) nucleotide, i.e., in the 3′ direction, comprise a 2′-F modification of the fifth (+5) nucleotide. In certain embodiments, the ds oligonucleotides comprising a guide strand backbone phosphoryl guanidine chiral center in the Sp configuration between the +3 nucleotide and the immediately downstream (+4) nucleotide, i.e., in the 3′ direction, comprise a 2′-F modification of the sixth (+6) nucleotide.

[0819] In certain embodiments, the one or more Rp, Sp, or stereorandom non-negatively charged internucleotidic linkage incorporated into the guide strand is an Rp non-negatively charged internucleotidic linkage. In certain embodiments, the one or more Rp, Sp, or stereorandom non-negatively charged internucleotidic linkage is an Sp non-negatively charged internucleotidic linkage. In certain embodiments, the one or more Rp, Sp, or stereorandom non-negatively charged internucleotidic linkage is a stereorandom non-negatively charged internucleotidic linkage. In certain further embodiments, the passenger strand comprises an Sp backbone phosphorothioate chiral center between the 5′ terminal (+1) nucleotide and the immediately downstream (+2) nucleotide and an Sp backbone phosphorothioate chiral center between the penultimate (N-1) nucleotide and the 3′ terminal (N) nucleotide.

[0820] In certain embodiments, the ds oligonucleotide comprises a guide strand backbone phosphoryl guanidine chiral center in the Sp configuration between the +3 nucleotide and the immediately downstream (+4) nucleotide, i.e., in the 3′ direction, and the guide strand further comprises one or more backbone phosphorothioate chiral centers in Rp or Sp configuration upstream of backbone phosphorothioate chiral centers in Sp configuration between the 3′ terminal nucleotide and the penultimate (N-1) nucleotide and as between the penultimate (N-1) nucleotide and the immediately upstream (N-2) nucleotide, a 2′ modification, e.g., a 2′ F modification, of the 3′ nucleotide of a nucleotide pair linked by an Rp, Sp, or stereorandom non-negatively charged internucleotidic linkage, and the passenger strand comprises 0-n Rp, Sp, or stereorandom non-negatively charged internucleotidic linkages, where n is about 1 to 49 and one or more backbone chiral centers in Rp or Sp configuration.

[0821] In certain embodiments, the ds oligonucleotides comprising a guide strand backbone phosphoryl guanidine chiral center in the Sp configuration between the +3 nucleotide and the immediately downstream (+4) nucleotide, i.e., in the 3′ direction, further comprise one or a plurality of modified sugars. In certain embodiments, the ds oligonucleotides comprising a guide strand backbone phosphoryl guanidine chiral center in the Sp configuration between the +3 nucleotide and the immediately downstream (+4) nucleotide, i.e., in the 3′ direction, comprise a modified sugar at the 5′ terminal (+1) nucleotide, second (+2) nucleotide, third (+3) nucleotide, fourth (+4) nucleotide, fifth (+5) nucleotide, sixth (+6) nucleotide, seventh (+7) nucleotide, eighth (+8) nucleotide, ninth (+9) nucleotide, tenth (+10) nucleotide, twelfth (+12) nucleotide, sixteenth (+16) nucleotide, seventeenth (+17) nucleotide, eighteenth (+18) nucleotide, nineteenth (+19) nucleotide, twentieth (+20) nucleotide, twenty-first (+21) nucleotide, twenty-second (+22), and/or twenty-third (+23), the 3′ terminal, nucleotide. In certain embodiments, the ds oligonucleotides comprising a guide strand backbone phosphoryl guanidine chiral center in the Sp configuration between the +3 nucleotide and the immediately downstream (+4) nucleotide, i.e., in the 3′ direction, comprise a modified sugar at the 5′ terminal (+1) nucleotide. In certain embodiments, the ds oligonucleotides comprising a guide strand backbone phosphoryl guanidine chiral center in the Sp configuration between the +3 nucleotide and the immediately downstream (+4) nucleotide, i.e., in the 3′ direction, comprise a modified sugar at the second (+2) nucleotide. In certain embodiments, the ds oligonucleotides comprising a guide strand backbone phosphoryl guanidine chiral center in the Sp configuration between the +3 nucleotide and the immediately downstream (+4) nucleotide, i.e., in the 3′ direction, comprise a modified sugar at the third (+3) nucleotide. In certain embodiments, the ds oligonucleotides comprising a guide strand backbone phosphoryl guanidine chiral center in the Sp configuration between the +3 nucleotide and the immediately downstream (+4) nucleotide, i.e., in the 3′ direction, comprise a modified sugar at the fourth (+4) nucleotide. In certain embodiments, the ds oligonucleotides comprising a guide strand backbone phosphoryl guanidine chiral center in the Sp configuration between the +3 nucleotide and the immediately downstream (+4) nucleotide, i.e., in the 3′ direction, comprise a modified sugar at the fifth (+5) nucleotide. In certain embodiments, the ds oligonucleotides comprising a guide strand backbone phosphoryl guanidine chiral center in the Sp configuration between the +3 nucleotide and the immediately downstream (+4) nucleotide, i.e., in the 3′ direction, comprise a modified sugar at the sixth (+6) nucleotide. In certain embodiments, the modified sugar comprises a 2′-F modification, 2′-H modification, 2′-OH modification, 2′-O-alkyl modification, e.g., 2′-O— methyl (OMe) modification, 2′-methoxyethyl (MOE) modification, 5′-alkyl modification, e.g., 5′-(R)-methyl or 5′-(S)-methyl, DNA, locked nucleic acid (LNA), unlocked nucleic acid (UNA), glycol nucleic acid (GNA), or Homo-DNA. In certain embodiments, the ds oligonucleotides comprising a guide strand backbone phosphoryl guanidine chiral center in the Sp configuration between the +3 nucleotide and the immediately downstream (+4) nucleotide, i.e., in the 3′ direction, comprise a 2′-F modification of the 5′ terminal (+1) nucleotide, second (+2) nucleotide, third (+3) nucleotide, fourth (+4) nucleotide, fifth (+5) nucleotide, and/or sixth (+6) nucleotide. In certain embodiments, the ds oligonucleotides comprising a guide strand backbone phosphoryl guanidine chiral center in the Sp configuration between the +3 nucleotide and the immediately downstream (+4) nucleotide, i.e., in the 3′ direction, comprise a 2′-F modification of the 5′ terminal (+1) nucleotide. In certain embodiments, the ds oligonucleotides comprising a guide strand backbone phosphoryl guanidine chiral center in the Sp configuration between the +3 nucleotide and the immediately downstream (+4) nucleotide, i.e., in the 3′ direction, comprise a 2′-F modification of the second (+2) nucleotide. In certain embodiments, the ds oligonucleotides comprising a guide strand backbone phosphoryl guanidine chiral center in the Sp configuration between the +3 nucleotide and the immediately downstream (+4) nucleotide, i.e., in the 3′ direction, comprise a 2′-F modification of the third (+3) nucleotide. In certain embodiments, the ds oligonucleotides comprising a guide strand backbone phosphoryl guanidine chiral center in the Sp configuration between the +3 nucleotide and the immediately downstream (+4) nucleotide, i.e., in the 3′ direction, comprise a 2′-F modification of the fourth (+4) nucleotide. In certain embodiments, the ds oligonucleotides comprising a guide strand backbone phosphoryl guanidine chiral center in the Sp configuration between the +3 nucleotide and the immediately downstream (+4) nucleotide, i.e., in the 3′ direction, comprise a 2′-F modification of the fifth (+5) nucleotide. In certain embodiments, the ds oligonucleotides comprising a guide strand backbone phosphoryl guanidine chiral center in the Sp configuration between the +3 nucleotide and the immediately downstream (+4) nucleotide, i.e., in the 3′ direction, comprise a 2′-F modification of the sixth (+6) nucleotide.

[0822] In certain embodiments, the one or more Rp, Sp, or stereorandom non-negatively charged internucleotidic linkage incorporated into the guide strand is an Rp non-negatively charged internucleotidic linkage. In certain embodiments, the one or more Rp, Sp, or stereorandom non-negatively charged internucleotidic linkage is an Sp non-negatively charged internucleotidic linkage. In certain embodiments, the one or more Rp, Sp, or stereorandom non-negatively charged internucleotidic linkage is a stereorandom non-negatively charged internucleotidic linkage. In certain further embodiments, the passenger strand comprises an Sp backbone phosphorothioate chiral center between the 5′ terminal (+1) nucleotide and the immediately downstream (+2) nucleotide and an Sp backbone phosphorothioate chiral center between the penultimate (N-1) nucleotide and the 3′ terminal (N) nucleotide.

[0823] In certain embodiments, the one or more Rp, Sp, or stereorandom non-negatively charged internucleotidic linkage incorporated into the guide strand is an Rp non-negatively charged internucleotidic linkage. In certain embodiments, the one or more Rp, Sp, or stereorandom non-negatively charged internucleotidic linkage is an Sp non-negatively charged internucleotidic linkage. In certain embodiments, the one or more Rp, Sp, or stereorandom non-negatively charged internucleotidic linkage is a stereorandom non-negatively charged internucleotidic linkage. In certain further embodiments, the passenger strand comprises an Rp backbone phosphorothioate chiral center between the 5′ terminal (+1) nucleotide and the immediately downstream (+2) nucleotide and an Rp backbone phosphorothioate chiral center between the penultimate (N-1) nucleotide and the 3′ terminal (N) nucleotide.

[0824] In certain embodiments, the one or more Rp, Sp, or stereorandom non-negatively charged internucleotidic linkage incorporated into the guide strand is an Rp non-negatively charged internucleotidic linkage. In certain embodiments, the one or more Rp, Sp, or stereorandom non-negatively charged internucleotidic linkage is an Sp non-negatively charged internucleotidic linkage. In certain embodiments, the one or more Rp, Sp, or stereorandom non-negatively charged internucleotidic linkage is a stereorandom non-negatively charged internucleotidic linkage. In certain further embodiments, the passenger strand comprises an Rp backbone phosphorothioate chiral center between the 5′ terminal (+1) nucleotide and the immediately downstream (+2) nucleotide and an Sp backbone phosphorothioate chiral center between the penultimate (N-1) nucleotide and the 3′ terminal (N) nucleotide.

[0825] In certain embodiments, the ds oligonucleotide comprises a guide strand backbone phosphoryl guanidine chiral center in the Sp configuration between the +3 nucleotide and the immediately downstream (+4) nucleotide, i.e., in the 3′ direction, and the guide strand further comprises one or more Rp, Sp, or stereorandom non-negatively charged internucleotidic linkage occurs between any two adjacent nucleotides between the second (+2) nucleotide relative to the 5′ terminal nucleotide of the guide strand and the penultimate 3′ (N-1) nucleotide of the guide strand, where N is the 3′ terminal nucleotide, a 2′ modification, e.g., a 2′ F modification, of the 3′ nucleotide of a nucleotide pair linked by an Rp, Sp, or stereorandom non-negatively charged internucleotidic linkage, and the passenger strand comprises 0-n Rp, Sp, or stereorandom non-negatively charged internucleotidic linkages, where n is about 1 to 49 and one or more backbone chiral centers in Rp or Sp configuration.

[0826] In certain embodiments, the ds oligonucleotides comprising a guide strand backbone phosphoryl guanidine chiral center in the Sp configuration between the +3 nucleotide and the immediately downstream (+4) nucleotide, i.e., in the 3′ direction, further comprise one or a plurality of modified sugars. In certain embodiments, the ds oligonucleotides comprising a guide strand backbone phosphoryl guanidine chiral center in the Sp configuration between the +3 nucleotide and the immediately downstream (+4) nucleotide, i.e., in the 3′ direction, comprise a modified sugar at the 5′ terminal (+1) nucleotide, second (+2) nucleotide, third (+3) nucleotide, fourth (+4) nucleotide, fifth (+5) nucleotide, sixth (+6) nucleotide, seventh (+7) nucleotide, eighth (+8) nucleotide, ninth (+9) nucleotide, tenth (+10) nucleotide, twelfth (+12) nucleotide, sixteenth (+16) nucleotide, seventeenth (+17) nucleotide, eighteenth (+18) nucleotide, nineteenth (+19) nucleotide, twentieth (+20) nucleotide, twenty-first (+21) nucleotide, twenty-second (+22), and/or twenty-third (+23), the 3′ terminal, nucleotide. In certain embodiments, the ds oligonucleotides comprising a guide strand backbone phosphoryl guanidine chiral center in the Sp configuration between the +3 nucleotide and the immediately downstream (+4) nucleotide, i.e., in the 3′ direction, comprise a modified sugar at the 5′ terminal (+1) nucleotide. In certain embodiments, the ds oligonucleotides comprising a guide strand backbone phosphoryl guanidine chiral center in the Sp configuration between the +3 nucleotide and the immediately downstream (+4) nucleotide, i.e., in the 3′ direction, comprise a modified sugar at the second (+2) nucleotide. In certain embodiments, the ds oligonucleotides comprising a guide strand backbone phosphoryl guanidine chiral center in the Sp configuration between the +3 nucleotide and the immediately downstream (+4) nucleotide, i.e., in the 3′ direction, comprise a modified sugar at the third (+3) nucleotide. In certain embodiments, the ds oligonucleotides comprising a guide strand backbone phosphoryl guanidine chiral center in the Sp configuration between the +3 nucleotide and the immediately downstream (+4) nucleotide, i.e., in the 3′ direction, comprise a modified sugar at the fourth (+4) nucleotide. In certain embodiments, the ds oligonucleotides comprising a guide strand backbone phosphoryl guanidine chiral center in the Sp configuration between the +3 nucleotide and the immediately downstream (+4) nucleotide, i.e., in the 3′ direction, comprise a modified sugar at the fifth (+5) nucleotide. In certain embodiments, the ds oligonucleotides comprising a guide strand backbone phosphoryl guanidine chiral center in the Sp configuration between the +3 nucleotide and the immediately downstream (+4) nucleotide, i.e., in the 3′ direction, comprise a modified sugar at the sixth (+6) nucleotide. In certain embodiments, the modified sugar comprises a 2′-F modification, 2′-H modification, 2′-OH modification, 2′-O-alkyl modification, e.g., 2′-O— methyl (OMe) modification, 2′-methoxyethyl (MOE) modification, 5′-alkyl modification, e.g., 5′-(R)-methyl or 5′-(S)-methyl, DNA, locked nucleic acid (LNA), unlocked nucleic acid (UNA), glycol nucleic acid (GNA), or Homo-DNA. In certain embodiments, the ds oligonucleotides comprising a guide strand backbone phosphoryl guanidine chiral center in the Sp configuration between the +3 nucleotide and the immediately downstream (+4) nucleotide, i.e., in the 3′ direction, comprise a 2′-F modification of the 5′ terminal (+1) nucleotide, second (+2) nucleotide, third (+3) nucleotide, fourth (+4) nucleotide, fifth (+5) nucleotide, and/or sixth (+6) nucleotide. In certain embodiments, the ds oligonucleotides comprising a guide strand backbone phosphoryl guanidine chiral center in the Sp configuration between the +3 nucleotide and the immediately downstream (+4) nucleotide, i.e., in the 3′ direction, comprise a 2′-F modification of the 5′ terminal (+1) nucleotide. In certain embodiments, the ds oligonucleotides comprising a guide strand backbone phosphoryl guanidine chiral center in the Sp configuration between the +3 nucleotide and the immediately downstream (+4) nucleotide, i.e., in the 3′ direction, comprise a 2′-F modification of the second (+2) nucleotide. In certain embodiments, the ds oligonucleotides comprising a guide strand backbone phosphoryl guanidine chiral center in the Sp configuration between the +3 nucleotide and the immediately downstream (+4) nucleotide, i.e., in the 3′ direction, comprise a 2′-F modification of the third (+3) nucleotide. In certain embodiments, the ds oligonucleotides comprising a guide strand backbone phosphoryl guanidine chiral center in the Sp configuration between the +3 nucleotide and the immediately downstream (+4) nucleotide, i.e., in the 3′ direction, comprise a 2′-F modification of the fourth (+4) nucleotide. In certain embodiments, the ds oligonucleotides comprising a guide strand backbone phosphoryl guanidine chiral center in the Sp configuration between the +3 nucleotide and the immediately downstream (+4) nucleotide, i.e., in the 3′ direction, comprise a 2′-F modification of the fifth (+5) nucleotide. In certain embodiments, the ds oligonucleotides comprising a guide strand backbone phosphoryl guanidine chiral center in the Sp configuration between the +3 nucleotide and the immediately downstream (+4) nucleotide, i.e., in the 3′ direction, comprise a 2′-F modification of the sixth (+6) nucleotide.

[0827] In certain embodiments, the one or more Rp, Sp, or stereorandom non-negatively charged internucleotidic linkage incorporated into the guide strand is an Rp non-negatively charged internucleotidic linkage. In certain embodiments, the one or more Rp, Sp, or stereorandom non-negatively charged internucleotidic linkage is an Sp non-negatively charged internucleotidic linkage. In certain embodiments, the one or more Rp, Sp, or stereorandom non-negatively charged internucleotidic linkage is a stereorandom non-negatively charged internucleotidic linkage. In certain further embodiments, the passenger strand comprises an Sp backbone phosphorothioate chiral center between the 5′ terminal (+1) nucleotide and the immediately downstream (+2) nucleotide and an Sp backbone phosphorothioate chiral center between the penultimate (N-1) nucleotide and the 3′ terminal (N) nucleotide. In certain further embodiments, the passenger strand comprises an Rp backbone phosphorothioate chiral center between the 5′ terminal (+1) nucleotide and the immediately downstream (+2) nucleotide and an Sp backbone phosphorothioate chiral center between the penultimate (N-1) nucleotide and the 3′ terminal (N) nucleotide. In certain embodiments, a RNAi oligonucleotide comprises a sequence that is completely or substantially identical to or is completely or substantially complementary to 10 or more (e.g., 10, 11, 12, 13, 14, 15, 16, 17, 18, 19, 20 or more) contiguous bases of a target genomic sequence or a transcript therefrom (e.g., mRNA (e.g., pre-mRNA, mRNA after splicing, etc.)). In certain embodiments, a RNAi oligonucleotide comprises a sequence that is completely complementary to 10 or more (e.g., 10, 11, 12, 13, 14, 15, 16, 17, 18, 19, 20 or more) contiguous bases of a target transcript. In certain embodiments, the number of contiguous bases is about 15-20. In certain embodiments, the number of contiguous bases is about 20. In certain embodiments, an RNAi oligonucleotide that can hybridize with a target transcript (e.g., pre-mRNA, RNA, etc.) and can reduce the level of the target transcript and/or a protein encoded by the target transcript.

[0828] In certain embodiments, the present disclosure provides a dsRNAi oligonucleotide as disclosed herein, e.g., in Table 1. In certain embodiments, the present disclosure provides a dsRNAi oligonucleotide having a base sequence disclosed herein, e.g., in Table 1, or a portion thereof comprising at least 10 (e.g., 10, 11, 12, 13, 14, 15, 16, 17, 18, 19, 20 or more) contiguous bases, wherein the RNAi oligonucleotide is stereorandom or not chirally controlled, and wherein each T can be independently substituted with U and vice versa.

[0829] In certain embodiments, internucleotidic linkages of an oligonucleotide comprise or consist of 1-5, 1-10, 1-15, 1-20, 1-25, 1-30, 1-40, 1-50, or 1, 2, 3, 4, 5, 6, 7, 8, 9, 10, 11, 12, 13, 14, 15, 16, 17, 18, 19, 20 or more chirally controlled internucleotidic linkages. In certain embodiments, the present disclosure provides a dsRNAi oligonucleotide composition wherein the dsRNAi oligonucleotides comprise at least one chirally controlled internucleotidic linkage. In certain embodiments, the present disclosure provides a dsRNAi oligonucleotide composition wherein the dsRNAi oligonucleotides are stereorandom or not chirally controlled. In certain embodiments, in a dsRNAi oligonucleotide, at least one internucleotidic linkage is stereorandom and at least one internucleotidic linkage is chirally controlled.

[0830] In certain embodiments, internucleotidic linkages of an oligonucleotide comprise or consist of one or more neutrally charged internucleotidic linkages.

### 1.1 Double Stranded Oligonucleotides

[0831] In certain embodiments, the present disclosure provides oligonucleotides of various designs, which may comprise various nucleobases and patterns thereof, sugars and patterns thereof, internucleotidic linkages and patterns thereof, and/or additional chemical moieties and patterns thereof as described in the present disclosure. In certain embodiments, provided dsRNAi oligonucleotides can direct a decrease in the expression, level and/or activity of a gene and/or one or more of its products (e.g., transcripts, mRNA, proteins, etc.). In certain embodiments, provided dsRNAi oligonucleotides can direct a decrease in the expression, level and/or activity of a gene and/or one or more of its products in a cell of a subject or patient. In certain embodiments, a cell normally expresses or produces a protein. In certain embodiments, provided dsRNAi oligonucleotides can direct a decrease in the expression, level and/or activity of a target gene or a gene product and has a base sequence which consists of, comprises, or comprises a portion (e.g., a span of 1-5, 1-10, 1-15, 1-20, 1-25, 1-30, 1-40, 1-50, or 1, 2, 3, 4, 5, 6, 7, 8, 9, 10, 11, 12, 13, 14, 15, 16, 17, 18, 19, 20 or more contiguous bases) of the base sequence of a dsRNAi oligonucleotide disclosed herein, wherein each T can be independently substituted with U and vice versa, and the ds oligonucleotide comprises at least one non-naturally-occurring modification of abase, sugar and/or internucleotidic linkage.

[0832] In certain embodiments, dsRNAi oligonucleotides can direct a decrease in the expression, level and/or activity of a target gene, e.g., a target gene, or a product thereof. In certain embodiments, provided ds oligonucleotides can direct a decrease in the expression and/or level of a target gene or its gene product. In certain embodiments, provided ds oligonucleotides can direct a decrease in levels of target products. In certain embodiments, provided ds oligonucleotide can reduce levels of transcripts of target genes. In certain embodiments, provided ds oligonucleotide can reduce levels of mRNA of target genes. In certain embodiments, provided ds oligonucleotide can reduce levels of proteins encoded by target genes. In certain embodiments, provided ds oligonucleotides can direct a decrease in the expression and/or level of a target gene or its gene product via RNA interference. In certain embodiments, provided ds oligonucleotides can direct a decrease in the expression and/or level of a target gene or its gene product via a biochemical mechanism which does not involve RNA interference or RISC (including, but not limited to, RNaseH-mediated knockdown or steric hindrance of gene expression). In certain embodiments, provided ds oligonucleotides can direct a decrease in the expression and/or level of a target gene or its gene product via RNA interference and/or RNase H-mediated knockdown. In certain embodiments, provided ds oligonucleotides can direct a decrease in the expression and/or level of a target gene or its gene product by sterically blocking translation after binding to a target gene mRNA, and/or by altering or interfering with mRNA splicing and/or exon inclusion or exclusion. In certain embodiments, provided ds oligonucleotides comprise one or more structural elements described herein or known in the art in accordance with the present disclosure, e.g., base sequences; modifications; stereochemistry; patterns of internucleotidic linkages; GC contents; long GC stretches; patterns of backbone linkages; patterns of backbone chiral centers; patterns of backbone phosphorus modifications; additional chemical moieties, including but not limited to, one or more targeting moieties, lipid moieties, and/or carbohydrate moieties, etc.; seed regions; post-seed regions; 5′-end structures; 5′-end regions; 5′ nucleotide moieties; 3′-end regions; 3′-terminal dinucleotides; 3′-end caps; etc. In certain embodiments, a seed region of an oligonucleotide is or comprises the second to eighth, second to seventh, second to sixth, third to eighth, third to seventh, third to seven, or fourth to eighth or fourth to seventh nucleotides, counting from the 5′ end; and the post-seed region of the oligonucleotide is the region immediately 3′ to the seed region, and interposed between the seed region and the 3′ end region. In certain embodiments, a provided composition comprises a ds oligonucleotide. In certain embodiments, a provided composition comprises one or more lipid moieties, one or more carbohydrate moieties (unless otherwise specified, other than sugar moieties of nucleoside units that form oligonucleotide chain with internucleotidic linkages), and/or one or more targeting components. In certain embodiments, ds RNAi oligonucleotides can direct a decrease in the expression, level and/or activity of a target gene or a product thereof by sterically blocking translation after binding to a target gene mRNA, and/or by altering or interfering with mRNA splicing. Regardless, however, the present disclosure is not limited to any particular mechanism. In certain embodiments, the present disclosure provides ds oligonucleotides, compositions, methods, etc., capable of operating via double-stranded RNA interference, single-stranded RNA interference, RNase H-mediated knock-down, steric hindrance of translation, or a combination of two or more such mechanisms.

[0833] In certain embodiments, a dsRNAi oligonucleotide comprises a structural element or a portion thereof described herein, e.g., in Table 1. In certain embodiments, a dsRNAi oligonucleotide comprises a base sequence (or a portion thereof) described herein, wherein each T can be independently substituted with U and vice versa, a chemical modification or a pattern of chemical modifications (or a portion thereof), and/or a format or a portion thereof described herein. In certain embodiments, a dsRNAi oligonucleotide has a base sequence which comprises the base sequence (or a portion thereof) wherein each T can be independently substituted with U, pattern of chemical modifications (or a portion thereof), and/or a format of an oligonucleotide disclosed herein, e.g., in Table 1, or otherwise disclosed herein. In certain embodiments, such ds oligonucleotides, e.g., dsRNAi oligonucleotides reduce expression, level and/or activity of a gene, e.g., a gene, or a gene product thereof.

[0834] Among other things, dsRNAi oligonucleotides may hybridize to their target nucleic acids (e.g., pre-mRNA, mature mRNA, etc.). For example, in certain embodiments, a dsRNAi oligonucleotide can hybridize to a nucleic acid derived from a DNA strand (either strand of the gene). In certain embodiments, a dsRNAi oligonucleotide can hybridize to a transcript. In certain embodiments, a dsRNAi oligonucleotide can hybridize to a target nucleic acid in any stage of RNA processing, including but not limited to a pre-mRNA or a mature mRNA. In certain embodiments, a dsRNAi oligonucleotide can hybridize to any element of a target nucleic acid or its complement, including but not limited to: a promoter region, an enhancer region, a transcriptional stop region, a translational start signal, a translation stop signal, a coding region, a non-coding region, an exon, an intron, an intron/exon or exon/intron junction, the 5′ UTR, or the 3′ UTR. In certain embodiments, dsRNAi oligonucleotides can hybridize to their targets with no more than 2 mismatches. In certain embodiments, dsRNAi oligonucleotides can hybridize to their targets with no more than one mismatch. In certain embodiments, dsRNAi oligonucleotides can hybridize to their targets with no mismatches (e.g., when all C-G and/or A-T/U base paring).

[0835] In certain embodiments, a ds oligonucleotide can hybridize to two or more variants of transcripts. In certain embodiments, a dsRNAi oligonucleotide can hybridize to two or more or all variants of a transcript. In certain embodiments, a dsRNAi oligonucleotide can hybridize to two or more or all variants of a transcript derived from the sense strand.

[0836] In certain embodiments, a target of a dsRNAi oligonucleotide is an RNA which is not a mRNA.

[0837] In certain embodiments, ds oligonucleotides, e.g., dsRNAi oligonucleotides, contain increased levels of one or more isotopes. In certain embodiments, ds oligonucleotides, e.g., dsRNAi oligonucleotides, are labeled, e.g., by one or more isotopes of one or more elements, e.g., hydrogen, carbon, nitrogen, etc. In certain embodiments, ds oligonucleotides, e.g., dsRNAi oligonucleotides, in provided compositions, e.g., ds oligonucleotides of a plurality of a composition, comprise base modifications, sugar modifications, and/or internucleotidic linkage modifications, wherein the ds oligonucleotides contain an enriched level of deuterium. In certain embodiments, oligonucleotides, e.g., RNAi oligonucleotides, are labeled with deuterium (replacing −¹H with −²H) at one or more positions. In certain embodiments, one or more ¹H of a ds oligonucleotide chain or any moiety conjugated to the ds oligonucleotide chain (e.g., a targeting moiety, etc.) is substituted with ²H. Such ds oligonucleotides can be used in compositions and methods described herein.

[0838] In certain embodiments, the present disclosure provides a ds oligonucleotide composition comprising a plurality of ds oligonucleotides which:
[0839] 1) have a common base sequence complementary to atarget sequence (e.g., a target sequence) in a transcript; and
[0840] 2) comprise one or more modified sugar moieties and/or modified internucleotidic linkages.

[0841] In certain embodiments, dsRNAi oligonucleotides having a common base sequence may have the same pattern of nucleoside modifications, e.g., sugar modifications, base modifications, etc. In certain embodiments, a pattern of nucleoside modifications may be represented by a combination of locations and modifications. In certain embodiments, a pattern of backbone linkages comprises locations and types (e.g., phosphate, phosphorothioate, substituted phosphorothioate, etc.) of each internucleotidic linkage.

[0842] In certain embodiments, ds oligonucleotides of a plurality, e.g., in provided compositions, are of the same ds oligonucleotide type. In certain embodiments, ds oligonucleotides of an ds oligonucleotide type have a common pattern of sugar modifications. In certain embodiments, ds oligonucleotides of a ds oligonucleotide type have a common pattern of base modifications. In certain embodiments, ds oligonucleotides of a ds oligonucleotide type have a common pattern of nucleoside modifications. In certain embodiments, ds oligonucleotides of a ds oligonucleotide type have the same constitution. In certain embodiments, ds oligonucleotides of a ds oligonucleotide type are identical. In certain embodiments, ds oligonucleotides of a plurality are identical. In certain embodiments, ds oligonucleotides of a plurality share the same constitution.

[0843] In certain embodiments, as exemplified herein, dsRNAi oligonucleotides are chiral controlled, comprising one or more chirally controlled internucleotidic linkages. In certain embodiments, ds RNAi oligonucleotides are stereochemically pure. In certain embodiments, dsRNAi oligonucleotides are substantially separated from other stereoisomers.

[0844] In certain embodiments, RNAi oligonucleotides comprise one or more modified nucleobases, one or more modified sugars, and/or one or more modified internucleotidic linkages.

[0845] In certain embodiments, dsRNAi oligonucleotides comprise one or more modified sugars. In certain embodiments, ds oligonucleotides of the present disclosure comprise one or more modified nucleobases. Various modifications can be introduced to a sugar and/or nucleobase in accordance with the present disclosure. For example, in certain embodiments, a modification is a modification described in U.S. Pat. No. 9,006,198. In certain embodiments, a modification is a modification described in U.S. Pat. Nos. 9,394,333, 9,744,183, 9,605,019, 9,598,458, 9,982,257, U.S. Ser. No. 10/160,969, U.S. Ser. No. 10/479,995, US 2020/0056173, US 2018/0216107, US 2019/0127733, U.S. Ser. No. 10/450,568, US 2019/0077817, US 2019/0249173, US 2019/0375774, WO 2018/223056, WO 2018/223073, WO 2018/223081, WO 2018/237194, WO 2019/032607, WO 2019/055951, WO 2019/075357, WO 2019/200185, WO 2019/217784, and/or WO 2019/032612, the sugar, base, and internucleotidic linkage modifications of each of which are independently incorporated herein by reference.

[0846] As used in the present disclosure, in certain embodiments, “one or more” is 1-200, 1-150, 1-100, 1-90, 1-80, 1-70, 1-60, 1-50, 1-40, 1-30, or 1, 2, 3, 4, 5, 6, 7, 8, 9, 10, 11, 12, 13, 14, 15, 16, 17, 18, 19, 20, 21, 22, 23, 24, or 25. In certain embodiments, “one or more” is one. In certain embodiments, “one or more” is two. In certain embodiments, “one or more” is three. In certain embodiments, “one or more” is four. In certain embodiments, “one or more” is five. In certain embodiments, “one or more” is six. In certain embodiments, “one or more” is seven. In certain embodiments, “one or more” is eight. In certain embodiments, “one or more” is nine. In certain embodiments, “one or more” is ten. In certain embodiments, “one or more” is at least one. In certain embodiments, “one or more” is at least two. In certain embodiments, “one or more” is at least three. In certain embodiments, “one or more” is at least four. In certain embodiments, “one or more” is at least five. In certain embodiments, “one or more” is at least six. In certain embodiments, “one or more” is at least seven. In certain embodiments, “one or more” is at least eight. In certain embodiments, “one or more” is at least nine. In certain embodiments, “one or more” is at least ten.

[0847] As used in the present disclosure, in certain embodiments, “at least one” is 1-200, 1-150, 1-100, 1-90, 1-80, 1-70, 1-60, 1-50, 1-40, 1-30, or 1, 2, 3, 4, 5, 6, 7, 8, 9, 10, 11, 12, 13, 14, 15, 16, 17, 18, 19, 20, 21, 22, 23, 24, or 25. In certain embodiments, “at least one” is one. In certain embodiments, “at least one” is two. In certain embodiments, “at least one” is three. In certain embodiments, “at least one” is four. In certain embodiments, “at least one” is five. In certain embodiments, “at least one” is six. In certain embodiments, “at least one” is seven. In certain embodiments, “at least one” is eight. In certain embodiments, “at least one” is nine. In certain embodiments, “at least one” is ten.

[0848] In certain embodiments, a dsRNAi oligonucleotide is or comprises a dsRNAi oligonucleotide described in Table 1.

[0849] As demonstrated in the present disclosure, in certain embodiments, a provided ds oligonucleotide (e.g., a dsRNAi oligonucleotide) is characterized in that, when it is contacted with the transcript in a knockdown system, knockdown of its target (e.g., a transcript for a target oligonucleotide).

[0850] In certain embodiments, ds oligonucleotides are provided as salt forms. In certain embodiments, ds oligonucleotides are provided as salts comprising negatively-charged internucleotidic linkages (e.g., phosphorothioate internucleotidic linkages, natural phosphate linkages, etc.) existing as their salt forms. In certain embodiments, ds oligonucleotides are provided as pharmaceutically acceptable salts. In certain embodiments, ds oligonucleotides are provided as metal salts. In certain embodiments, ds oligonucleotides are provided as sodium salts. In certain embodiments, ds oligonucleotides are provided as metal salts, e.g., sodium salts, wherein each negatively-charged internucleotidic linkage is independently in a salt form (e.g., for sodium salts, —O—P(O)(SNa)—O— for a phosphorothioate internucleotidic linkage, —O—P(O)(ONa)—O— for a natural phosphate linkage, etc.).

### 1.2 Regions of Double Stranded Oligonucleotides

### 1.2.1 Base Sequences

[0851] In certain embodiments, a dsRNAi oligonucleotide comprises a base sequence described herein or a portion (e.g., a span of 5-50, 5-40, 5-30, 5-20, or 5, 6, 7, 8, 9, 10, 11, 12, 13, 14, 15, 16, 17, 18, 19, 20, 21, 22, 23, 24, 25, 26, 27, 28, 20 or at least 10, at least 15, contiguous nucleobases) thereof with 0-5 (e.g., 0, 1, 2, 3, 4 or 5) mismatches, wherein each T can be independently substituted with U and vice versa. In certain embodiments, a dsRNAi oligonucleotide comprises a base sequence described herein, or a portion thereof, wherein a portion is a span of at least 10 contiguous nucleobases, or a span of at least 15 contiguous nucleobases with 1-5 mismatches. In certain embodiments, dsRNAi oligonucleotides comprise a base sequence described herein, or a portion thereof, wherein a portion is a span of at least 10 contiguous nucleobases, or a span of at least 10 contiguous nucleobases with 1-5 mismatches, wherein each T can be independently substituted with U and vice versa. In certain embodiments, base sequences of ds oligonucleotides comprise or consists of 10-50 (e.g., about or at least 10, 11, 12, 13, 14, 15, 16, 17, 18, 19, 20, 21, 22, 23, 24, 25, 30, 35, 40, 45; in certain embodiments, at least 15; in certain embodiments, at least 16; in certain embodiments, at least 17; in certain embodiments, at least 18; in certain embodiments, at least 19; in certain embodiments, at least 20; in certain embodiments, at least 21; in certain embodiments, at least 22; in certain embodiments, at least 23; in certain embodiments, at least 24; in certain embodiments, at least 25) contiguous bases of a base sequence that is identical to or complementary to a base sequence of a gene or a transcript (e.g., mRNA) thereof.

[0852] Base sequences of the guide strand of dsRNAi oligonucleotides, as appreciated by those skilled in the art, typically have sufficient length and complementarity to their targets, e.g., RNA transcripts (e.g., pre-mRNA, mature mRNA, etc.) to mediate target-specific knockdown. In certain embodiments, the base sequence of a dsRNAi oligonucleotide guide strand has a sufficient length and identity to a transcript target to mediate target-specific knockdown. In certain embodiments, the dsRNAi oligonucleotide guide strand is complementary to a portion of a transcript (a transcript target sequence). In certain embodiments, the base sequence of a dsRNAi oligonucleotide has 90% or more identity with the base sequence of a ds oligonucleotide disclosed in Table 1, wherein each T can be independently substituted with U and vice versa. In certain embodiments, the base sequence of a dsRNAi oligonucleotide has 95% or more identity with the base sequence of an oligonucleotide disclosed in Table 1, wherein each T can be independently substituted with U and vice versa. In certain embodiments, the base sequence of a dsRNAi oligonucleotide comprises a continuous span of 15 or more bases of an oligonucleotide disclosed in Table 1, wherein each T can be independently substituted with U and vice versa, except that one or more bases within the span are abasic (e.g., a nucleobase is absent from a nucleotide). In certain embodiments, the base sequence of a dsRNAi oligonucleotide comprises a continuous span of 19 or more bases of a dsRNAi oligonucleotide disclosed herein, except that one or more bases within the span are abasic (e.g., a nucleobase is absent from a nucleotide). In certain embodiments, the base sequence of a dsRNAi oligonucleotide comprises a continuous span of 19 or more bases of a ds oligonucleotide disclosed herein, wherein each T can be independently substituted with U and vice versa, except for a difference in the 1 or 2 bases at the 5′ end and/or 3′ end of the base sequences.

[0853] In certain embodiments, the present disclosure pertains to a ds oligonucleotide having a base sequence which comprises the base sequence of any ds oligonucleotide disclosed herein, wherein each T may be independently replaced with U and vice versa.

[0854] In certain embodiments, the present disclosure pertains to a ds oligonucleotide having a base sequence which comprises at least 15 contiguous bases of the base sequence of any ds oligonucleotide disclosed herein, wherein each T may be independently replaced with U and vice versa.

[0855] In certain embodiments, the present disclosure pertains to a ds oligonucleotide having a base sequence which is at least 90% identical to the base sequence of any ds oligonucleotide disclosed herein, wherein each T may be independently replaced with U and vice versa.

[0856] In certain embodiments, the present disclosure pertains to a ds oligonucleotide having a base sequence which is at least 95% identical to the base sequence of any ds oligonucleotide disclosed herein, wherein each T may be independently replaced with U and vice versa.

[0857] In certain embodiments, a base sequence of a ds oligonucleotide is, comprises, or comprises 10-20, e.g., 10, 11, 12, 13, 14, 15, 16, 17, 18, 19 or 20 contiguous bases of the base sequence of any ds oligonucleotide described herein, wherein each T may be independently replaced with U and vice versa.

[0858] In certain embodiments, a dsRNAi oligonucleotide is selected from Table 1.

[0859] In certain embodiments, a dsRNAi oligonucleotide target two or more or all alleles (if multiple alleles exist in a relevant system). In certain embodiments, a ds oligonucleotide reduces expressions, levels and/or activities of both wild-type allele and mutant allele, and/or transcripts and/or products thereof.

[0860] In certain embodiments, base sequences of provided ds oligonucleotides are fully complementary to both human and a non-human primate (NHP) target sequences. In certain embodiments, such sequences can be particularly useful as they can be readily assessed in both human and non-human primates.

[0861] In certain embodiments, a dsRNAi oligonucleotide comprises a base sequence or portion thereof described in Table 1, wherein each T may be independently replaced with U and vice versa, and/or a sugar, nucleobase, and/or internucleotidic linkage modification and/or a pattern thereof described in Table 1, and/or an additional chemical moiety (in addition to an oligonucleotide chain, e.g., a target moiety, a lipid moiety, a carbohydrate moiety, etc.) described in Table 1.

[0862] In certain embodiments, the terms “complementary,” “fully complementary” and “substantially complementary” may be used with respect to the base matching between n ds oligonucleotide (e.g., a dsRNAi oligonucleotide) base sequence and a target sequence, as will be understood by those skilled in the art from the context of their use. It is noted that substitution of T for U, or vice versa, generally does not alter the amount of complementarity. As used herein, a ds oligonucleotide that is “substantially complementary” to a target sequence is largely or mostly complementary but not 100% complementary. In certain embodiments, a sequence (e.g., a dsRNAi oligonucleotide) which is substantially complementary has 1, 2, 3, 4 or 5 mismatches when aligned to its target sequence. In certain embodiments, a dsRNAi oligonucleotide has a base sequence which is substantially complementary to ai target sequence. In certain embodiments, a dsRNAi oligonucleotide has a base sequence which is substantially complementary to the complement of the sequence of a dsRNAi oligonucleotide disclosed herein. As appreciated by those skilled in the art, in certain embodiments, sequences of ds oligonucleotides need not be 100% complementary to their targets for the ds oligonucleotides to perform their functions (e.g., knockdown of target nucleic acids. Typically when determining complementarity, A and T (or U) are complementary nucleobases and C and G are complementary nucleobases.

[0863] In certain embodiments, a “portion” (e.g., of a base sequence or a pattern of modifications) is at least 5, 6, 7, 8, 9, 10, 11, 12, 13, 14, 15, 16, 17, 18, 19, or 20 monomeric units long (e.g., for a base sequence, at least 5, 6, 7, 8, 9, 10, 11, 12, 13, 14, 15, 16, 17, 18, 19, or 20 bases long). In certain embodiments, a “portion” of a base sequence is at least 5 bases long. In certain embodiments, a “portion” of a base sequence is at least 10 bases long. In certain embodiments, a “portion” of a base sequence is at least 15 bases long. In certain embodiments, a “portion” of a base sequence is at least 16, 17, 18, 19 or 20 bases long. In certain embodiments, a “portion” of a base sequence is at least 20 bases long. In certain embodiments, a portion of a base sequence is 10, 11, 12, 13, 14, 15, 16, 17, 18, 19 or more contiguous (consecutive) bases. In certain embodiments, a portion of a base sequence is 15 or more contiguous (consecutive) bases. In certain embodiments, a portion of a base sequence is 16, 17, 18, 19 or 20 or more contiguous (consecutive) bases. In certain embodiments, a portion of a base sequence is 20 or more contiguous (consecutive) bases.

[0864] In certain embodiments, a portion is a span of at least 15, 16, 17, 18, 19, 20, 21, 22, 23, 24, or 25 total nucleotides. In certain embodiments, a portion is a span of at least 15, 16, 17, 18, 19, 20, 21, 22, 23, 24, or 25 total nucleotides with 0-3 mismatches. In certain embodiments, a portion is a span of at least 15, 16, 17, 18, 19, 20, 21, 22, 23, 24, or 25 total nucleotides with 0-3 mismatches, wherein a span with 0 mismatches is complementary and a span with 1 or more mismatches is a non-limiting example of substantial complementarity. In certain embodiments, a base comprises a portion characteristic of a nucleic acid (e.g., a gene) in that the portion is identical or complementary to a portion of the nucleic acid or a transcript thereof, and is not identical or complementary to a portion of any other nucleic acid (e.g., a gene) or a transcript thereof in the same genome. In certain embodiments, a portion is characteristic of human dsRNAi.

[0865] In certain embodiments, a provided oligonucleotide, e.g., a dsRNAi oligonucleotide, has a length of no more than about 49, 45, 40, 30, 35, 25, or 23 total nucleotides as described herein. In certain embodiments, wherein the sequence recited herein starts with a U or T at the 5′-end, the U can be deleted and/or replaced by another base.

[0866] In certain embodiments, ds oligonucleotides, e.g., dsRNAi oligonucleotides are stereorandom. In certain embodiments, RNAi oligonucleotides are chirally controlled. In certain embodiments, a ds RNAi oligonucleotide is chirally pure (or “stereopure”, “stereochemically pure”), wherein the ds oligonucleotide exists as a single stereoisomeric form (in many cases a single diastereoisomeric (or “diastereomeric”) form as multiple chiral centers may exist in a ds oligonucleotide, e.g., at linkage phosphorus, sugar carbon, etc.). As appreciated by those skilled in the art, a chirally pure ds oligonucleotide is separated from its other stereoisomeric forms (to the extent that some impurities may exist as chemical and biological processes, selectivities and/or purifications etc. rarely, if ever, go to absolute completeness). In a chirally pure ds oligonucleotide, each chiral center is independently defined with respect to its configuration (for a chirally pure ds oligonucleotide, each internucleotidic linkage is independently stereodefined or chirally controlled). In contrast to chirally controlled and chirally pure ds oligonucleotides which comprise stereodefined linkage phosphorus, racemic (or “stereorandom”, “non-chirally controlled”) ds oligonucleotides comprising chiral linkage phosphorus, e.g., from traditional phosphoramidite oligonucleotide synthesis without stereochemical control during coupling steps in combination with traditional sulfurization (creating stereorandom phosphorothioate internucleotidic linkages), refer to a random mixture of various stereoisomers (typically diastereoisomers (or “diastereomers”) as there are multiple chiral centers in a ds oligonucleotide; e.g., from traditional ds oligonucleotide preparation using reagents containing no chiral elements other than those in nucleosides and linkage phosphorus). For example, for A*A*A wherein * is a phosphorothioate internucleotidic linkage (which comprises a chiral linkage phosphorus), a racemic oligonucleotide preparation includes four diastereomers [2²=4, considering the two chiral linkage phosphorus, each of which can exist in either of two configurations (Sp or Rp)]: A*SA*SA, A*SA*RA, A*RA*SA, and A*RA*RA, wherein *S represents a Sp phosphorothioate internucleotidic linkage and *R represents a Rp phosphorothioate internucleotidic linkage. For a chirally pure oligonucleotide, e.g., A*SA*SA, it exists in a single stereoisomeric form and it is separated from the other stereoisomers (e.g., the diastereomers A*SA*RA, A*RA*SA, and A*RA*RA).

[0867] In certain embodiments, dsRNAi oligonucleotides comprise 1, 2, 3, 4, 5, 6, 7, 8, 9, 10 or more stereorandom internucleotidic linkages (mixture of Rp and Sp linkage phosphorus at the internucleotidic linkage, e.g., from traditional non-chirally controlled oligonucleotide synthesis). In certain embodiments, dsRNAi oligonucleotides comprise one or more (e.g., 1-50, 1-40, 1-30, 1-25, 1-20, 1, 2, 3, 4, 5, 6, 7, 8, 9, 10, 11, 12, 13, 14, 15, 16, 17, 18, 19, 20, 21, 22, 23, 24, 25 or more) chirally controlled internucleotidic linkages (Rp or Sp linkage phosphorus at the internucleotidic linkage, e.g., from chirally controlled oligonucleotide synthesis).

[0868] In certain embodiments, an internucleotidic linkage is a phosphorothioate internucleotidic linkage. In certain embodiments, an internucleotidic linkage is a stereorandom phosphorothioate internucleotidic linkage. In certain embodiments, an internucleotidic linkage is a chirally controlled phosphorothioate internucleotidic linkage.

[0869] Among other things, the present disclosure provides technologies for preparing chirally controlled (in certain embodiments, stereochemically pure) ds oligonucleotides. In certain embodiments, ds oligonucleotides are stereochemically pure. In certain embodiments, ds oligonucleotides of the present disclosure are about 5%-100%, 10%-100%, 20%-100%, 30%-100%, 40%-100%, 50%-100%, 60%-100%, 70%-100%, 80-100%, 90-100%, 95-100%, 50%-90%, or about 5%, 10%, 15%, 20%, 25%, 30%, 35%, 40%, 45%, 50%, 55%, 60%, 65%, 70%, 75%, 80%, 85%, 90%, 95%, or 100%, or at least about 5%, 10%, 15%, 20%, 25%, 30%, 35%, 40%, 45%, 50%, 55%, 60%, 65%, 70%, 75%, 80%, 85%, 90%, 95%, or 99%, pure. In certain embodiments, internucleotidic linkages of ds oligonucleotides comprise or consist of one or more (e.g., 1-50, 1-40, 1-30, 1-25, 1-20, 5-50, 5-40, 5-30, 5-25, 5-20, 1, 2, 3, 4, 5, 6, 7, 8, 9, 10, 11, 12, 13, 14, 15, 16, 17, 18, 19, 20, 21, 22, 23, 24, 25 or more) chiral internucleotidic linkages, each of which independently has a diastereopurity of at least 80%, 85%, 90%, 91%, 92%, 93%, 94%, 95%, 96%, 97%, 98%, 99% or 99.5%, typically at least 90%, 91%, 92%, 93%, 94%, 95%, 96%, 97%, 98%, 99% or 99.5%. In certain embodiments, ds oligonucleotides of the present disclosure, e.g., dsRNAi oligonucleotides, have a diastereopurity of (DS)^{CIL}, wherein DS is a diastereopurity as described in the present disclosure (e.g., 90%, 91%, 92%, 93%, 94%, 95%, 96%, 97%, 98%, 99% or 99.5% or more) and CIL is the number of chirally controlled internucleotidic linkages (e.g., 1-50, 1-40, 1-30, 1-25, 1-20, 5-50, 5-40, 5-30, 5-25, 5-20, 1, 2, 3, 4, 5, 6, 7, 8, 9, 10, 11, 12, 13, 14, 15, 16, 17, 18, 19, 20, 21, 22, 23, 24, 25 or more). In certain embodiments, DS is 95%-100%. In certain embodiments, each internucleotidic linkage is independently chirally controlled, and CIL is the number of chirally controlled internucleotidic linkages.

[0870] As examples, certain dsRNAi oligonucleotides comprising certain example base sequences, nucleobase modifications and patterns thereof, sugar modifications and patterns thereof, internucleotidic linkages and patterns thereof, linkage phosphorus stereochemistry and patterns thereof, linkers, and/or additional chemical moieties are presented in Table 1, below. Among other things, ds oligonucleotides, e.g., those in Table 1A, may be utilized to target a transcript, e.g., to reduce the level of a transcript and/or a product thereof

TABLE 1
Example Oligonucleotides/Compositions that target TTR.

| | | | Stereochemistry/ |
|---|---|---|---|
| ID | Description | Naked Sequence | linkage |
| WV-46497 | mUn001RfU*SmAmUmAfGmAmGmCmAmAmGmAfAmCfAmCmUmG | UUAUAGAGCAAGAACACUGUU | nRSOOOOOOOOOOOOOOOO |
| | mUmU*SmU*SmU | UU | OOSS |
| WV-46498 | mU*RfUn001RmAmUmAfGmAmGmCmAmAmGmAfAmCfAmCmUmG | UUAUAGAGCAAGAACACUGUU | RnROOOOOOOOOOOOOOOO |
| | mUmU*SmU*SmU | UU | OOSS |
| WV-46499 | mU*RfU*SmAn001RmUmAfGmAmGmCmAmAmGmAfAmCfAmCmU | UUAUAGAGCAAGAACACUGUU | RSnROOOOOOOOOOOOOOO |
| | mGmUmU*SmU*SmU | UU | OOSS |
| WV-46500 | mU*RfU*SmAmUn001RmAfGmAmGmCmAmAmGmAfAmCfAmCmU | UUAUAGAGCAAGAACACUGUU | RSOnROOOOOOOOOOOOOO |
| | mGmUmU*SmU*SmU | UU | OOSS |
| WV-46501 | mU*RfU*SmAmUmAn001RfGmAmGmCmAmAmGmAfAmCfAmCmU | UUAUAGAGCAAGAACACUGUU | RSOOnROOOOOOOOOOOOO |
| | mGmUmU*SmU*SmU | UU | OOSS |
| WV-46502 | mU*RfU*SmAmUmAfGn001RmAmGmCmAmAmGmAfAmCfAmCmU | UUAUAGAGCAAGAACACUGUU | RSOOOnROOOOOOOOOOOO |
| | mGmUmU*SmU*SmU | UU | OOSS |
| WV-46503 | mU*RfU*SmAmUmAfGmAn001RmGmCmAmAmGmAfAmCfAmCmU | UUAUAGAGCAAGAACACUGUU | RSOOOOnROOOOOOOOOOO |
| | mGmUmU*SmU*SmU | UU | OOSS |
| WV-46504 | mU*RfU*SmAmUmAfGmAmGn001RmCmAmAmGmAfAmCfAmCmU | UUAUAGAGCAAGAACACUGUU | RSOOOOOnROOOOOOOOOO |
| | mGmUmU*SmU*SmU | UU | OOSS |
| WV-46505 | mU*RfU*SmAmUmAfGmAmGmCn001RmAmAmGmAfAmCfAmCmU | UUAUAGAGCAAGAACACUGUU | RSOOOOOOnROOOOOOOOO |
| | mGmUmU*SmU*SmU | UU | OOSS |
| WV-46506 | mU*RfU*SmAmUmAfGmAmGmCmAn001RmAmGmAfAmCfAmCmU | UUAUAGAGCAAGAACACUGUU | RSOOOOOOOnROOOOOOOO |
| | mGmUmU*SmU*SmU | UU | OOSS |
| WV-46507 | mU*RfU*SmAmUmAfGmAmGmCmAmAn001RmGmAfAmCfAmCmU | UUAUAGAGCAAGAACACUGUU | RSOOOOOOOOnROOOOOOO |
| | mGmUmU*SmU*SmU | UU | OOSS |
| WV-46508 | mU*RfU*SmAmUmAfGmAmGmCmAmAmGn001RmAfAmCfAmCmU | UUAUAGAGCAAGAACACUGUU | RSOOOOOOOOOnROOOOOO |
| | mGmUmU*SmU*SmU | UU | OOSS |
| WV-46509 | mU*RfU*SmAmUmAfGmAmGmCmAmAmGmAn001RfAmCfAmCmU | UUAUAGAGCAAGAACACUGUU | RSOOOOOOOOOOnROOOOO |
| | mGmUmU*SmU*SmU | UU | OOSS |
| WV-46510 | mU*RfU*SmAmUmAfGmAmGmCmAmAmGmAfAn001RmCfAmCmU | UUAUAGAGCAAGAACACUGUU | RSOOOOOOOOOOOnROOOO |
| | mGmUmU*SmU*SmU | UU | OOSS |
| WV-46511 | mU*RfU*SmAmUmAfGmAmGmCmAmAmGmAfAmCn001RfAmCmU | UUAUAGAGCAAGAACACUGUU | RSOOOOOOOOOOOOnROOO |
| | mGmUmU*SmU*SmU | UU | OOSS |
| WV-46512 | mU*RfU*SmAmUmAfGmAmGmCmAmAmGmAfAmCfAn001RmCmU | UUAUAGAGCAAGAACACUGUU | RSOOOOOOOOOOOOOnROO |
| | mGmUmU*SmU*SmU | UU | OOSS |
| WV-46513 | mU*RfU*SmAmUmAfGmAmGmCmAmAmGmAfAmCfAmCn001RmU | UUAUAGAGCAAGAACACUGUU | RSOOOOOOOOOOOOOOnRO |
| | mGmUmU*SmU*SmU | UU | OOSS |
| WV-46514 | mU*RfU*SmAmUmAfGmAmGmCmAmAmGmAfAmCfAmCmUn001R | UUAUAGAGCAAGAACACUGUU | RSOOOOOOOOOOOOOOOnR |
| | mGmUmU*SmU*SmU | UU | OOSS |
| WV-46515 | mU*RfU*SmAmUmAfGmAmGmCmAmAmGmAfAmCfAmCmUmGn00 | UUAUAGAGCAAGAACACUGUU | RSOOOOOOOOOOOOOOOOn |
| | 1RmUmU*SmU*SmU | UU | ROSS |
| WV-46516 | mU*RfU*SmAmUmAfGmAmGmCmAmAmGmAfAmCfAmCmUmGmUn | UUAUAGAGCAAGAACACUGUU | RSOOOOOOOOOOOOOOOOO |
| | 001RmU*SmU*SmU | UU | nRSS |
| WV-46517 | mU*RfU*SmAmUmAfGmAmGmCmAmAmGmAfAmCfAmCmUmGmUm | UUAUAGAGCAAGAACACUGUU | RSOOOOOOOOOOOOOOOOO |
| | Un001RmU*SmU | UU | OnRS |
| WV-46518 | mU*RfU*SmAmUmAfGmAmGmCmAmAmGmAfAmCfAmCmUmGmUm | UUAUAGAGCAAGAACACUGUU | RSOOOOOOOOOOOOOOOOO |
| | U*SmUn001RmU | UU | OSnR |
| WV-46519 | mUn001SfU*SmAmUmAfGmAmGmCmAmAmGmAfAmCfAmCmUmG | UUAUAGAGCAAGAACACUGUU | nSSOOOOOOOOOOOOOOOO |
| | mUmU*SmU*SmU | UU | OOSS |
| WV-46520 | mU*RfUn001SmAmUmAfGmAmGmCmAmAmGmAfAmCfAmCmUmG | UUAUAGAGCAAGAACACUGUU | RnSOOOOOOOOOOOOOOOO |
| | mUmU*SmU*SmU | UU | OOSS |
| WV-45148 | mU*RfU*SmAn001SmUmAfGmAmGmCmAmAmGmAfAmCfAmCmU | UUAUAGAGCAAGAACACUGUU | RSnSOOOOOOOOOOOOOOO |
| | mGmUmU*SmU*SmU | UU | OOSS |
| WV-46521 | mU*RfU*SmAmUn001SmAfGmAmGmCmAmAmGmAfAmCfAmCmU | UUAUAGAGCAAGAACACUGUU | RSOnSOOOOOOOOOOOOOO |
| | mGmUmU*SmU*SmU | UU | OOSS |
| WV-46522 | mU*RfU*SmAmUmAn001SfGmAmGmCmAmAmGmAfAmCfAmCmU | UUAUAGAGCAAGAACACUGUU | RSOOnSOOOOOOOOOOOOO |
| | mGmUmU*SmU*SmU | UU | OOSS |
| WV-46523 | mU*RfU*SmAmUmAfGn001SmAmGmCmAmAmGmAfAmCfAmCmU | UUAUAGAGCAAGAACACUGUU | RSOOOnSOOOOOOOOOOOO |
| | mGmUmU*SmU*SmU | UU | OOSS |
| WV-46524 | mU*RfU*SmAmUmAfGmAn001SmGmCmAmAmGmAfAmCfAmCmU | UUAUAGAGCAAGAACACUGUU | RSOOOOnSOOOOOOOOOOO |
| | mGmUmU*SmU*SmU | UU | OOSS |
| WV-46525 | mU*RfU*SmAmUmAfGmAmGn001SmCmAmAmGmAfAmCfAmCmU | UUAUAGAGCAAGAACACUGUU | RSOOOOOnSOOOOOOOOOO |
| | mGmUmU*SmU*SmU | UU | OOSS |
| WV-46526 | mU*RfU*SmAmUmAfGmAmGmCn001SmAmAmGmAfAmCfAmCmU | UUAUAGAGCAAGAACACUGUU | RSOOOOOOnSOOOOOOOOO |
| | mGmUmU*SmU*SmU | UU | OOSS |
| WV-45147 | mU*RfU*SmAmUmAfGmAmGmCmAn001SmAmGmAfAmCfAmCmU | UUAUAGAGCAAGAACACUGUU | RSOOOOOOOnSOOOOOOOO |
| | mGmUmU*SmU*SmU | UU | OOSS |
| WV-46527 | mU*RfU*SmAmUmAfGmAmGmCmAmAn001SmGmAfAmCfAmCmU | UUAUAGAGCAAGAACACUGUU | RSOOOOOOOOnSOOOOOOO |
| | mGmUmU*SmU*SmU | UU | OOSS |
| WV-46528 | mU*RfU*SmAmUmAfGmAmGmCmAmAmGn001SmAfAmCfAmCmU | UUAUAGAGCAAGAACACUGUU | RSOOOOOOOOOn$OOOOOO |
| | mGmUmU*SmU*SmU | UU | OOSS |
| WV-46529 | mU*RfU*SmAmUmAfGmAmGmCmAmAmGmAn001SfAmCfAmCmU | UUAUAGAGCAAGAACACUGUU | RSOOOOOOOOOOnSOOOOO |
| | mGmUmU*SmU*SmU | UU | OOSS |
| WV-46530 | mU*RfU*SmAmUmAfGmAmGmCmAmAmGmAfAn001SmCfAmCmU | UUAUAGAGCAAGAACACUGUU | RSOOOOOOOOOOOnSOOOO |
| | mGmUmU*SmU*SmU | UU | OOSS |
| WV-46531 | mU*RfU*SmAmUmAfGmAmGmCmAmAmGmAfAmCn001SfAmCmU | UUAUAGAGCAAGAACACUGUU | RSOOOOOOOOOOOOnSOOO |
| | mGmUmU*SmU*SmU | UU | OOSS |
| WV-46532 | mU*RfU*SmAmUmAfGmAmGmCmAmAmGmAfAmCfAn001SmCmU | UUAUAGAGCAAGAACACUGUU | RSOOOOOOOOOOOOOnSOO |
| | mGmUmU*SmU*SmU | UU | OOSS |
| WV-46533 | mU*RfU*SmAmUmAfGmAmGmCmAmAmGmAfAmCfAmCn001SmU | UUAUAGAGCAAGAACACUGUU | RSOOOOOOOOOOOOOOnSO |
| | mGmUmU*SmU*SmU | UU | OOSS |
| WV-46534 | mU*RfU*SmAmUmAfGmAmGmCmAmAmGmAfAmCfAmCmUn001S | UUAUAGAGCAAGAACACUGUU | RSOOOOOOOOOOOOOOOnS |
| | mGmUmU*SmU*SmU | UU | OOSS |
| WV-45146 | mU*RfU*SmAmUmAfGmAmGmCmAmAmGmAfAmCfAmCmUmGn00 | UUAUAGAGCAAGAACACUGUU | RSOOOOOOOOOOOOOOOOn |
| | 1SmUmU*SmU*SmU | UU | SOSS |
| WV-46535 | mU*RfU*SmAmUmAfGmAmGmCmAmAmGmAfAmCfAmCmUmGmUn | UUAUAGAGCAAGAACACUGUU | RSOOOOOOOOOOOOOOOOO |
| | 001SmU*SmU*SmU | UU | nSSS |
| WV-46536 | mU*RfU*SmAmUmAfGmAmGmCmAmAmGmAfAmCfAmCmUmGmUm | UUAUAGAGCAAGAACACUGUU | RSOOOOOOOOOOOOOOOOO |
| | Un001SmU*SmU | UU | OnSS |
| WV-46537 | mU*RfU*SmAmUmAfGmAmGmCmAmAmGmAfAmCfAmCmUmGmUm | UUAUAGAGCAAGAACACUGUU | RSOOOOOOOOOOOOOOOOO |
| | U*SmUn001SmU | UU | OSnS |
| WV-46538 | mUn001RfU*RmAmUmAfGmAmGmCmAmAmGmAfAmCfAmCmUmG | UUAUAGAGCAAGAACACUGUU | nRROOOOOOOOOOOOOOOO |
| | mUmU*SmU*SmU | UU | OOSS |
| WV-46539 | mU*SfUn001RmAmUmAfGmAmGmCmAmAmGmAfAmCfAmCmUmG | UUAUAGAGCAAGAACACUGUU | SnROOOOOOOOOOOOOOOO |
| | mUmU*SmU*SmU | UU | OOSS |
| WV-46540 | mU*SfU*RmAn001RmUmAfGmAmGmCmAmAmGmAfAmCfAmCmU | UUAUAGAGCAAGAACACUGUU | SRnROOOOOOOOOOOOOOO |
| | mGmUmU*SmU*SmU | UU | OOSS |
| WV-46541 | mU*SfU*RmAmUn001RmAfGmAmGmCmAmAmGmAfAmCfAmCmU | UUAUAGAGCAAGAACACUGUU | SROnROOOOOOOOOOOOOO |
| | mGmUmU*SmU*SmU | UU | OOSS |
| WV-46542 | mU*SfU*RmAmUmAn001RfGmAmGmCmAmAmGmAfAmCfAmCmU | UUAUAGAGCAAGAACACUGUU | SROOnROOOOOOOOOOOOO |
| | mGmUmU*SmU*SmU | UU | OOSS |
| WV-46543 | mU*SfU*RmAmUmAfGn001RmAmGmCmAmAmGmAfAmCfAmCmU | UUAUAGAGCAAGAACACUGUU | SROOOnROOOOOOOOOOOO |
| | mGmUmU*SmU*SmU | UU | OOSS |
| WV-46544 | mU*SfU*RmAmUmAfGmAn001RmGmCmAmAmGmAfAmCfAmCmU | UUAUAGAGCAAGAACACUGUU | SROOOOnROOOOOOOOOOO |
| | mGmUmU*SmU*SmU | UU | OOSS |
| WV-46545 | mU*SfU*RmAmUmAfGmAmGn001RmCmAmAmGmAfAmCfAmCmU | UUAUAGAGCAAGAACACUGUU | SROOOOOnROOOOOOOOOO |
| | mGmUmU*SmU*SmU | UU | OOSS |
| WV-46546 | mU*SfU*RmAmUmAfGmAmGmCn001RmAmAmGmAfAmCfAmCmU | UUAUAGAGCAAGAACACUGUU | SROOOOOOnROOOOOOOOO |
| | mGmUmU*SmU*SmU | UU | OOSS |
| WV-46547 | mU*SfU*RmAmUmAfGmAmGmCmAn001RmAmGmAfAmCfAmCmU | UUAUAGAGCAAGAACACUGUU | SROOOOOOOnROOOOOOOO |
| | mGmUmU*SmU*SmU | UU | OOSS |
| WV-46548 | mU*SfU*RmAmUmAfGmAmGmCmAmAn001RmGmAfAmCfAmCmU | UUAUAGAGCAAGAACACUGUU | SROOOOOOOOnROOOOOOO |
| | mGmUmU*SmU*SmU | UU | OOSS |
| WV-46549 | mU*SfU*RmAmUmAfGmAmGmCmAmAmGn001RmAfAmCfAmCmU | UUAUAGAGCAAGAACACUGUU | SROOOOOOOOOnROOOOOO |
| | mGmUmU*SmU*SmU | UU | OOSS |
| WV-46550 | mU*SfU*RmAmUmAfGmAmGmCmAmAmGmAn001RfAmCfAmCmU | UUAUAGAGCAAGAACACUGUU | SROOOOOOOOOOnROOOOO |
| | mGmUmU*SmU*SmU | UU | OOSS |
| WV-46551 | mU*SfU*RmAmUmAfGmAmGmCmAmAmGmAfAn001RmCfAmCmU | UUAUAGAGCAAGAACACUGUU | SROOOOOOOOOOOnROOOO |
| | mGmUmU*SmU*SmU | UU | OOSS |
| WV-46552 | mU*SfU*RmAmUmAfGmAmGmCmAmAmGmAfAmCn001RfAmCmU | UUAUAGAGCAAGAACACUGUU | SROOOOOOOOOOOOnROOO |
| | mGmUmU*SmU*SmU | UU | OOSS |
| WV-46553 | mU*SfU*RmAmUmAfGmAmGmCmAmAmGmAfAmCfAn001RmCmU | UUAUAGAGCAAGAACACUGUU | SROOOOOOOOOOOOOnROO |
| | mGmUmU*SmU*SmU | UU | OOSS |
| WV-46554 | mU*SfU*RmAmUmAfGmAmGmCmAmAmGmAfAmCfAmCn001RmU | UUAUAGAGCAAGAACACUGUU | SROOOOOOOOOOOOOOnRO |
| | mGmUmU*SmU*SmU | UU | OOSS |
| WV-46555 | mU*SfU*RmAmUmAfGmAmGmCmAmAmGmAfAmCfAmCmUn001R | UUAUAGAGCAAGAACACUGUU | SROOOOOOOOOOOOOOOnR |
| | mGmUmU*SmU*SmU | UU | OOSS |
| WV-46556 | mU*SfU*RmAmUmAfGmAmGmCmAmAmGmAfAmCfAmCmUmGn00 | UUAUAGAGCAAGAACACUGUU | SROOOOOOOOOOOOOOOOn |
| | 1RmUmU*SmU*SmU | UU | ROSS |
| WV-46557 | mU*SfU*RmAmUmAfGmAmGmCmAmAmGmAfAmCfAmCmUmGmUn | UUAUAGAGCAAGAACACUGUU | SROOOOOOOOOOOOOOOOO |
| | 001RmU*SmU*SmU | UU | nRSS |
| WV-46558 | mU*SfU*RmAmUmAfGmAmGmCmAmAmGmAfAmCfAmCmUmGmUm | UUAUAGAGCAAGAACACUGUU | SROOOOOOOOOOOOOOOOO |
| | Un001RmU*SmU | UU | OnRS |
| WV-46559 | mU*SfU*RmAmUmAfGmAmGmCmAmAmGmAfAmCfAmCmUmGmUm | UUAUAGAGCAAGAACACUGUU | SROOOOOOOOOOOOOOOOO |
| | U*SmUn001RmU | UU | OSnR |
| WV-46560 | mUn001SfU*RmAmUmAfGmAmGmCmAmAmGmAfAmCfAmCmUmG | UUAUAGAGCAAGAACACUGUU | nSROOOOOOOOOOOOOOOO |
| | mUmU*SmU*SmU | UU | OOSS |
| WV-46561 | mU*SfUn001SmAmUmAfGmAmGmCmAmAmGmAfAmCfAmCmUmG | UUAUAGAGCAAGAACACUGUU | SnSOOOOOOOOOOOOOOOO |
| | mUmU*SmU*SmU | UU | OOSS |
| WV-44453 | mU*SfU*RmAn001SmUmAfGmAmGmCmAmAmGmAfAmCfAmCmU | UUAUAGAGCAAGAACACUGUU | SRnSOOOOOOOOOOOOOOO |
| | mGmUmU*SmU*SmU | UU | OOSS |
| WV-46562 | mU*SfU*RmAmUn001SmAfGmAmGmCmAmAmGmAfAmCfAmCmU | UUAUAGAGCAAGAACACUGUU | SROnSOOOOOOOOOOOOOO |
| | mGmUmU*SmU*SmU | UU | OOSS |
| WV-46563 | mU*SfU*RmAmUmAn001SfGmAmGmCmAmAmGmAfAmCfAmCmU | UUAUAGAGCAAGAACACUGUU | SROOnSOOOOOOOOOOOOO |
| | mGmUmU*SmU*SmU | UU | OOSS |
| WV-46564 | mU*SfU*RmAmUmAfGn001SmAmGmCmAmAmGmAfAmCfAmCmU | UUAUAGAGCAAGAACACUGUU | SROOOnSOOOOOOOOOOOO |
| | mGmUmU*SmU*SmU | UU | OOSS |
| WV-46565 | mU*SfU*RmAmUmAfGmAn001SmGmCmAmAmGmAfAmCfAmCmU | UUAUAGAGCAAGAACACUGUU | SROOOOnSOOOOOOOOOOO |
| | mGmUmU*SmU*SmU | UU | OOSS |
| WV-46566 | mU*SfU*RmAmUmAfGmAmGn001SmCmAmAmGmAfAmCfAmCmU | UUAUAGAGCAAGAACACUGUU | SROOOOOnSOOOOOOOOOO |
| | mGmUmU*SmU*SmU | UU | OOSS |
| WV-46567 | mU*SfU*RmAmUmAfGmAmGmCn001SmAmAmGmAfAmCfAmCmU | UUAUAGAGCAAGAACACUGUU | SROOOOOOnSOOOOOOOOO |
| | mGmUmU*SmU*SmU | UU | OOSS |
| WV-44452 | mU*SfU*RmAmUmAfGmAmGmCmAn001SmAmGmAfAmCfAmCmU | UUAUAGAGCAAGAACACUGUU | SROOOOOOOnSOOOOOOOO |
| | mGmUmU*SmU*SmU | UU | OOSS |
| WV-46568 | mU*SfU*RmAmUmAfGmAmGmCmAmAn001SmGmAfAmCfAmCmU | UUAUAGAGCAAGAACACUGUU | SROOOOOOOOnSOOOOOOO |
| | mGmUmU*SmU*SmU | UU | OOSS |
| WV-46569 | mU*SfU*RmAmUmAfGmAmGmCmAmAmGn001SmAfAmCfAmCmU | UUAUAGAGCAAGAACACUGUU | SROOOOOOOOOnSOOOOOO |
| | mGmUmU*SmU*SmU | UU | OOSS |
| WV-46570 | mU*SfU*RmAmUmAfGmAmGmCmAmAmGmAn001SfAmCfAmCmU | UUAUAGAGCAAGAACACUGUU | SROOOOOOOOOOnSOOOOO |
| | mGmUmU*SmU*SmU | UU | OOSS |
| WV-46571 | mU*SfU*RmAmUmAfGmAmGmCmAmAmGmAfAn001SmCfAmCmU | UUAUAGAGCAAGAACACUGUU | SROOOOOOOOOOOn$OOOO |
| | mGmUmU*SmU*SmU | UU | OOSS |
| WV-46572 | mU*SfU*RmAmUmAfGmAmGmCmAmAmGmAfAmCn001SfAmCmU | UUAUAGAGCAAGAACACUGUU | SROOOOOOOOOOOOnSOOO |
| | mGmUmU*SmU*SmU | UU | OOSS |
| WV-46573 | mU*SfU*RmAmUmAfGmAmGmCmAmAmGmAfAmCfAn001SmCmU | UUAUAGAGCAAGAACACUGUU | SROOOOOOOOOOOOOnSOO |
| | mGmUmU*SmU*SmU | UU | OOSS |
| WV-46574 | mU*SfU*RmAmUmAfGmAmGmCmAmAmGmAfAmCfAmCn001SmU | UUAUAGAGCAAGAACACUGUU | SROOOOOOOOOOOOOOnSO |
| | mGmUmU*SmU*SmU | UU | OOSS |
| WV-46575 | mU*SfU*RmAmUmAfGmAmGmCmAmAmGmAfAmCfAmCmUn001S | UUAUAGAGCAAGAACACUGUU | SROOOOOOOOOOOOOOOnS |
| | mGmUmU*SmU*SmU | UU | OOSS |
| WV-44451 | mU*SfU*RmAmUmAfGmAmGmCmAmAmGmAfAmCfAmCmUmGn00 | UUAUAGAGCAAGAACACUGUU | SROOOOOOOOOOOOOOOOn |
| | 1SmUmU*SmU*SmU | UU | SOSS |
| WV-46576 | mU*SfU*RmAmUmAfGmAmGmCmAmAmGmAfAmCfAmCmUmGmUn | UUAUAGAGCAAGAACACUGUU | SROOOOOOOOOOOOOOOOO |
| | 001SmU*SmU*SmU | UU | nSSS |
| WV-46577 | mU*SfU*RmAmUmAfGmAmGmCmAmAmGmAfAmCfAmCmUmGmUm | UUAUAGAGCAAGAACACUGUU | SROOOOOOOOOOOOOOOOO |
| | Un001SmU*SmU | UU | OnSS |
| WV-44457 | mU*SfU*RmAmUmAfGmAmGmCmAmAmGmAfAmCfAmCmUmGmUm | UUAUAGAGCAAGAACACUGUU | SROOOOOOOOOOOOOOOOO |
| | U*SmUn001SmU | UU | OSnS |
| WV-43774 | mU*RfU*SmAmUmAfGmAmGmCmAmAmGmAfAmCfAmCmUmGmUm | UUAUAGAGCAAGAACACUGUU | RSOOOOOOOOOOOOOOOOO |
| | U*SmU*SmU | UU | OSS |
| WV-47066 | mU*RfUn001RfAmUmAfGmAmGmCmAmAmGmAfAmCfAmCmUmG | UUAUAGAGCAAGAACACUGUU | RnROOOOOOOOOOOOOOOO |
| | mUmU*SmU*SmU | UU | OOSS |
| WV-47067 | mU*RfU*SmAn001RfUmAfGmAmGmCmAmAmGmAfAmCfAmCmU | UUAUAGAGCAAGAACACUGUU | RSnROOOOOOOOOOOOOOO |
| | mGmUmU*SmU*SmU | UU | OOSS |
| WV-47068 | mU*RfU*SmAmUn001RfAfGmAmGmCmAmAmGmAfAmCfAmCmU | UUAUAGAGCAAGAACACUGUU | RSOnROOOOOOOOOOOOOO |
| | mGmUmU*SmU*SmU | UU | OOSS |
| WV-47069 | mU*RfU*SmAmUmAfGn001RfAmGmCmAmAmGmAfAmCfAmCmU | UUAUAGAGCAAGAACACUGUU | RSOOOnROOOOOOOOOOOO |
| | mGmUmU*SmU*SmU | UU | OOSS |
| WV-47070 | mU*RfU*SmAmUmAfGmAn001RfGmCmAmAmGmAfAmCfAmCmU | UUAUAGAGCAAGAACACUGUU | RSOOOOnROOOOOOOOOOO |
| | mGmUmU*SmU*SmU | UU | OOSS |
| WV-47071 | mU*RfU*SmAmUmAfGmAmGn001RfCmAmAmGmAfAmCfAmCmU | UUAUAGAGCAAGAACACUGUU | RSOOOOOnROOOOOOOOOO |
| | mGmUmU*SmU*SmU | UU | OOSS |
| WV-47072 | mU*RfU*SmAmUmAfGmAmGmCn001RfAmAmGmAfAmCfAmCmU | UUAUAGAGCAAGAACACUGUU | RSOOOOOOnROOOOOOOOO |
| | mGmUmU*SmU*SmU | UU | OOSS |
| WV-47073 | mU*RfU*SmAmUmAfGmAmGmCmAn001RfAmGmAfAmCfAmCmU | UUAUAGAGCAAGAACACUGUU | RSOOOOOOOnROOOOOOOO |
| | mGmUmU*SmU*SmU | UU | OOSS |
| WV-47074 | mU*RfU*SmAmUmAfGmAmGmCmAmAn001RfGmAfAmCfAmCmU | UUAUAGAGCAAGAACACUGUU | RSOOOOOOOOnROOOOOOO |
| | mGmUmU*SmU*SmU | UU | OOSS |
| WV-47075 | mU*RfU*SmAmUmAfGmAmGmCmAmAmGn001RfAfAmCfAmCmU | UUAUAGAGCAAGAACACUGUU | RSOOOOOOOOOnROOOOOO |
| | mGmUmU*SmU*SmU | UU | OOSS |
| WV-47076 | mU*RfU*SmAmUmAfGmAmGmCmAmAmGmAfAn001RfCfAmCmU | UUAUAGAGCAAGAACACUGUU | RSOOOOOOOOOOOnROOOO |
| | mGmUmU*SmU*SmU | UU | oOSS |
| WV-47077 | mU*RfU*SmAmUmAfGmAmGmCmAmAmGmAfAmCfAn001RfCmU | UUAUAGAGCAAGAACACUGUU | RSOOOOOOOOOOOOOnROO |
| | mGmUmU*SmU*SmU | UU | OOSS |
| WV-47078 | mU*RfU*SmAmUmAfGmAmGmCmAmAmGmAfAmCfAmCn001RfU | UUAUAGAGCAAGAACACUGUU | RSOOOOOOOOOOOOOOnRO |
| | mGmUmU*SmU*SmU | UU | OOSS |
| WV-47079 | mU*RfU*SmAmUmAfGmAmGmCmAmAmGmAfAmCfAmCmUn001R | UUAUAGAGCAAGAACACUGUU | RSOOOOOOOOOOOOOOOnR |
| | fGmUmU*SmU*SmU | UU | OOSS |
| WV-47080 | mU*RfU*SmAmUmAfGmAmGmCmAmAmGmAfAmCfAmCmUmGn00 | UUAUAGAGCAAGAACACUGUU | RSOOOOOOOOOOOOOOOOn |
| | 1RfUmU*SmU*SmU | UU | ROSS |
| WV-47081 | mU*RfU*SmAmUmAfGmAmGmCmAmAmGmAfAmCfAmCmUmGmUn | UUAUAGAGCAAGAACACUGUU | RSOOOOOOOOOOOOOOOOO |
| | 001RfU*SmU*SmU | UU | nRSS |
| WV-47082 | mU*RfU*SmAmUmAfGmAmGmCmAmAmGmAfAmCfAmCmUmGmUm | UUAUAGAGCAAGAACACUGUU | RSOOOOOOOOOOOOOOOOO |
| | Un001RfU*SmU | UU | OnRS |
| WV-47083 | mU*RfU*SmAmUmAfGmAmGmCmAmAmGmAfAmCfAmCmUmGmUm | UUAUAGAGCAAGAACACUGUU | RSOOOOOOOOOOOOOOOOO |
| | U*SmUn001RfU | UU | OSnR |
| WV-47084 | mU*RfUn001SfAmUmAfGmAmGmCmAmAmGmAfAmCfAmCmUmG | UUAUAGAGCAAGAACACUGUU | RnSOOOOOOOOOOOOOOOO |
| | mUmU*SmU*SmU | UU | OOSS |
| WV-47085 | mU*RfU*SmAn001SfUmAfGmAmGmCmAmAmGmAfAmCfAmCmU | UUAUAGAGCAAGAACACUGUU | RSnSOOOOOOOOOOOOOOO |
| | mGmUmU*SmU*SmU | UU | OOSS |
| WV-47086 | mU*RfU*SmAmUn001SfAfGmAmGmCmAmAmGmAfAmCfAmCmU | UUAUAGAGCAAGAACACUGUU | RSOnSOOOOOOOOOOOOOO |
| | mGmUmU*SmU*SmU | UU | OOSS |
| WV-47087 | mU*RfU*SmAmUmAfGn001SfAmGmCmAmAmGmAfAmCfAmCmU | UUAUAGAGCAAGAACACUGUU | RSOOOnSOOOOOOOOOOOO |
| | mGmUmU*SmU*SmU | UU | OOSS |
| WV-47088 | mU*RfU*SmAmUmAfGmAn001SfGmCmAmAmGmAfAmCfAmCmU | UUAUAGAGCAAGAACACUGUU | RSOOOOnSOOOOOOOOOOO |
| | mGmUmU*SmU*SmU | UU | OOSS |
| WV-47089 | mU*RfU*SmAmUmAfGmAmGn001SfCmAmAmGmAfAmCfAmCmU | UUAUAGAGCAAGAACACUGUU | RSOOOOOnSOOOOOOOOOO |
| | mGmUmU*SmU*SmU | UU | OOSS |
| WV-47090 | mU*RfU*SmAmUmAfGmAmGmCn001SfAmAmGmAfAmCfAmCmU | UUAUAGAGCAAGAACACUGUU | RSOOOOOOnSOOOOOOOOO |
| | mGmUmU*SmU*SmU | UU | OOSS |
| WV-47091 | mU*RfU*SmAmUmAfGmAmGmCmAn001SfAmGmAfAmCfAmCmU | UUAUAGAGCAAGAACACUGUU | RSOOOOOOOnSOOOOOOOO |
| | mGmUmU*SmU*SmU | UU | OOSS |
| WV-47092 | mU*RfU*SmAmUmAfGmAmGmCmAmAn001SfGmAfAmCfAmCmU | UUAUAGAGCAAGAACACUGUU | RSOOOOOOOOnSOOOOOOO |
| | mGmUmU*SmU*SmU | UU | OOSS |
| WV-47093 | mU*RfU*SmAmUmAfGmAmGmCmAmAmGn001SfAfAmCfAmCmU | UUAUAGAGCAAGAACACUGUU | RSOOOOOOOOOnSOOOOOO |
| | mGmUmU*SmU*SmU | UU | OOSS |
| WV-47094 | mU*RfU*SmAmUmAfGmAmGmCmAmAmGmAfAn001SfCfAmCmU | UUAUAGAGCAAGAACACUGUU | RSOOOOOOOOOOOnSOOOO |
| | mGmUmU*SmU*SmU | UU | OOSS |
| WV-47095 | mU*RfU*SmAmUmAfGmAmGmCmAmAmGmAfAmCfAn001SfCmU | UUAUAGAGCAAGAACACUGUU | RSOOOOOOOOOOOOOnSOO |
| | mGmUmU*SmU*SmU | UU | OOSS |
| WV-47096 | mU*RfU*SmAmUmAfGmAmGmCmAmAmGmAfAmCfAmCn001SfU | UUAUAGAGCAAGAACACUGUU | RSOOOOOOOOOOOOOOnSO |
| | mGmUmU*SmU*SmU | UU | OOSS |
| WV-47097 | mU*RfU*SmAmUmAfGmAmGmCmAmAmGmAfAmCfAmCmUn001S | UUAUAGAGCAAGAACACUGUU | RSOOOOOOOOOOOOOOOnS |
| | fGmUmU*SmU*SmU | UU | OOSS |
| WV-47098 | mU*RfU*SmAmUmAfGmAmGmCmAmAmGmAfAmCfAmCmUmGn00 | UUAUAGAGCAAGAACACUGUU | RSOOOOOOOOOOOOOOOOn |
| | 1SfUmU*SmU*SmU | UU | SOSS |
| WV-47099 | mU*RfU*SmAmUmAfGmAmGmCmAmAmGmAfAmCfAmCmUmGmUn | UUAUAGAGCAAGAACACUGUU | RSOOOOOOOOOOOOOOOOO |
| | 001SfU*SmU*SmU | UU | nSSS |
| WV-47100 | mU*RfU*SmAmUmAfGmAmGmCmAmAmGmAfAmCfAmCmUmGmUm | UUAUAGAGCAAGAACACUGUU | RSOOOOOOOOOOOOOOOOO |
| | Un001SfU*SmU | UU | OnSS |
| WV-47101 | mU*RfU*SmAmUmAfGmAmGmCmAmAmGmAfAmCfAmCmUmGmUm | UUAUAGAGCAAGAACACUGUU | RSOOOOOOOOOOOOOOOOO |
| | U*SmUn001SfU | UU | OSnS |
| WV-43775 | mU*SfU*RmAmUmAfGmAmGmCmAmAmGmAfAmCfAmCmUmGmUm | UUAUAGAGCAAGAACACUGUU | SROOOOOOOOOOOOOOOOO |
| | U*SmU*SmU | UU | OSS |
| WV-47102 | mU*SfUn001RfAmUmAfGmAmGmCmAmAmGmAfAmCfAmCmUmG | UUAUAGAGCAAGAACACUGUU | SnROOOOOOOOOOOOOOOO |
| | mUmU*SmU*SmU | UU | OOSS |
| WV-47103 | mU*SfU*RmAn001RfUmAfGmAmGmCmAmAmGmAfAmCfAmCmU | UUAUAGAGCAAGAACACUGUU | SRnROOOOOOOOOOOOOOO |
| | mGmUmU*SmU*SmU | UU | OOSS |
| WV-47104 | mU*SfU*RmAmUn001RfAfGmAmGmCmAmAmGmAfAmCfAmCmU | UUAUAGAGCAAGAACACUGUU | SROnROOOOOOOOOOOOOO |
| | mGmUmU*SmU*SmU | UU | OOSS |
| WV-47105 | mU*SfU*RmAmUmAfGn001RfAmGmCmAmAmGmAfAmCfAmCmU | UUAUAGAGCAAGAACACUGUU | SROOOnROOOOOOOOOOOO |
| | mGmUmU*SmU*SmU | UU | OOSS |
| WV-47106 | mU*SfU*RmAmUmAfGmAn001RfGmCmAmAmGmAfAmCfAmCmU | UUAUAGAGCAAGAACACUGUU | SROOOOnROOOOOOOOOOO |
| | mGmUmU*SmU*SmU | UU | OOSS |
| WV-47107 | mU*SfU*RmAmUmAfGmAmGn001RfCmAmAmGmAfAmCfAmCmU | UUAUAGAGCAAGAACACUGUU | SROOOOOnROOOOOOOOOO |
| | mGmUmU*SmU*SmU | UU | OOSS |
| WV-47108 | mU*SfU*RmAmUmAfGmAmGmCn001RfAmAmGmAfAmCfAmCmU | UUAUAGAGCAAGAACACUGUU | SROOOOOOnROOOOOOOOO |
| | mGmUmU*SmU*SmU | UU | OOSS |
| WV-47109 | mU*SfU*RmAmUmAfGmAmGmCmAn001RfAmGmAfAmCfAmCmU | UUAUAGAGCAAGAACACUGUU | SROOOOOOOnROOOOOOOO |
| | mGmUmU*SmU*SmU | UU | OOSS |
| WV-47110 | mU*SfU*RmAmUmAfGmAmGmCmAmAn001RfGmAfAmCfAmCmU | UUAUAGAGCAAGAACACUGUU | SROOOOOOOOnROOOOOOO |
| | mGmUmU*SmU*SmU | UU | OOSS |
| WV-47111 | mU*SfU*RmAmUmAfGmAmGmCmAmAmGn001RfAfAmCfAmCmU | UUAUAGAGCAAGAACACUGUU | SROOOOOOOOOnROOOOOO |
| | mGmUmU*SmU*SmU | UU | OOSS |
| WV-47112 | mU*SfU*RmAmUmAfGmAmGmCmAmAmGmAfAn001RfCfAmCmU | UUAUAGAGCAAGAACACUGUU | SROOOOOOOOOOOnROOOO |
| | mGmUmU*SmU*SmU | UU | OOSS |
| WV-47113 | mU*SfU*RmAmUmAfGmAmGmCmAmAmGmAfAmCfAn001RfCmU | UUAUAGAGCAAGAACACUGUU | SROOOOOOOOOOOOOnROO |
| | mGmUmU*SmU*SmU | UU | OOSS |
| WV-47114 | mU*SfU*RmAmUmAfGmAmGmCmAmAmGmAfAmCfAmCn001RfU | UUAUAGAGCAAGAACACUGUU | SROOOOOOOOOOOOOOnRO |
| | mGmUmU*SmU*SmU | UU | OOSS |
| WV-47115 | mU*SfU*RmAmUmAfGmAmGmCmAmAmGmAfAmCfAmCmUn001R | UUAUAGAGCAAGAACACUGUU | SROOOOOOOOOOOOOOOnR |
| | fGmUmU*SmU*SmU | UU | OOSS |
| WV-47116 | mU*SfU*RmAmUmAfGmAmGmCmAmAmGmAfAmCfAmCmUmGn00 | UUAUAGAGCAAGAACACUGUU | SROOOOOOOOOOOOOOOOn |
| | 1RfUmU*SmU*SmU | UU | ROSS |
| WV-47118 | mU*SfU*RmAmUmAfGmAmGmCmAmAmGmAfAmCfAmCmUmGmUm | UUAUAGAGCAAGAACACUGUU | SROOOOOOOOOOOOOOOOO |
| | Un001RfU*SmU | UU | OnRS |
| WV-47119 | mU*SfU*RmAmUmAfGmAmGmCmAmAmGmAfAmCfAmCmUmGmUm | UUAUAGAGCAAGAACACUGUU | SROOOOOOOOOOOOOOOOO |
| | U*SmUn001RfU | UU | OSnR |
| WV-47120 | mU*SfUn001SfAmUmAfGmAmGmCmAmAmGmAfAmCfAmCmUmG | UUAUAGAGCAAGAACACUGUU | SnSOOOOOOOOOOOOOOOO |
| | mUmU*SmU*SmU | UU | OOSS |
| WV-47121 | mU*SfU*RmAn001SfUmAfGmAmGmCmAmAmGmAfAmCfAmCmU | UUAUAGAGCAAGAACACUGUU | SRnSOOOOOOOOOOOOOOO |
| | mGmUmU*SmU*SmU | UU | OOSS |
| WV-47122 | mU*SfU*RmAmUn001SfAfGmAmGmCmAmAmGmAfAmCfAmCmU | UUAUAGAGCAAGAACACUGUU | SROnSOOOOOOOOOOOOOO |
| | mGmUmU*SmU*SmU | UU | OOSS |
| WV-47123 | mU*SfU*RmAmUmAfGn001SfAmGmCmAmAmGmAfAmCfAmCmU | UUAUAGAGCAAGAACACUGUU | SROOOnSOOOOOOOOOOOO |
| | mGmUmU*SmU*SmU | UU | OOSS |
| WV-47124 | mU*SfU*RmAmUmAfGmAn001SfGmCmAmAmGmAfAmCfAmCmU | UUAUAGAGCAAGAACACUGUU | SROOOOnSOOOOOOOOOOO |
| | mGmUmU*SmU*SmU | UU | OOSS |
| WV-47125 | mU*SfU*RmAmUmAfGmAmGn001SfCmAmAmGmAfAmCfAmCmU | UUAUAGAGCAAGAACACUGUU | SROOOOOnSOOOOOOOOOO |
| | mGmUmU*SmU*SmU | UU | OOSS |
| WV-47126 | mU*SfU*RmAmUmAfGmAmGmCn001SfAmAmGmAfAmCfAmCmU | UUAUAGAGCAAGAACACUGUU | SROOOOOOnSOOOOOOOOO |
| | mGmUmU*SmU*SmU | UU | OOSS |
| WV-47127 | mU*SfU*RmAmUmAfGmAmGmCmAn001SfAmGmAfAmCfAmCmU | UUAUAGAGCAAGAACACUGUU | SROOOOOOOnSOOOOOOOO |
| | mGmUmU*SmU*SmU | UU | OOSS |
| WV-47128 | mU*SfU*RmAmUmAfGmAmGmCmAmAn001SfGmAfAmCfAmCmU | UUAUAGAGCAAGAACACUGUU | SROOOOOOOOnSOOOOOOO |
| | mGmUmU*SmU*SmU | UU | OOSS |
| WV-47129 | mU*SfU*RmAmUmAfGmAmGmCmAmAmGn001SfAfAmCfAmCmU | UUAUAGAGCAAGAACACUGUU | SROOOOOOOOOnSOOOOOO |
| | mGmUmU*SmU*SmU | UU | OOSS |
| WV-47130 | mU*SfU*RmAmUmAfGmAmGmCmAmAmGmAfAn001SfCfAmCmU | UUAUAGAGCAAGAACACUGUU | SROOOOOOOOOOOn$OOOO |
| | mGmUmU*SmU*SmU | UU | OOSS |
| WV-47131 | mU*SfU*RmAmUmAfGmAmGmCmAmAmGmAfAmCfAn001SfCmU | UUAUAGAGCAAGAACACUGUU | SROOOOOOOOOOOOOnSOO |
| | mGmUmU*SmU*SmU | UU | OOSS |
| WV-47132 | mU*SfU*RmAmUmAfGmAmGmCmAmAmGmAfAmCfAmCn001SfU | UUAUAGAGCAAGAACACUGUU | SROOOOOOOOOOOOOOnSO |
| | mGmUmU*SmU*SmU | UU | OOSS |
| WV-47133 | mU*SfU*RmAmUmAfGmAmGmCmAmAmGmAfAmCfAmCmUn001S | UUAUAGAGCAAGAACACUGUU | SROOOOOOOOOOOOOOOnS |
| | fGmUmU*SmU*SmU | UU | OOSS |
| WV-47134 | mU*SfU*RmAmUmAfGmAmGmCmAmAmGmAfAmCfAmCmUmGn00 | UUAUAGAGCAAGAACACUGUU | SROOOOOOOOOOOOOOOOn |
| | 1SfUmU*SmU*SmU | UU | SOSS |
| WV-47135 | mU*SfU*RmAmUmAfGmAmGmCmAmAmGmAfAmCfAmCmUmGmUn | UUAUAGAGCAAGAACACUGUU | SROOOOOOOOOOOOOOOOO |
| | 001SfU*SmU*SmU | UU | nSSS |
| WV-47136 | mU*SfU*RmAmUmAfGmAmGmCmAmAmGmAfAmCfAmCmUmGmUm | UUAUAGAGCAAGAACACUGUU | SROOOOOOOOOOOOOOOOO |
| | Un001SfU*SmU | UU | OnSS |
| WV-47137 | mU*SfU*RmAmUmAfGmAmGmCmAmAmGmAfAmCfAmCmUmGmUm | UUAUAGAGCAAGAACACUGUU | SROOOOOOOOOOOOOOOOO |
| | U*SmUn001SfU | UU | OSnS |
| WV-41826 | mU*fU*mAmUmAfGmAmGmCmAmAmGmAfAmCfAmCmUmGmUmU* | UUAUAGAGCAAGAACACUGUU | XXOOOOOOOOOOOOOOOOO |
| | mU*mU | UU | OXX |
| WV-41828 | Mod001L001mA*mAmCmAmGmUfGmUfUfCfUmUmGmCmUmCmU | AACAGUGUUCUUGCUCUAUAA | OXOOOOOOOOOOOOOOOOO |
| | mAmUmA*mA | | OX |
| WV-46380 | T*SfU*RmAmUmAfGmAmGmCmAmAmGmAfAmCfAmCmUmGmUmU | TUAUAGAGCAAGAACACUGUU | SROOOOOOOOOOOOOOOOO |
| | *SmU*SmU | UU | OSS |
| WV-46381 | POT*SfU*RmAmUmAfGmAmGmCmAmAmGmAfAmCfAmCmUmGmU | TUAUAGAGCAAGAACACUGUU | SROOOOOOOOOOOOOOOOO |
| | mU*SmU*SmU | UU | OSS |
| WV-46382 | PO5MSdT*SfU*RmAmUmAfGmAmGmCmAmAmGmAfAmCfAmCmU | TUAUAGAGCAAGAACACUGUU | SROOOOOOOOOOOOOOOOO |
| | mGmUmU*SmU*SmU | UU | OSS |
| WV-46383 | PO5MRdT*SfU*RmAmUmAfGmAmGmCmAmAmGmAfAmCfAmCmU | TUAUAGAGCAAGAACACUGUU | SROOOOOOOOOOOOOOOOO |
| | mGmUmU*SmU*SmU | UU | OSS |
| WV-46384 | VPT*SfU*RmAmUmAfGmAmGmCmAmAmGmAfAmCfAmCmUmGmU | TUAUAGAGCAAGAACACUGUU | SROOOOOOOOOOOOOOOOO |
| | mU*SmU*SmU | UU | OSS |
| WV-46385 | 5mspdT*SfU*RmAmUmAfGmAmGmCmAmAmGmAfAmCfAmCmUm | TUAUAGAGCAAGAACACUGUU | SROOOOOOOOOOOOOOOOO |
| | GmUmU*SmU*SmU | UU | OSS |
| WV-46386 | 5mrpdT*SfU*RmAmUmAfGmAmGmCmAmAmGmAfAmCfAmCmUm | TUAUAGAGCAAGAACACUGUU | SROOOOOOOOOOOOOOOOO |
| | GmUmU*SmU*SmU | UU | OSS |
| WV-42079 | mU*SfU*RmAn001SmUmAfGmAmGmCmAn001SmAmGmAfAmCf | UUAUAGAGCAAGAACACUGUU | SRnSOOOOOOnSOOOOOOO |
| | AmCmUmGn001SmUmU*SmU*SmU | UU | OnSOSS |
| WV-44434 | T*SfU*RmAn001SmUmAfGmAmGmCmAn001SmAmGmAfAmCfA | TUAUAGAGCAAGAACACUGUU | SRnSOOOOOOnSOOOOOOO |
| | mCmUmGn001SmUmU*SmU*SmU | UU | OnSOSS |
| WV-44435 | POT*SfU*RmAn001SmUmAfGmAmGmCmAn001SmAmGmAfAmC | TUAUAGAGCAAGAACACUGUU | SRnSOOOOOOnSOOOOOOO |
| | fAmCmUmGn001SmUmU*SmU*SmU | UU | OnsOSS |
| WV-44436 | PO5MSdT*SfU*RmAn001SmUmAfGmAmGmCmAn001SmAmGmA | TUAUAGAGCAAGAACACUGUU | SRnSOOOOOOnSOOOOOOO |
| | fAmCfAmCmUmGn001SmUmU*SmU*SmU | UU | OnSOSS |
| WV-44437 | PO5MRdT*SfU*RmAn001SmUmAfGmAmGmCmAn001SmAmGmA | TUAUAGAGCAAGAACACUGUU | SRnSOOOOOOnSOOOOOOO |
| | fAmCfAmCmUmGn001SmUmU*SmU*SmU | UU | OnSOSS |
| WV-44438 | VPT*SfU*RmAn001SmUmAfGmAmGmCmAn001SmAmGmAfAmC | TUAUAGAGCAAGAACACUGUU | SRnSOOOOOOnSOOOOOOO |
| | fAmCmUmGn001SmUmU*SmU*SmU | UU | OnSOSS |
| WV-44439 | 5mvpdT*SfU*RmAn001SmUmAfGmAmGmCmAn001SmAmGmAf | TUAUAGAGCAAGAACACUGUU | SRnSOOOOOOnSOOOOOOO |
| | AmCfAmCmUmGn001SmUmU*SmU*SmU | UU | OnSOSS |
| WV-44440 | 5mspdT*SfU*RmAn001SmUmAfGmAmGmCmAn001SmAmGmAf | TUAUAGAGCAAGAACACUGUU | SRnSOOOOOOnSOOOOOOO |
| | AmCfAmCmUmGn001SmUmU*SmU*SmU | UU | OnSOSS |
| WV-44441 | 5mrpdT*SfU*RmAn001SmUmAfGmAmGmCmAn001SmAmGmAf | TUAUAGAGCAAGAACACUGUU | SRnSOOOOOOnSOOOOOOO |
| | AmCfAmCmUmGn001SmUmU*SmU*SmU | UU | OnSOSS |
| WV-46387 | T*RfU*SmAmUmAfGmAmGmCmAmAmGmAfAmCfAmCmUmGmUmU | TUAUAGAGCAAGAACACUGUU | RSOOOOOOOOOOOOOOOOO |
| | *SmU*SmU | UU | OSS |
| WV-46388 | POT*RfU*SmAmUmAfGmAmGmCmAmAmGmAfAmCfAmCmUmGmU | TUAUAGAGCAAGAACACUGUU | RSOOOOOOOOOOOOOOOOO |
| | mU*SmU*SmU | UU | OSS |
| WV-46389 | PO5MSdT*RfU*SmAmUmAfGmAmGmCmAmAmGmAfAmCfAmCmU | TUAUAGAGCAAGAACACUGUU | RSOOOOOOOOOOOOOOOOO |
| | mGmUmU*SmU*SmU | UU | OSS |
| WV-46390 | PO5MRdT*RfU*SmAmUmAfGmAmGmCmAmAmGmAfAmCfAmCmU | TUAUAGAGCAAGAACACUGUU | RSOOOOOOOOOOOOOOOOO |
| | mGmUmU*SmU*SmU | UU | OSS |
| WV-46391 | VPT*RfU*SmAmUmAfGmAmGmCmAmAmGmAfAmCfAmCmUmGmU | TUAUAGAGCAAGAACACUGUU | RSOOOOOOOOOOOOOOOOO |
| | mU*SmU*SmU | UU | OSS |
| WV-46392 | 5mspdT*RfU*SmAmUmAfGmAmGmCmAmAmGmAfAmCfAmCmUm | TUAUAGAGCAAGAACACUGUU | RSOOOOOOOOOOOOOOOOO |
| | GmUmU*SmU*SmU | UU | OSS |
| WV-46393 | 5mrpdT*RfU*SmAmUmAfGmAmGmCmAmAmGmAfAmCfAmCmUm | TUAUAGAGCAAGAACACUGUU | RSOOOOOOOOOOOOOOOOO |
| | GmUmU*SmU*SmU | UU | OSS |
| WV-42078 | mU*RfU*SmAn001SmUmAfGmAmGmCmAn001SmAmGmAfAmCf | UUAUAGAGCAAGAACACUGUU | RSnSOOOOOOnSOOOOOOO |
| | AmCmUmGn001SmUmU*SmU*SmU | UU | OnSOSS |
| WV-46394 | T*RfU*SmAn001SmUmAfGmAmGmCmAn001SmAmGmAfAmCfA | TUAUAGAGCAAGAACACUGUU | RSnSOOOOOOnSOOOOOOO |
| | mCmUmGn001SmUmU*SmU*SmU | UU | OnSOSS |
| WV-46395 | POT*RfU*SmAn001SmUmAfGmAmGmCmAn001SmAmGmAfAmC | TUAUAGAGCAAGAACACUGUU | RSnSOOOOOOnSOOOOOOO |
| | fAmCmUmGn001SmUmU*SmU*SmU | UU | OnSOSS |
| WV-46396 | PO5MSdT*RfU*SmAn001SmUmAfGmAmGmCmAn001SmAmGmA | TUAUAGAGCAAGAACACUGUU | RSnSOOOOOOnSOOOOOOO |
| | fAmCfAmCmUmGn001SmUmU*SmU*SmU | UU | OnSOSS |
| WV-46397 | PO5MRdT*RfU*SmAn001SmUmAfGmAmGmCmAn001SmAmGmA | TUAUAGAGCAAGAACACUGUU | RSnSOOOOOOnSOOOOOOO |
| | fAmCfAmCmUmGn001SmUmU*SmU*SmU | UU | OnSOSS |
| WV-46398 | VPT*RfU*SmAn001SmUmAfGmAmGmCmAn001SmAmGmAfAmC | TUAUAGAGCAAGAACACUGUU | RSnSOOOOOOnSOOOOOOO |
| | fAmCmUmGn001SmUmU*SmU*SmU | UU | OnSOSS |
| WV-46399 | 5mspdT*RfU*SmAn001SmUmAfGmAmGmCmAn001SmAmGmAf | TUAUAGAGCAAGAACACUGUU | RSnSOOOOOOnSOOOOOOO |
| | AmCfAmCmUmGn001SmUmU*SmU*SmU | UU | OnSOSS |
| WV-46400 | 5mrpdT*RfU*SmAn001SmUmAfGmAmGmCmAn001SmAmGmAf | TUAUAGAGCAAGAACACUGUU | RSnSOOOOOOnSOOOOOOO |
| | AmCfAmCmUmGn001SmUmU*SmU*SmU | UU | OnSOSS |
| WV-42080 | Mod001L001mA*SmAmCmAmGmUfGmUfUfCfUmUmGmCmUmCm | AACAGUGUUCUUGCUCUAUAA | OSOOOOOOOOOOOOOOOOO |
| | UmAmUmA*SmA | | OS |
| WV-47144 | mU*RfU*SmAn001SfUmAfGmAmGmCmAn001SfAmGmAfAmCf | UUAUAGAGCAAGAACACUGUU | RSnSOOOOOOnSOOOOOOO |
| | AmCmUmGmUmU*SmU*SmU | UU | OOOSS |
| WV-47145 | mU*SfU*RmAn001SfUmAfGmAmGmCmAn001SfAmGmAfAmCf | UUAUAGAGCAAGAACACUGUU | SRnSOOOOOOnSOOOOOOO |
| | AmCmUmGmUmU*SmU*SmU | UU | OOOSS |
| WV-43771 | mU*SfU*RmAmUmAfGmAfGfCmAmAmGmAfAmCfAmCmUmGmUm | UUAUAGAGCAAGAACACUGUU | SROOOOOOOOOOOOOOOOO |
| | U*SmU*SmU | UU | OSS |
| WV-43773 | mU*SfU*RmAn001SmUmAfGmAfGfCmAn001SmAmGmAfAmCf | UUAUAGAGCAAGAACACUGUU | SRnSOOOOOOnSOOOOOOO |
| | AmCmUmGn001SmUmU*SmU*SmU | UU | OnSOSS |
| WV-43988 | mU*SfU*RmAn001SfUmAfGmAmGmCmAn001SfAmGmAfAmCf | UUAUAGAGCAAGAACACUGUU | SRnSOOOOOOnSOOOOOOO |
| | AmCmUmGn001SfUmU*SmU*SmU | UU | OnSOSS |
| WV-43989 | mU*SfU*RmAn001SfUmAfGmAmGmCfAn001SmAmGmAfAmCf | UUAUAGAGCAAGAACACUGUU | SRnSOOOOOOnSOOOOOOO |
| | AmCmUmGn001SfUmU*SmU*SmU | UU | OnSOSS |
| WV-43994 | mU*SfU*RfAn001SfUmAfGmAfGmCfAn001SfAmGmAfAmCf | UUAUAGAGCAAGAACACUGUU | SRnSOOOOOOnSOOOOOOO |
| | AmCfUfGn001SfUmU*SmU*SmU | UU | OnSOSS |
| WV-43996 | mU*SfU*RmAn001SfUmAfGmAfGfCmAn001SfAmGmAfAmCf | UUAUAGAGCAAGAACACUGUU | SRnSOOOOOOnSOOOOOOO |
| | AmCmUmGn001SfUmU*SmU*SmU | UU | OnSOSS |
| WV-43256 | mU*SfU*RmAn001SfUmAfGmAfGmCfAn001SmAmGmAfAmCf | UUAUAGAGCAAGAACACUGUU | SRnSOOOOOOnSOOOOOOO |
| | AmCfUmGn001SfUmU*SmU*SmU | UU | OnSOSS |
| WV-46991 | mU*fU*mAfUmAfGmAmGmCmAfAmGmAfAmCfAmCmUmGfUmU* | UUAUAGAGCAAGAACACUGUU | XXOOOOOOOOOOOOOOOOO |
| | mU*mU | UU | OXX |
| WV-46992 | mU*SfU*RmAfUmAfGmAmGmCmAfAmGmAfAmCfAmCmUmGfUm | UUAUAGAGCAAGAACACUGUU | SROOOOOOOOOOOOOOOOO |
| | U*SmU*SmU | UU | OSS |
| WV-46993 | T*SfU*RmAn001SfUmAfGmAmGmCmAn001SfAmGmAfAmCfA | TUAUAGAGCAAGAACACUGUU | SRnSOOOOOOnSOOOOOOO |
| | mCmUmGn001SfUmU*SmU*SmU | UU | OnSOSS |
| WV-46994 | POT*SfU*RmAn001SfUmAfGmAmGmCmAn001SfAmGmAfAmC | TUAUAGAGCAAGAACACUGUU | SRnSOOOOOOnSOOOOOOO |
| | fAmCmUmGn001SfUmU*SmU*SmU | UU | OnSOSS |
| WV-46995 | PO5MSdT*SfU*RmAn001SfUmAfGmAmGmCmAn001SfAmGmA | TUAUAGAGCAAGAACACUGUU | SRnSOOOOOOnSOOOOOOO |
| | fAmCfAmCmUmGn001SfUmU*SmU*SmU | UU | OnSOSS |
| WV-46996 | PO5MRdT*SfU*RmAn001SfUmAfGmAmGmCmAn001SfAmGmA | TUAUAGAGCAAGAACACUGUU | SRnSOOOOOOnSOOOOOOO |
| | fAmCfAmCmUmGn001SfUmU*SmU*SmU | UU | OnSOSS |
| WV-46997 | VPT*SfU*RmAn001SfUmAfGmAmGmCmAn001SfAmGmAfAmC | TUAUAGAGCAAGAACACUGUU | SRnSOOOOOOnSOOOOOOO |
| | fAmCmUmGn001SfUmU*SmU*SmU | UU | OnSOSS |
| WV-46998 | 5mspdT*SfU*RmAn001SfUmAfGmAmGmCmAn001SfAmGmAf | TUAUAGAGCAAGAACACUGUU | SRnSOOOOOOnSOOOOOOO |
| | AmCfAmCmUmGn001SfUmU*SmU*SmU | UU | OnSOSS |
| WV-46999 | 5mrpdT*SfU*RmAn001SfUmAfGmAmGmCmAn001SfAmGmAf | TUAUAGAGCAAGAACACUGUU | SRnSOOOOOOnSOOOOOOO |
| | AmCfAmCmUmGn001SfUmU*SmU*SmU | UU | OnSOSS |
| WV-47000 | mU*RfU*SmAfUmAfGmAmGmCmAfAmGmAfAmCfAmCmUmGfUm | UUAUAGAGCAAGAACACUGUU | RSOOOOOOOOOOOOOOOOO |
| | U*SmU*SmU | UU | OSS |
| WV-47001 | mU*RfU*SmAn001SfUmAfGmAmGmCmAn001SfAmGmAfAmCf | UUAUAGAGCAAGAACACUGUU | RSnSOOOOOOnSOOOOOOO |
| | AmCmUmGn001SfUmU*SmU*SmU | UU | OnSOSS |
| WV-47002 | T*RfU*SmAn001SfUmAfGmAmGmCmAn001SfAmGmAfAmCfA | TUAUAGAGCAAGAACACUGUU | RSnSOOOOOOnSOOOOOOO |
| | mCmUmGn001SfUmU*SmU*SmU | UU | OnSOSS |
| WV-47003 | POT*RfU*SmAn001SfUmAfGmAmGmCmAn001SfAmGmAfAmC | TUAUAGAGCAAGAACACUGUU | RSnSOOOOOOnSOOOOOOO |
| | fAmCmUmGn001SfUmU*SmU*SmU | UU | OnSOSS |
| WV-47004 | PO5MSdT*RfU*SmAn001SfUmAfGmAmGmCmAn001SfAmGmA | TUAUAGAGCAAGAACACUGUU | RSnSOOOOOOnSOOOOOOO |
| | fAmCfAmCmUmGn001SfUmU*SmU*SmU | UU | OnSOSS |
| WV-47005 | PO5MRdT*RfU*SmAn001SfUmAfGmAmGmCmAn001SfAmGmA | TUAUAGAGCAAGAACACUGUU | RSnSOOOOOOnSOOOOOOO |
| | fAmCfAmCmUmGn001SfUmU*SmU*SmU | UU | OnSOSS |
| WV-47006 | VPT*RfU*SmAn001SfUmAfGmAmGmCmAn001SfAmGmAfAmC | TUAUAGAGCAAGAACACUGUU | RSnSOOOOOOnSOOOOOOO |
| | fAmCmUmGn001SfUmU*SmU*SmU | UU | OnSOSS |
| WV-47007 | 5mspdT*RfU*SmAn001SfUmAfGmAmGmCmAn001SfAmGmAf | TUAUAGAGCAAGAACACUGUU | RSnSOOOOOOnSOOOOOOO |
| | AmCfAmCmUmGn001SfUmU*SmU*SmU | UU | OnSOSS |
| WV-47008 | 5mrpdT*RfU*SmAn001SfUmAfGmAmGmCmAn001SfAmGmAf | TUAUAGAGCAAGAACACUGUU | RSnSOOOOOOnSOOOOOOO |
| | AmCfAmCmUmGn001SfUmU*SmU*SmU | UU | OnSOSS |
| WV-47009 | mU*fU*mAfUmAfGmAfGfCmAfAmGmAfAmCfAmCmUmGfUmU* | UUAUAGAGCAAGAACACUGUU | XXOOOOOOOOOOOOOOOOO |
| | mU*mU | UU | OXX |
| WV-47010 | mU*SfU*RmAfUmAfGmAfGfCmAfAmGmAfAmCfAmCmUmGfUm | UUAUAGAGCAAGAACACUGUU | SROOOOOOOOOOOOOOOOO |
| | U*SmU*SmU | UU | OSS |
| WV-47011 | T*SfU*RmAn001SfUmAfGmAfGfCmAn001SfAmGmAfAmCfA | TUAUAGAGCAAGAACACUGUU | SRnSOOOOOOnSOOOOOOO |
| | mCmUmGn001SfUmU*SmU*SmU | UU | OnSOSS |
| WV-47012 | POT*SfU*RmAn001SfUmAfGmAfGfCmAn001SfAmGmAfAmC | TUAUAGAGCAAGAACACUGUU | SRnSOOOOOOnSOOOOOOO |
| | fAmCmUmGn001SfUmU*SmU*SmU | UU | OnSOSS |
| WV-47013 | PO5MSdT*SfU*RmAn001SfUmAfGmAfGfCmAn001SfAmGmA | TUAUAGAGCAAGAACACUGUU | SRnSOOOOOOnSOOOOOOO |
| | fAmCfAmCmUmGn001SfUmU*SmU*SmU | UU | OnSOSS |
| WV-47014 | PO5MRdT*SfU*RmAn001SfUmAfGmAfGfCmAn001SfAmGmA | TUAUAGAGCAAGAACACUGUU | SRnSOOOOOOnSOOOOOOO |
| | fAmCfAmCmUmGn001SfUmU*SmU*SmU | UU | OnSOSS |
| WV-47015 | VPT*SfU*RmAn001SfUmAfGmAfGfCmAn001SfAmGmAfAmC | TUAUAGAGCAAGAACACUGUU | SRnSOOOOOOnSOOOOOOO |
| | fAmCmUmGn001SfUmU*SmU*SmU | UU | OnSOSS |
| WV-47016 | 5mspdT*SfU*RmAn001SfUmAfGmAfGfCmAn001SfAmGmAf | TUAUAGAGCAAGAACACUGUU | SRnSOOOOOOnSOOOOOOO |
| | AmCfAmCmUmGn001SfUmU*SmU*SmU | UU | OnSOSS |
| WV-47017 | 5mrpdT*SfU*RmAn001SfUmAfGmAfGfCmAn001SfAmGmAf | TUAUAGAGCAAGAACACUGUU | SRnSOOOOOOnSOOOOOOO |
| | AmCfAmCmUmGn001SfUmU*SmU*SmU | UU | OnSOSS |
| WV-47018 | mU*RfU*SmAfUmAfGmAfGfCmAfAmGmAfAmCfAmCmUmGfUm | UUAUAGAGCAAGAACACUGUU | RSOOOOOOOOOOOOOOOOO |
| | U*SmU*SmU | UU | OSS |
| WV-47019 | mU*RfU*SmAn001SfUmAfGmAfGfCmAn001SfAmGmAfAmCf | UUAUAGAGCAAGAACACUGUU | RSnSOOOOOOnSOOOOOOO |
| | AmCmUmGn001SfUmU*SmU*SmU | UU | OnSOSS |
| WV-47020 | T*RfU*SmAn001SfUmAfGmAfGfCmAn001SfAmGmAfAmCfA | TUAUAGAGCAAGAACACUGUU | RSnSOOOOOOnSOOOOOOO |
| | mCmUmGn001SfUmU*SmU*SmU | UU | OnSOSS |
| WV-47021 | POT*RfU*SmAn001SfUmAfGmAfGfCmAn001SfAmGmAfAmC | TUAUAGAGCAAGAACACUGUU | RSnSOOOOOOnSOOOOOOO |
| | fAmCmUmGn001SfUmU*SmU*SmU | UU | OnSOSS |
| WV-47022 | PO5MSdT*RfU*SmAn001SfUmAfGmAfGfCmAn001SfAmGmA | TUAUAGAGCAAGAACACUGUU | RSnSOOOOOOnsOOOOOOO |
| | fAmCfAmCmUmGn001SfUmU*SmU*SmU | UU | OnSOSS |
| WV-47023 | PO5MRdT*RfU*SmAn001SfUmAfGmAfGfCmAn001SfAmGmA | TUAUAGAGCAAGAACACUGUU | RSnSOOOOOOnsOOOOOOO |
| | fAmCfAmCmUmGn001SfUmU*SmU*SmU | UU | OnSOSS |
| WV-47024 | VPT*RfU*SmAn001SfUmAfGmAfGfCmAn001SfAmGmAfAmC | TUAUAGAGCAAGAACACUGUU | RSnSOOOOOOnSOOOOOOO |
| | fAmCmUmGn001SfUmU*SmU*SmU | UU | OnSOSS |
| WV-47025 | 5mspdT*RfU*SmAn001SfUmAfGmAfGfCmAn001SfAmGmAf | TUAUAGAGCAAGAACACUGUU | RSnSOOOOOOnSOOOOOOO |
| | AmCfAmCmUmGn001SfUmU*SmU*SmU | UU | OnSOSS |
| WV-47026 | 5mrpdT*RfU*SmAn001SfUmAfGmAfGfCmAn001SfAmGmAf | TUAUAGAGCAAGAACACUGUU | RSnSOOOOOOnSOOOOOOO |
| | AmCfAmCmUmGn001SfUmU*SmU*SmU | UU | OnSOSS |
| WV-48526 | mU*RfU*SmAn001SfUmAfGmAfGmCfAn001RfAmGmAfAmCf | UUAUAGAGCAAGAACACUGUU | RSnSOOOOOOnROOOOOOO |
| | AmCfUmGn001RfUmU*SmU*SmU | UU | OnROSS |
| WV-48527 | mU*SfU*RmAn001SfUmAfGmAfGmCfAn001RfAmGmAfAmCf | UUAUAGAGCAAGAACACUGUU | SRnSOOOOOOnROOOOOOO |
| | AmCfUmGn001RfUmU*SmU*SmU | UU | OnROSS |
| WV-48528 | mU*SfU*RmAn001SfUmAfGmAmGmCmAn001RfAmGmAfAmCf | UUAUAGAGCAAGAACACUGUU | SRnSOOOOOOnROOOOOOO |
| | AmCmUmGmUmU*SmU*SmU | UU | OOOSS |
| WV-48529 | mU*SfU*RmAn001SfUmAfGmAmGmCmAn001RfAmGmAfAmCf | UUAUAGAGCAAGAACACUGUU | SRnSOOOOOOnROOOOOOO |
| | AmCmUmGn001RfUmU*SmU*SmU | UU | OnROSS |
| WV-48530 | mU*RfU*SmAmUmAfGmAmGmCmAn001RfAmGmAfAmCfAmCmU | UUAUAGAGCAAGAACACUGUU | RSOOOOOOOnROOOOOOOO |
| | mGn001RfUmU*SmU*SmU | UU | nROSS |
| WV-48531 | mU*SfU*RmAmUmAfGmAmGmCmAn001RfAmGmAfAmCfAmCmU | UUAUAGAGCAAGAACACUGUU | SROOOOOOOnROOOOOOOO |
| | mGn001RfUmU*SmU*SmU | UU | nROSS |
| WV-20167 | mU*fU*mAfUmAfGmAfGmCfAmAmGmAfAmCfAmCfUmGfUmU* | UUAUAGAGCAAGAACACUGUU | XXOOOOOOOOOOOOOOOOO |
| | mU*mU | UU | OXX |
| WV-20170 | mU*RfU*SmAfUmAfGmAfGmCfAmAmGmAfAmCfAmCfUmGfUm | UUAUAGAGCAAGAACACUGUU | RSOOOOOOOOOOOOOOOOO |
| | U*SmU*SmU | UU | OSS |
| WV-38708 | mU*RfU*SmAn001SfUmAfGmAfGmCfAn001SmAmGmAfAmCf | UUAUAGAGCAAGAACACUGUU | RSnSOOOOOOnSOOOOOOO |
| | AmCfUmGn001SfUmU*SmU*SmU | UU | OnSOSS |
| WV-36860 | Mod001L001mAmAfCmAfGmUfGmUfUfCfUmUfGmCfUmCfUm | AACAGUGUUCUUGCUCUAUAA | OOOOOOOOOOOOOOOOOOO |
| | AfUmAfA*mU*mU | UU | OOXX |
| WV-36807 | Mod001L001mAmAfCmAfGmUfGmUfUfCfUmUfGmCfUmCfUm | AACAGUGUUCUUGCUCUAUAA | OOOOOOOOOOOOOOOOOOO |
| | AfUmAfA*SmU*SmU | UU | OOSS |
| WV-20167 | mU*fU*mAfUmAfGmAfGmCfAmAmGmAfAmCfAmCfUmGfUmU* | UUAUAGAGCAAGAACACUGUU | XXOOOOOOOOOOOOOOOOO |
| | mU*mU | UU | OXX |
| WV-20169 | mU*SfU*SmAfUmAfGmAfGmCfAmAmGmAfAmCfAmCfUmGfUm | UUAUAGAGCAAGAACACUGUU | SSOOOOOOOOOOOOOOOOO |
| | U*SmU*SmU | UU | OSS |
| WV-20170 | mU*RfU*SmAfUmAfGmAfGmCfAmAmGmAfAmCfAmCfUmGfUm | UUAUAGAGCAAGAACACUGUU | RSOOOOOOOOOOOOOOOOO |
| | U*SmU*SmU | UU | OSS |
| WV-20171 | mU*SfU*RmAfUmAfGmAfGmCfAmAmGmAfAmCfAmCfUmGfUm | UUAUAGAGCAAGAACACUGUU | SROOOOOOOOOOOOOOOOO |
| | U*SmU*SmU | UU | OSS |
| WV-20172 | mU*RfU*RmAfUmAfGmAfGmCfAmAmGmAfAmCfAmCfUmGfUm | UUAUAGAGCAAGAACACUGUU | RROOOOOOOOOOOOOOOOO |
| | U*SmU*SmU | UU | OSS |
| WV-20183 | mU*SfU*RmAfUmAfGmAfGmCfAmAmGmAfAmCfAmCfUmGfUm | UUAUAGAGCAAGAACACUGUU | SROOOOOOOOOOOOOOOOO |
| | U*RmU*RmU | UU | ORR |
| WV-36836 | mUn001fU*mAfUmAfGmAfGmCfAmAmGmAfAmCfAmCfUmGfU | UUAUAGAGCAAGAACACUGUU | nXXOOOOOOOOOOOOOOOO |
| | mU*mU*mU | UU | OOXX |
| WV-36837 | mU*fUn001mAfUmAfGmAfGmCfAmAmGmAfAmCfAmCfUmGfU | UUAUAGAGCAAGAACACUGUU | XnXOOOOOOOOOOOOOOOO |
| | mU*mU*mU | UU | OOXX |
| WV-36838 | mU*fU*mAn001fUmAfGmAfGmCfAmAmGmAfAmCfAmCfUmGf | UUAUAGAGCAAGAACACUGUU | XXnXOOOOOOOOOOOOOOO |
| | UmU*mU*mU | UU | OOXX |
| WV-36839 | mU*fU*mAfUn001mAfGmAfGmCfAmAmGmAfAmCfAmCfUmGf | UUAUAGAGCAAGAACACUGUU | XXOnXOOOOOOOOOOOOOO |
| | UmU*mU*mU | UU | OOXX |
| WV-36840 | mU*fU*mAfUmAn001fGmAfGmCfAmAmGmAfAmCfAmCfUmGf | UUAUAGAGCAAGAACACUGUU | XXOOnXOOOOOOOOOOOOO |
| | UmU*mU*mU | UU | OOXX |
| WV-36841 | mU*fU*mAfUmAfGn001mAfGmCfAmAmGmAfAmCfAmCfUmGf | UUAUAGAGCAAGAACACUGUU | XXOOOnXOOOOOOOOOOOO |
| | UmU*mU*mU | UU | OOXX |
| WV-36842 | mU*fU*mAfUmAfGmAn001fGmCfAmAmGmAfAmCfAmCfUmGf | UUAUAGAGCAAGAACACUGUU | XXOOOOnXOOOOOOOOOOO |
| | UmU*mU*mU | UU | OOXX |
| WV-36843 | mU*fU*mAfUmAfGmAfGn001mCfAmAmGmAfAmCfAmCfUmGf | UUAUAGAGCAAGAACACUGUU | XXOOOOOnXOOOOOOOOOO |
| | UmU*mU*mU | UU | OOXX |
| WV-36844 | mU*fU*mAfUmAfGmAfGmCn001fAmAmGmAfAmCfAmCfUmGf | UUAUAGAGCAAGAACACUGUU | XXOOOOOOnXOOOOOOOOO |
| | UmU*mU*mU | UU | OOXX |
| WV-36845 | mU*fU*mAfUmAfGmAfGmCfAn001mAmGmAfAmCfAmCfUmGf | UUAUAGAGCAAGAACACUGUU | XXOOOOOOOnXOOOOOOOO |
| | UmU*mU*mU | UU | OOXX |
| WV-36846 | mU*fU*mAfUmAfGmAfGmCfAmAn001mGmAfAmCfAmCfUmGf | UUAUAGAGCAAGAACACUGUU | XXOOOOOOOOnxOOOOOOO |
| | UmU*mU*mU | UU | OOXX |
| WV-36847 | mU*fU*mAfUmAfGmAfGmCfAmAmGn001mAfAmCfAmCfUmGf | UUAUAGAGCAAGAACACUGUU | XXOOOOOOOOOnxOOOOOO |
| | UmU*mU*mU | UU | OOXX |
| WV-36848 | mU*fU*mAfUmAfGmAfGmCfAmAmGmAn001fAmCfAmCfUmGf | UUAUAGAGCAAGAACACUGUU | XXOOOOOOOOOOnXOOOOO |
| | UmU*mU*mU | UU | OOXX |
| WV-36849 | mU*fU*mAfUmAfGmAfGmCfAmAmGmAfAn001mCfAmCfUmGf | UUAUAGAGCAAGAACACUGUU | XXOOOOOOOOOOOnXOOOO |
| | UmU*mU*mU | UU | OOXX |
| WV-36850 | mU*fU*mAfUmAfGmAfGmCfAmAmGmAfAmCn001fAmCfUmGf | UUAUAGAGCAAGAACACUGUU | XXOOOOOOOOOOOOnxOOO |
| | UmU*mU*mU | UU | OOXX |
| WV-36851 | mU*fU*mAfUmAfGmAfGmCfAmAmGmAfAmCfAn001mCfUmGf | UUAUAGAGCAAGAACACUGUU | XXOOOOOOOOOOOOOnXOO |
| | UmU*mU*mU | UU | OOXX |
| WV-36852 | mU*fU*mAfUmAfGmAfGmCfAmAmGmAfAmCfAmCn001fUmGf | UUAUAGAGCAAGAACACUGUU | XXOOOOOOOOOOOOOOnXO |
| | UmU*mU*mU | UU | OOXX |
| WV-36853 | mU*fU*mAfUmAfGmAfGmCfAmAmGmAfAmCfAmCfUn001mGf | UUAUAGAGCAAGAACACUGUU | XXOOOOOOOOOOOOOOOnX |
| | UmU*mU*mU | UU | OOXX |
| WV-36854 | mU*fU*mAfUmAfGmAfGmCfAmAmGmAfAmCfAmCfUmGn001f | UUAUAGAGCAAGAACACUGUU | XXOOOOOOOOOOOOOOOOn |
| | UmU*mU*mU | UU | XOXX |
| WV-36855 | mU*fU*mAfUmAfGmAfGmCfAmAmGmAfAmCfAmCfUmGfUn00 | UUAUAGAGCAAGAACACUGUU | XXOOOOOOOOOOOOOOOOO |
| | 1mU*mU*mU | UU | nXXX |
| WV-36856 | mU*fU*mAfUmAfGmAfGmCfAmAmGmAfAmCfAmCfUmGfUmUn | UUAUAGAGCAAGAACACUGUU | XXOOOOOOOOOOOOOOOOO |
| | 001mU*mU | UU | OnXX |
| WV-36857 | mU*fU*mAfUmAfGmAfGmCfAmAmGmAfAmCfAmCfUmGfUmU* | UUAUAGAGCAAGAACACUGUU | XXOOOOOOOOOOOOOOOOO |
| | mUn001mU | UU | OXnX |
| WV-36980 | mU*RfU*RmA*RfU*RmA*RfG*RmA*RfG*SmCfAmAmGmAfAm | UUAUAGAGCAAGAACACUGUU | RRRRRRRSOOOOOOOOOOO |
| | CfAmCfUmGfUmU*SmU*SmU | UU | OSS |
| WV-36981 | mU*RfU*RmA*RfU*RmA*RfG*RmA*SfG*RmCfAmAmGmAfAm | UUAUAGAGCAAGAACACUGUU | RRRRRRSROOOOOOOOOOO |
| | CfAmCfUmGfUmU*SmU*SmU | UU | OSS |
| WV-36982 | mU*RfU*RmA*RfU*RmA*RfG*RmA*SfG*SmCfAmAmGmAfAm | UUAUAGAGCAAGAACACUGUU | RRRRRRSSOOOOOOOOOOO |
| | CfAmCfUmGfUmU*SmU*SmU | UU | OSS |
| WV-36983 | mU*RfU*RmA*RfU*RmA*RfG*SmA*RfG*RmCfAmAmGmAfAm | UUAUAGAGCAAGAACACUGUU | RRRRRSRROOOOOOOOOOO |
| | CfAmCfUmGfUmU*SmU*SmU | UU | OSS |
| WV-36984 | mU*RfU*RmA*RfU*RmA*RfG*SmA*RfG*SmCfAmAmGmAfAm | UUAUAGAGCAAGAACACUGUU | RRRRRSRSOOOOOOOOOOO |
| | CfAmCfUmGfUmU*SmU*SmU | UU | OSS |
| WV-36985 | mU*RfU*RmA*RfU*RmA*RfG*SmA*SfG*RmCfAmAmGmAfAm | UUAUAGAGCAAGAACACUGUU | RRRRRSSROOOOOOOOOOO |
| | CfAmCfUmGfUmU*SmU*SmU | UU | OSS |
| WV-36986 | mU*RfU*RmA*RfU*RmA*RfG*SmA*SfG*SmCfAmAmGmAfAm | UUAUAGAGCAAGAACACUGUU | RRRRRSSSOOOOOOOOOOO |
| | CfAmCfUmGfUmU*SmU*SmU | UU | OSS |
| WV-36987 | mU*RfU*RmA*RfU*RmA*SfG*RmA*RfG*RmCfAmAmGmAfAm | UUAUAGAGCAAGAACACUGUU | RRRRSRRROOOOOOOOOOO |
| | CfAmCfUmGfUmU*SmU*SmU | UU | OSS |
| WV-36988 | mU*RfU*RmA*RfU*RmA*SfG*RmA*RfG*SmCfAmAmGmAfAm | UUAUAGAGCAAGAACACUGUU | RRRRSRRSOOOOOOOOOOO |
| | CfAmCfUmGfUmU*SmU*SmU | UU | OSS |
| WV-36989 | mU*RfU*RmA*RfU*RmA*SfG*RmA*SfG*RmCfAmAmGmAfAm | UUAUAGAGCAAGAACACUGUU | RRRRSRSROOOOOOOOOOO |
| | CfAmCfUmGfUmU*SmU*SmU | UU | OSS |
| WV-36990 | mU*RfU*RmA*RfU*RmA*SfG*RmA*SfG*SmCfAmAmGmAfAm | UUAUAGAGCAAGAACACUGUU | RRRRSRSSOOOOOOOOOOO |
| | CfAmCfUmGfUmU*SmU*SmU | UU | OSS |
| WV-36991 | mU*RfU*RmA*RfU*RmA*SfG*SmA*RfG*RmCfAmAmGmAfAm | UUAUAGAGCAAGAACACUGUU | RRRRSSRROOOOOOOOOOO |
| | CfAmCfUmGfUmU*SmU*SmU | UU | OSS |
| WV-36992 | mU*RfU*RmA*RfU*RmA*SfG*SmA*RfG*SmCfAmAmGmAfAm | UUAUAGAGCAAGAACACUGUU | RRRRSSRSOOOOOOOOOOO |
| | CfAmCfUmGfUmU*SmU*SmU | UU | OSS |
| WV-36993 | mU*RfU*RmA*RfU*RmA*SfG*SmA*SfG*RmCfAmAmGmAfAm | UUAUAGAGCAAGAACACUGUU | RRRRSSSROOOOOOOOOOO |
| | CfAmCfUmGfUmU*SmU*SmU | UU | OSS |
| WV-36994 | mU*RfU*RmA*RfU*RmA*SfG*SmA*SfG*SmCfAmAmGmAfAm | UUAUAGAGCAAGAACACUGUU | RRRRSSSSOOOOOOOOOOO |
| | CfAmCfUmGfUmU*SmU*SmU | UU | OSS |
| WV-36995 | mU*RfU*RmA*RfU*SmA*RfG*RmA*RfG*RmCfAmAmGmAfAm | UUAUAGAGCAAGAACACUGUU | RRRSRRRROOOOOOOOOOO |
| | CfAmCfUmGfUmU*SmU*SmU | UU | OSS |
| WV-36996 | mU*RfU*RmA*RfU*SmA*RfG*RmA*RfG*SmCfAmAmGmAfAm | UUAUAGAGCAAGAACACUGUU | RRRSRRRSOOOOOOOOOOO |
| | CfAmCfUmGfUmU*SmU*SmU | UU | OSS |
| WV-36997 | mU*RfU*RmA*RfU*SmA*RfG*RmA*SfG*RmCfAmAmGmAfAm | UUAUAGAGCAAGAACACUGUU | RRRSRRSROOOOOOOOOOO |
| | CfAmCfUmGfUmU*SmU*SmU | UU | OSS |
| WV-36998 | mU*RfU*RmA*RfU*SmA*RfG*RmA*SfG*SmCfAmAmGmAfAm | UUAUAGAGCAAGAACACUGUU | RRRSRRSSOOOOOOOOOOO |
| | CfAmCfUmGfUmU*SmU*SmU | UU | OSS |
| WV-36999 | mU*RfU*RmA*RfU*SmA*RfG*SmA*RfG*RmCfAmAmGmAfAm | UUAUAGAGCAAGAACACUGUU | RRRSRSRROOOOOOOOOOO |
| | CfAmCfUmGfUmU*SmU*SmU | UU | OSS |
| WV-37000 | mU*RfU*RmA*RfU*SmA*RfG*SmA*RfG*SmCfAmAmGmAfAm | UUAUAGAGCAAGAACACUGUU | RRRSRSRSOOOOOOOOOOO |
| | CfAmCfUmGfUmU*SmU*SmU | UU | OSS |
| WV-37001 | mU*RfU*RmA*RfU*SmA*RfG*SmA*SfG*RmCfAmAmGmAfAm | UUAUAGAGCAAGAACACUGUU | RRRSRSSROOOOOOOOOOO |
| | CfAmCfUmGfUmU*SmU*SmU | UU | OSS |
| WV-37002 | mU*RfU*RmA*RfU*SmA*RfG*SmA*SfG*SmCfAmAmGmAfAm | UUAUAGAGCAAGAACACUGUU | RRRSRSSSOOOOOOOOOOO |
| | CfAmCfUmGfUmU*SmU*SmU | UU | OSS |
| WV-37003 | mU*RfU*RmA*RfU*SmA*SfG*RmA*RfG*RmCfAmAmGmAfAm | UUAUAGAGCAAGAACACUGUU | RRRSSRRROOOOOOOOOOO |
| | CfAmCfUmGfUmU*SmU*SmU | UU | OSS |
| WV-37004 | mU*RfU*RmA*RfU*SmA*SfG*RmA*RfG*SmCfAmAmGmAfAm | UUAUAGAGCAAGAACACUGUU | RRRSSRRSOOOOOOOOOOO |
| | CfAmCfUmGfUmU*SmU*SmU | UU | OSS |
| WV-37005 | mU*RfU*RmA*RfU*SmA*SfG*RmA*SfG*RmCfAmAmGmAfAm | UUAUAGAGCAAGAACACUGUU | RRRSSRSROOOOOOOOOOO |
| | CfAmCfUmGfUmU*SmU*SmU | UU | OSS |
| WV-37006 | mU*RfU*RmA*RfU*SmA*SfG*RmA*SfG*SmCfAmAmGmAfAm | UUAUAGAGCAAGAACACUGUU | RRRSSRSSOOOOOOOOOOO |
| | CfAmCfUmGfUmU*SmU*SmU | UU | OSS |
| WV-37007 | mU*RfU*RmA*RfU*SmA*SfG*SmA*RfG*RmCfAmAmGmAfAm | UUAUAGAGCAAGAACACUGUU | RRRSSSRROOOOOOOOOOO |
| | CfAmCfUmGfUmU*SmU*SmU | UU | OSS |
| WV-37008 | mU*RfU*RmA*RfU*SmA*SfG*SmA*RfG*SmCfAmAmGmAfAm | UUAUAGAGCAAGAACACUGUU | RRRSSSRSOOOOOOOOOOO |
| | CfAmCfUmGfUmU*SmU*SmU | UU | OSS |
| WV-37009 | mU*RfU*RmA*RfU*SmA*SfG*SmA*SfG*RmCfAmAmGmAfAm | UUAUAGAGCAAGAACACUGUU | RRRSSSSROOOOOOOOOOO |
| | CfAmCfUmGfUmU*SmU*SmU | UU | OSS |
| WV-37010 | mU*RfU*RmA*RfU*SmA*SfG*SmA*SfG*SmCfAmAmGmAfAm | UUAUAGAGCAAGAACACUGUU | RRRSSSSSOOOOOOOOOOO |
| | CfAmCfUmGfUmU*SmU*SmU | UU | OSS |
| WV-37011 | mU*RfU*RmA*SfU*RmA*RfG*RmA*RfG*RmCfAmAmGmAfAm | UUAUAGAGCAAGAACACUGUU | RRSRRRRROOOOOOOOOOO |
| | CfAmCfUmGfUmU*SmU*SmU | UU | OSS |
| WV-37012 | mU*RfU*RmA*SfU*RmA*RfG*RmA*RfG*SmCfAmAmGmAfAm | UUAUAGAGCAAGAACACUGUU | RRSRRRRSOOOOOOOOOOO |
| | CfAmCfUmGfUmU*SmU*SmU | UU | OSS |
| WV-37013 | mU*RfU*RmA*SfU*RmA*RfG*RmA*SfG*RmCfAmAmGmAfAm | UUAUAGAGCAAGAACACUGUU | RRSRRRSROOOOOOOOOOO |
| | CfAmCfUmGfUmU*SmU*SmU | UU | OSS |
| WV-37014 | mU*RfU*RmA*SfU*RmA*RfG*RmA*SfG*SmCfAmAmGmAfAm | UUAUAGAGCAAGAACACUGUU | RRSRRRSSOOOOOOOOOOO |
| | CfAmCfUmGfUmU*SmU*SmU | UU | OSS |
| WV-37015 | mU*RfU*RmA*SfU*RmA*RfG*SmA*RfG*RmCfAmAmGmAfAm | UUAUAGAGCAAGAACACUGUU | RRSRRSRROOOOOOOOOOO |
| | CfAmCfUmGfUmU*SmU*SmU | UU | OSS |
| WV-37016 | mU*RfU*RmA*SfU*RmA*RfG*SmA*RfG*SmCfAmAmGmAfAm | UUAUAGAGCAAGAACACUGUU | RRSRRSRSOOOOOOOOOOO |
| | CfAmCfUmGfUmU*SmU*SmU | UU | OSS |
| WV-37017 | mU*RfU*RmA*SfU*RmA*RfG*SmA*SfG*RmCfAmAmGmAfAm | UUAUAGAGCAAGAACACUGUU | RRSRRSSROOOOOOOOOOO |
| | CfAmCfUmGfUmU*SmU*SmU | UU | OSS |
| WV-37018 | mU*RfU*RmA*SfU*RmA*RfG*SmA*SfG*SmCfAmAmGmAfAm | UUAUAGAGCAAGAACACUGUU | RRSRRSSSOOOOOOOOOOO |
| | CfAmCfUmGfUmU*SmU*SmU | UU | OSS |
| WV-37019 | mU*RfU*RmA*SfU*RmA*SfG*RmA*RfG*RmCfAmAmGmAfAm | UUAUAGAGCAAGAACACUGUU | RRSRSRRROOOOOOOOOOO |
| | CfAmCfUmGfUmU*SmU*SmU | UU | OSS |
| WV-37020 | mU*RfU*RmA*SfU*RmA*SfG*RmA*RfG*SmCfAmAmGmAfAm | UUAUAGAGCAAGAACACUGUU | RRSRSRRSOOOOOOOOOOO |
| | CfAmCfUmGfUmU*SmU*SmU | UU | OSS |
| WV-37021 | mU*RfU*RmA*SfU*RmA*SfG*RmA*SfG*RmCfAmAmGmAfAm | UUAUAGAGCAAGAACACUGUU | RRSRSRSROOOOOOOOOOO |
| | CfAmCfUmGfUmU*SmU*SmU | UU | OSS |
| WV-37022 | mU*RfU*RmA*SfU*RmA*SfG*RmA*SfG*SmCfAmAmGmAfAm | UUAUAGAGCAAGAACACUGUU | RRSRSRSSOOOOOOOOOOO |
| | CfAmCfUmGfUmU*SmU*SmU | UU | OSS |
| WV-37023 | mU*RfU*RmA*SfU*RmA*SfG*SmA*RfG*RmCfAmAmGmAfAm | UUAUAGAGCAAGAACACUGUU | RRSRSSRROOOOOOOOOOO |
| | CfAmCfUmGfUmU*SmU*SmU | UU | OSS |
| WV-37024 | mU*RfU*RmA*SfU*RmA*SfG*SmA*RfG*SmCfAmAmGmAfAm | UUAUAGAGCAAGAACACUGUU | RRSRSSRSOOOOOOOOOOO |
| | CfAmCfUmGfUmU*SmU*SmU | UU | OSS |
| WV-37025 | mU*RfU*RmA*SfU*RmA*SfG*SmA*SfG*RmCfAmAmGmAfAm | UUAUAGAGCAAGAACACUGUU | RRSRSSSROOOOOOOOOOO |
| | CfAmCfUmGfUmU*SmU*SmU | UU | OSS |
| WV-37026 | mU*RfU*RmA*SfU*RmA*SfG*SmA*SfG*SmCfAmAmGmAfAm | UUAUAGAGCAAGAACACUGUU | RRSRSSSSOOOOOOOOOOO |
| | CfAmCfUmGfUmU*SmU*SmU | UU | OSS |
| WV-37027 | mU*RfU*RmA*SfU*SmA*RfG*RmA*RfG*RmCfAmAmGmAfAm | UUAUAGAGCAAGAACACUGUU | RRSSRRRROOOOOOOOOOO |
| | CfAmCfUmGfUmU*SmU*SmU | UU | OSS |
| WV-37028 | mU*RfU*RmA*SfU*SmA*RfG*RmA*RfG*SmCfAmAmGmAfAm | UUAUAGAGCAAGAACACUGUU | RRSSRRRSOOOOOOOOOOO |
| | CfAmCfUmGfUmU*SmU*SmU | UU | OSS |
| WV-37029 | mU*RfU*RmA*SfU*SmA*RfG*RmA*SfG*RmCfAmAmGmAfAm | UUAUAGAGCAAGAACACUGUU | RRSSRRSROOOOOOOOOOO |
| | CfAmCfUmGfUmU*SmU*SmU | UU | OSS |
| WV-37030 | mU*RfU*RmA*SfU*SmA*RfG*RmA*SfG*SmCfAmAmGmAfAm | UUAUAGAGCAAGAACACUGUU | RRSSRRSSOOOOOOOOOOO |
| | CfAmCfUmGfUmU*SmU*SmU | UU | OSS |
| WV-37031 | mU*RfU*RmA*SfU*SmA*RfG*SmA*RfG*RmCfAmAmGmAfAm | UUAUAGAGCAAGAACACUGUU | RRSSRSRROOOOOOOOOOO |
| | CfAmCfUmGfUmU*SmU*SmU | UU | OSS |
| WV-37032 | mU*RfU*RmA*SfU*SmA*RfG*SmA*RfG*SmCfAmAmGmAfAm | UUAUAGAGCAAGAACACUGUU | RRSSRSRSOOOOOOOOOOO |
| | CfAmCfUmGfUmU*SmU*SmU | UU | OSS |
| WV-37033 | mU*RfU*RmA*SfU*SmA*RfG*SmA*SfG*RmCfAmAmGmAfAm | UUAUAGAGCAAGAACACUGUU | RRSSRSSROOOOOOOOOOO |
| | CfAmCfUmGfUmU*SmU*SmU | UU | OSS |
| WV-37034 | mU*RfU*RmA*SfU*SmA*RfG*SmA*SfG*SmCfAmAmGmAfAm | UUAUAGAGCAAGAACACUGUU | RRSSRSSSOOOOOOOOOOO |
| | CfAmCfUmGfUmU*SmU*SmU | UU | OSS |
| WV-37035 | mU*RfU*RmA*SfU*SmA*SfG*RmA*RfG*RmCfAmAmGmAfAm | UUAUAGAGCAAGAACACUGUU | RRSSSRRROOOOOOOOOOO |
| | CfAmCfUmGfUmU*SmU*SmU | UU | OSS |
| WV-37036 | mU*RfU*RmA*SfU*SmA*SfG*RmA*RfG*SmCfAmAmGmAfAm | UUAUAGAGCAAGAACACUGUU | RRSSSRRSOOOOOOOOOOO |
| | CfAmCfUmGfUmU*SmU*SmU | UU | OSS |
| WV-37037 | mU*RfU*RmA*SfU*SmA*SfG*RmA*SfG*RmCfAmAmGmAfAm | UUAUAGAGCAAGAACACUGUU | RRSSSRSROOOOOOOOOOO |
| | CfAmCfUmGfUmU*SmU*SmU | UU | OSS |
| WV-37038 | mU*RfU*RmA*SfU*SmA*SfG*RmA*SfG*SmCfAmAmGmAfAm | UUAUAGAGCAAGAACACUGUU | RRSSSRSSOOOOOOOOOOO |
| | CfAmCfUmGfUmU*SmU*SmU | UU | OSS |
| WV-37039 | mU*RfU*RmA*SfU*SmA*SfG*SmA*RfG*RmCfAmAmGmAfAm | UUAUAGAGCAAGAACACUGUU | RRSSSSRROOOOOOOOOOO |
| | CfAmCfUmGfUmU*SmU*SmU | UU | OSS |
| WV-37040 | mU*RfU*RmA*SfU*SmA*SfG*SmA*RfG*SmCfAmAmGmAfAm | UUAUAGAGCAAGAACACUGUU | RRSSSSRSOOOOOOOOOOO |
| | CfAmCfUmGfUmU*SmU*SmU | UU | OSS |
| WV-37041 | mU*RfU*RmA*SfU*SmA*SfG*SmA*SfG*RmCfAmAmGmAfAm | UUAUAGAGCAAGAACACUGUU | RRSSSSSROOOOOOOOOOO |
| | CfAmCfUmGfUmU*SmU*SmU | UU | OSS |
| WV-37042 | mU*RfU*RmA*SfU*SmA*SfG*SmA*SfG*SmCfAmAmGmAfAm | UUAUAGAGCAAGAACACUGUU | RRSSSSSSOOOOOOOOOOO |
| | CfAmCfUmGfUmU*SmU*SmU | UU | OSS |
| WV-37043 | mU*RfU*SmA*RfU*RmA*RfG*RmA*RfG*RmCfAmAmGmAfAm | UUAUAGAGCAAGAACACUGUU | RSRRRRRROOOOOOOOOOO |
| | CfAmCfUmGfUmU*SmU*SmU | UU | OSS |
| WV-37044 | mU*RfU*SmA*RfU*RmA*RfG*RmA*RfG*SmCfAmAmGmAfAm | UUAUAGAGCAAGAACACUGUU | RSRRRRRSOOOOOOOOOOO |
| | CfAmCfUmGfUmU*SmU*SmU | UU | OSS |
| WV-37045 | mU*RfU*SmA*RfU*RmA*RfG*RmA*SfG*RmCfAmAmGmAfAm | UUAUAGAGCAAGAACACUGUU | RSRRRRSROOOOOOOOOOO |
| | CfAmCfUmGfUmU*SmU*SmU | UU | OSS |
| WV-37046 | mU*RfU*SmA*RfU*RmA*RfG*RmA*SfG*SmCfAmAmGmAfAm | UUAUAGAGCAAGAACACUGUU | RSRRRRSSOOOOOOOOOOO |
| | CfAmCfUmGfUmU*SmU*SmU | UU | OSS |
| WV-37047 | mU*RfU*SmA*RfU*RmA*RfG*SmA*RfG*RmCfAmAmGmAfAm | UUAUAGAGCAAGAACACUGUU | RSRRRSRROOOOOOOOOOO |
| | CfAmCfUmGfUmU*SmU*SmU | UU | OSS |
| WV-37048 | mU*RfU*SmA*RfU*RmA*RfG*SmA*RfG*SmCfAmAmGmAfAm | UUAUAGAGCAAGAACACUGUU | RSRRRSRSOOOOOOOOOOO |
| | CfAmCfUmGfUmU*SmU*SmU | UU | OSS |
| WV-37049 | mU*RfU*SmA*RfU*RmA*RfG*SmA*SfG*RmCfAmAmGmAfAm | UUAUAGAGCAAGAACACUGUU | RSRRRSSROOOOOOOOOOO |
| | CfAmCfUmGfUmU*SmU*SmU | UU | OSS |
| WV-37050 | mU*RfU*SmA*RfU*RmA*RfG*SmA*SfG*SmCfAmAmGmAfAm | UUAUAGAGCAAGAACACUGUU | RSRRRSSSOOOOOOOOOOO |
| | CfAmCfUmGfUmU*SmU*SmU | UU | OSS |
| WV-37051 | mU*RfU*SmA*RfU*RmA*SfG*RmA*RfG*RmCfAmAmGmAfAm | UUAUAGAGCAAGAACACUGUU | RSRRSRRROOOOOOOOOOO |
| | CfAmCfUmGfUmU*SmU*SmU | UU | OSS |
| WV-37052 | mU*RfU*SmA*RfU*RmA*SfG*RmA*RfG*SmCfAmAmGmAfAm | UUAUAGAGCAAGAACACUGUU | RSRRSRRSOOOOOOOOOOO |
| | CfAmCfUmGfUmU*SmU*SmU | UU | OSS |
| WV-37053 | mU*RfU*SmA*RfU*RmA*SfG*RmA*SfG*RmCfAmAmGmAfAm | UUAUAGAGCAAGAACACUGUU | RSRRSRSROOOOOOOOOOO |
| | CfAmCfUmGfUmU*SmU*SmU | UU | OSS |
| WV-37054 | mU*RfU*SmA*RfU*RmA*SfG*RmA*SfG*SmCfAmAmGmAfAm | UUAUAGAGCAAGAACACUGUU | RSRRSRSSOOOOOOOOOOO |
| | CfAmCfUmGfUmU*SmU*SmU | UU | OSS |
| WV-37055 | mU*RfU*SmA*RfU*RmA*SfG*SmA*RfG*RmCfAmAmGmAfAm | UUAUAGAGCAAGAACACUGUU | RSRRSSRROOOOOOOOOOO |
| | CfAmCfUmGfUmU*SmU*SmU | UU | OSS |
| WV-37056 | mU*RfU*SmA*RfU*RmA*SfG*SmA*RfG*SmCfAmAmGmAfAm | UUAUAGAGCAAGAACACUGUU | RSRRSSRSOOOOOOOOOOO |
| | CfAmCfUmGfUmU*SmU*SmU | UU | OSS |
| WV-37057 | mU*RfU*SmA*RfU*RmA*SfG*SmA*SfG*RmCfAmAmGmAfAm | UUAUAGAGCAAGAACACUGUU | RSRRSSSROOOOOOOOOOO |
| | CfAmCfUmGfUmU*SmU*SmU | UU | OSS |
| WV-37058 | mU*RfU*SmA*RfU*RmA*SfG*SmA*SfG*SmCfAmAmGmAfAm | UUAUAGAGCAAGAACACUGUU | RSRRSSSSOOOOOOOOOOO |
| | CfAmCfUmGfUmU*SmU*SmU | UU | OSS |
| WV-37059 | mU*RfU*SmA*RfU*SmA*RfG*RmA*RfG*RmCfAmAmGmAfAm | UUAUAGAGCAAGAACACUGUU | RSRSRRRROOOOOOOOOOO |
| | CfAmCfUmGfUmU*SmU*SmU | UU | OSS |
| WV-37060 | mU*RfU*SmA*RfU*SmA*RfG*RmA*RfG*SmCfAmAmGmAfAm | UUAUAGAGCAAGAACACUGUU | RSRSRRRSOOOOOOOOOOO |
| | CfAmCfUmGfUmU*SmU*SmU | UU | OSS |
| WV-37061 | mU*RfU*SmA*RfU*SmA*RfG*RmA*SfG*RmCfAmAmGmAfAm | UUAUAGAGCAAGAACACUGUU | RSRSRRSROOOOOOOOOOO |
| | CfAmCfUmGfUmU*SmU*SmU | UU | OSS |
| WV-37062 | mU*RfU*SmA*RfU*SmA*RfG*RmA*SfG*SmCfAmAmGmAfAm | UUAUAGAGCAAGAACACUGUU | RSRSRRSSOOOOOOOOOOO |
| | CfAmCfUmGfUmU*SmU*SmU | UU | OSS |
| WV-37063 | mU*RfU*SmA*RfU*SmA*RfG*SmA*RfG*RmCfAmAmGmAfAm | UUAUAGAGCAAGAACACUGUU | RSRSRSRROOOOOOOOOOO |
| | CfAmCfUmGfUmU*SmU*SmU | UU | OSS |
| WV-37064 | mU*RfU*SmA*RfU*SmA*RfG*SmA*RfG*SmCfAmAmGmAfAm | UUAUAGAGCAAGAACACUGUU | RSRSRSRSOOOOOOOOOOO |
| | CfAmCfUmGfUmU*SmU*SmU | UU | OSS |
| WV-37065 | mU*RfU*SmA*RfU*SmA*RfG*SmA*SfG*RmCfAmAmGmAfAm | UUAUAGAGCAAGAACACUGUU | RSRSRSSROOOOOOOOOOO |
| | CfAmCfUmGfUmU*SmU*SmU | UU | OSS |
| WV-37066 | mU*RfU*SmA*RfU*SmA*RfG*SmA*SfG*SmCfAmAmGmAfAm | UUAUAGAGCAAGAACACUGUU | RSRSRSSSOOOOOOOOOOO |
| | CfAmCfUmGfUmU*SmU*SmU | UU | OSS |
| WV-37067 | mU*RfU*SmA*RfU*SmA*SfG*RmA*RfG*RmCfAmAmGmAfAm | UUAUAGAGCAAGAACACUGUU | RSRSSRRROOOOOOOOOOO |
| | CfAmCfUmGfUmU*SmU*SmU | UU | OSS |
| WV-37068 | mU*RfU*SmA*RfU*SmA*SfG*RmA*RfG*SmCfAmAmGmAfAm | UUAUAGAGCAAGAACACUGUU | RSRSSRRSOOOOOOOOOOO |
| | CfAmCfUmGfUmU*SmU*SmU | UU | OSS |
| WV-37069 | mU*RfU*SmA*RfU*SmA*SfG*RmA*SfG*RmCfAmAmGmAfAm | UUAUAGAGCAAGAACACUGUU | RSRSSRSROOOOOOOOOOO |
| | CfAmCfUmGfUmU*SmU*SmU | UU | OSS |
| WV-37070 | mU*RfU*SmA*RfU*SmA*SfG*RmA*SfG*SmCfAmAmGmAfAm | UUAUAGAGCAAGAACACUGUU | RSRSSRSSOOOOOOOOOOO |
| | CfAmCfUmGfUmU*SmU*SmU | UU | OSS |
| WV-37071 | mU*RfU*SmA*RfU*SmA*SfG*SmA*RfG*RmCfAmAmGmAfAm | UUAUAGAGCAAGAACACUGUU | RSRSSSRROOOOOOOOOOO |
| | CfAmCfUmGfUmU*SmU*SmU | UU | OSS |
| WV-37072 | mU*RfU*SmA*RfU*SmA*SfG*SmA*RfG*SmCfAmAmGmAfAm | UUAUAGAGCAAGAACACUGUU | RSRSSSRSOOOOOOOOOOO |
| | CfAmCfUmGfUmU*SmU*SmU | UU | OSS |
| WV-37073 | mU*RfU*SmA*RfU*SmA*SfG*SmA*SfG*RmCfAmAmGmAfAm | UUAUAGAGCAAGAACACUGUU | RSRSSSSROOOOOOOOOOO |
| | CfAmCfUmGfUmU*SmU*SmU | UU | OSS |
| WV-37074 | mU*RfU*SmA*RfU*SmA*SfG*SmA*SfG*SmCfAmAmGmAfAm | UUAUAGAGCAAGAACACUGUU | RSRSSSSSOOOOOOOOOOO |
| | CfAmCfUmGfUmU*SmU*SmU | UU | OSS |
| WV-37075 | mU*RfU*SmA*SfU*RmA*RfG*RmA*RfG*RmCfAmAmGmAfAm | UUAUAGAGCAAGAACACUGUU | RSSRRRRROOOOOOOOOOO |
| | CfAmCfUmGfUmU*SmU*SmU | UU | OSS |
| WV-37076 | mU*RfU*SmA*SfU*RmA*RfG*RmA*RfG*SmCfAmAmGmAfAm | UUAUAGAGCAAGAACACUGUU | RSSRRRRSOOOOOOOOOOO |
| | CfAmCfUmGfUmU*SmU*SmU | UU | OSS |
| WV-37077 | mU*RfU*SmA*SfU*RmA*RfG*RmA*SfG*RmCfAmAmGmAfAm | UUAUAGAGCAAGAACACUGUU | RSSRRRSROOOOOOOOOOO |
| | CfAmCfUmGfUmU*SmU*SmU | UU | OSS |
| WV-37078 | mU*RfU*SmA*SfU*RmA*RfG*RmA*SfG*SmCfAmAmGmAfAm | UUAUAGAGCAAGAACACUGUU | RSSRRRSSOOOOOOOOOOO |
| | CfAmCfUmGfUmU*SmU*SmU | UU | OSS |
| WV-37079 | mU*RfU*SmA*SfU*RmA*RfG*SmA*RfG*RmCfAmAmGmAfAm | UUAUAGAGCAAGAACACUGUU | RSSRRSRROOOOOOOOOOO |
| | CfAmCfUmGfUmU*SmU*SmU | UU | OSS |
| WV-37080 | mU*RfU*SmA*SfU*RmA*RfG*SmA*RfG*SmCfAmAmGmAfAm | UUAUAGAGCAAGAACACUGUU | RSSRRSRSOOOOOOOOOOO |
| | CfAmCfUmGfUmU*SmU*SmU | UU | OSS |
| WV-37081 | mU*RfU*SmA*SfU*RmA*RfG*SmA*SfG*RmCfAmAmGmAfAm | UUAUAGAGCAAGAACACUGUU | RSSRRSSROOOOOOOOOOO |
| | CfAmCfUmGfUmU*SmU*SmU | UU | OSS |
| WV-37082 | mU*RfU*SmA*SfU*RmA*RfG*SmA*SfG*SmCfAmAmGmAfAm | UUAUAGAGCAAGAACACUGUU | RSSRRSSSOOOOOOOOOOO |
| | CfAmCfUmGfUmU*SmU*SmU | UU | OSS |
| WV-37083 | mU*RfU*SmA*SfU*RmA*SfG*RmA*RfG*RmCfAmAmGmAfAm | UUAUAGAGCAAGAACACUGUU | RSSRSRRROOOOOOOOOOO |
| | CfAmCfUmGfUmU*SmU*SmU | UU | OSS |
| WV-37084 | mU*RfU*SmA*SfU*RmA*SfG*RmA*RfG*SmCfAmAmGmAfAm | UUAUAGAGCAAGAACACUGUU | RSSRSRRSOOOOOOOOOOO |
| | CfAmCfUmGfUmU*SmU*SmU | UU | OSS |
| WV-37085 | mU*RfU*SmA*SfU*RmA*SfG*RmA*SfG*RmCfAmAmGmAfAm | UUAUAGAGCAAGAACACUGUU | RSSRSRSROOOOOOOOOOO |
| | CfAmCfUmGfUmU*SmU*SmU | UU | OSS |
| WV-37086 | mU*RfU*SmA*SfU*RmA*SfG*RmA*SfG*SmCfAmAmGmAfAm | UUAUAGAGCAAGAACACUGUU | RSSRSRSSOOOOOOOOOOO |
| | CfAmCfUmGfUmU*SmU*SmU | UU | OSS |
| WV-37087 | mU*RfU*SmA*SfU*RmA*SfG*SmA*RfG*RmCfAmAmGmAfAm | UUAUAGAGCAAGAACACUGUU | RSSRSSRROOOOOOOOOOO |
| | CfAmCfUmGfUmU*SmU*SmU | UU | OSS |
| WV-37088 | mU*RfU*SmA*SfU*RmA*SfG*SmA*RfG*SmCfAmAmGmAfAm | UUAUAGAGCAAGAACACUGUU | RSSRSSRSOOOOOOOOOOO |
| | CfAmCfUmGfUmU*SmU*SmU | UU | OSS |
| WV-37089 | mU*RfU*SmA*SfU*RmA*SfG*SmA*SfG*RmCfAmAmGmAfAm | UUAUAGAGCAAGAACACUGUU | RSSRSSSROOOOOOOOOOO |
| | CfAmCfUmGfUmU*SmU*SmU | UU | OSS |
| WV-37090 | mU*RfU*SmA*SfU*RmA*SfG*SmA*SfG*SmCfAmAmGmAfAm | UUAUAGAGCAAGAACACUGUU | RSSRSSSSOOOOOOOOOOO |
| | CfAmCfUmGfUmU*SmU*SmU | UU | OSS |
| WV-37091 | mU*RfU*SmA*SfU*SmA*RfG*RmA*RfG*RmCfAmAmGmAfAm | UUAUAGAGCAAGAACACUGUU | RSSSRRRROOOOOOOOOOO |
| | CfAmCfUmGfUmU*SmU*SmU | UU | OSS |
| WV-37092 | mU*RfU*SmA*SfU*SmA*RfG*RmA*RfG*SmCfAmAmGmAfAm | UUAUAGAGCAAGAACACUGUU | RSSSRRRSOOOOOOOOOOO |
| | CfAmCfUmGfUmU*SmU*SmU | UU | OSS |
| WV-37093 | mU*RfU*SmA*SfU*SmA*RfG*RmA*SfG*RmCfAmAmGmAfAm | UUAUAGAGCAAGAACACUGUU | RSSSRRSROOOOOOOOOOO |
| | CfAmCfUmGfUmU*SmU*SmU | UU | OSS |
| WV-37094 | mU*RfU*SmA*SfU*SmA*RfG*RmA*SfG*SmCfAmAmGmAfAm | UUAUAGAGCAAGAACACUGUU | RSSSRRSSOOOOOOOOOOO |
| | CfAmCfUmGfUmU*SmU*SmU | UU | OSS |
| WV-37095 | mU*RfU*SmA*SfU*SmA*RfG*SmA*RfG*RmCfAmAmGmAfAm | UUAUAGAGCAAGAACACUGUU | RSSSRSRROOOOOOOOOOO |
| | CfAmCfUmGfUmU*SmU*SmU | UU | OSS |
| WV-37096 | mU*RfU*SmA*SfU*SmA*RfG*SmA*RfG*SmCfAmAmGmAfAm | UUAUAGAGCAAGAACACUGUU | RSSSRSRSOOOOOOOOOOO |
| | CfAmCfUmGfUmU*SmU*SmU | UU | OSS |
| WV-37097 | mU*RfU*SmA*SfU*SmA*RfG*SmA*SfG*RmCfAmAmGmAfAm | UUAUAGAGCAAGAACACUGUU | RSSSRSSROOOOOOOOOOO |
| | CfAmCfUmGfUmU*SmU*SmU | UU | OSS |
| WV-37098 | mU*RfU*SmA*SfU*SmA*RfG*SmA*SfG*SmCfAmAmGmAfAm | UUAUAGAGCAAGAACACUGUU | RSSSRSSSOOOOOOOOOOO |
| | CfAmCfUmGfUmU*SmU*SmU | UU | OSS |
| WV-37099 | mU*RfU*SmA*SfU*SmA*SfG*RmA*RfG*RmCfAmAmGmAfAm | UUAUAGAGCAAGAACACUGUU | RSSSSRRROOOOOOOOOOO |
| | CfAmCfUmGfUmU*SmU*SmU | UU | OSS |
| WV-37100 | mU*RfU*SmA*SfU*SmA*SfG*RmA*RfG*SmCfAmAmGmAfAm | UUAUAGAGCAAGAACACUGUU | RSSSSRRSOOOOOOOOOOO |
| | CfAmCfUmGfUmU*SmU*SmU | UU | OSS |
| WV-37101 | mU*RfU*SmA*SfU*SmA*SfG*RmA*SfG*RmCfAmAmGmAfAm | UUAUAGAGCAAGAACACUGUU | RSSSSRSROOOOOOOOOOO |
| | CfAmCfUmGfUmU*SmU*SmU | UU | OSS |
| WV-37102 | mU*RfU*SmA*SfU*SmA*SfG*RmA*SfG*SmCfAmAmGmAfAm | UUAUAGAGCAAGAACACUGUU | RSSSSRSSOOOOOOOOOOO |
| | CfAmCfUmGfUmU*SmU*SmU | UU | OSS |
| WV-37103 | mU*RfU*SmA*SfU*SmA*SfG*SmA*RfG*RmCfAmAmGmAfAm | UUAUAGAGCAAGAACACUGUU | RSSSSSRROOOOOOOOOOO |
| | CfAmCfUmGfUmU*SmU*SmU | UU | OSS |
| WV-37104 | mU*RfU*SmA*SfU*SmA*SfG*SmA*RfG*SmCfAmAmGmAfAm | UUAUAGAGCAAGAACACUGUU | RSSSSSRSOOOOOOOOOOO |
| | CfAmCfUmGfUmU*SmU*SmU | UU | OSS |
| WV-37105 | mU*RfU*SmA*SfU*SmA*SfG*SmA*SfG*RmCfAmAmGmAfAm | UUAUAGAGCAAGAACACUGUU | RSSSSSSROOOOOOOOOOO |
| | CfAmCfUmGfUmU*SmU*SmU | UU | OSS |
| WV-37106 | mU*RfU*SmA*SfU*SmA*SfG*SmA*SfG*SmCfAmAmGmAfAm | UUAUAGAGCAAGAACACUGUU | RSSSSSSSOOOOOOOOOOO |
| | CfAmCfUmGfUmU*SmU*SmU | UU | OSS |
| WV-37107 | mU*SfU*RmA*RfU*RmA*RfG*RmA*RfG*RmCfAmAmGmAfAm | UUAUAGAGCAAGAACACUGUU | SRRRRRRROOOOOOOOOOO |
| | CfAmCfUmGfUmU*SmU*SmU | UU | OSS |
| WV-37108 | mU*SfU*RmA*RfU*RmA*RfG*RmA*RfG*SmCfAmAmGmAfAm | UUAUAGAGCAAGAACACUGUU | SRRRRRRSOOOOOOOOOOO |
| | CfAmCfUmGfUmU*SmU*SmU | UU | OSS |
| WV-37109 | mU*SfU*RmA*RfU*RmA*RfG*RmA*SfG*RmCfAmAmGmAfAm | UUAUAGAGCAAGAACACUGUU | SRRRRRSROOOOOOOOOOO |
| | CfAmCfUmGfUmU*SmU*SmU | UU | OSS |
| WV-37110 | mU*SfU*RmA*RfU*RmA*RfG*RmA*SfG*SmCfAmAmGmAfAm | UUAUAGAGCAAGAACACUGUU | SRRRRRSSOOOOOOOOOOO |
| | CfAmCfUmGfUmU*SmU*SmU | UU | OSS |
| WV-37111 | mU*SfU*RmA*RfU*RmA*RfG*SmA*RfG*RmCfAmAmGmAfAm | UUAUAGAGCAAGAACACUGUU | SRRRRSRROOOOOOOOOOO |
| | CfAmCfUmGfUmU*SmU*SmU | UU | OSS |
| WV-37112 | mU*SfU*RmA*RfU*RmA*RfG*SmA*RfG*SmCfAmAmGmAfAm | UUAUAGAGCAAGAACACUGUU | SRRRRSRSOOOOOOOOOOO |
| | CfAmCfUmGfUmU*SmU*SmU | UU | OSS |
| WV-37113 | mU*SfU*RmA*RfU*RmA*RfG*SmA*SfG*RmCfAmAmGmAfAm | UUAUAGAGCAAGAACACUGUU | SRRRRSSROOOOOOOOOOO |
| | CfAmCfUmGfUmU*SmU*SmU | UU | OSS |
| WV-37114 | mU*SfU*RmA*RfU*RmA*RfG*SmA*SfG*SmCfAmAmGmAfAm | UUAUAGAGCAAGAACACUGUU | SRRRRSSSOOOOOOOOOOO |
| | CfAmCfUmGfUmU*SmU*SmU | UU | OSS |
| WV-37115 | mU*SfU*RmA*RfU*RmA*SfG*RmA*RfG*RmCfAmAmGmAfAm | UUAUAGAGCAAGAACACUGUU | SRRRSRRROOOOOOOOOOO |
| | CfAmCfUmGfUmU*SmU*SmU | UU | OSS |
| WV-37116 | mU*SfU*RmA*RfU*RmA*SfG*RmA*RfG*SmCfAmAmGmAfAm | UUAUAGAGCAAGAACACUGUU | SRRRSRRSOOOOOOOOOOO |
| | CfAmCfUmGfUmU*SmU*SmU | UU | OSS |
| WV-37117 | mU*SfU*RmA*RfU*RmA*SfG*RmA*SfG*RmCfAmAmGmAfAm | UUAUAGAGCAAGAACACUGUU | SRRRSRSROOOOOOOOOOO |
| | CfAmCfUmGfUmU*SmU*SmU | UU | OSS |
| WV-37118 | mU*SfU*RmA*RfU*RmA*SfG*RmA*SfG*SmCfAmAmGmAfAm | UUAUAGAGCAAGAACACUGUU | SRRRSRSSOOOOOOOOOOO |
| | CfAmCfUmGfUmU*SmU*SmU | UU | OSS |
| WV-37119 | mU*SfU*RmA*RfU*RmA*SfG*SmA*RfG*RmCfAmAmGmAfAm | UUAUAGAGCAAGAACACUGUU | SRRRSSRROOOOOOOOOOO |
| | CfAmCfUmGfUmU*SmU*SmU | UU | OSS |
| WV-37120 | mU*SfU*RmA*RfU*RmA*SfG*SmA*RfG*SmCfAmAmGmAfAm | UUAUAGAGCAAGAACACUGUU | SRRRSSRSOOOOOOOOOOO |
| | CfAmCfUmGfUmU*SmU*SmU | UU | OSS |
| WV-37121 | mU*SfU*RmA*RfU*RmA*SfG*SmA*SfG*RmCfAmAmGmAfAm | UUAUAGAGCAAGAACACUGUU | SRRRSSSROOOOOOOOOOO |
| | CfAmCfUmGfUmU*SmU*SmU | UU | OSS |
| WV-37122 | mU*SfU*RmA*RfU*RmA*SfG*SmA*SfG*SmCfAmAmGmAfAm | UUAUAGAGCAAGAACACUGUU | SRRRSSSSOOOOOOOOOOO |
| | CfAmCfUmGfUmU*SmU*SmU | UU | OSS |
| WV-37123 | mU*SfU*RmA*RfU*SmA*RfG*RmA*RfG*RmCfAmAmGmAfAm | UUAUAGAGCAAGAACACUGUU | SRRSRRRROOOOOOOOOOO |
| | CfAmCfUmGfUmU*SmU*SmU | UU | OSS |
| WV-37124 | mU*SfU*RmA*RfU*SmA*RfG*RmA*RfG*SmCfAmAmGmAfAm | UUAUAGAGCAAGAACACUGUU | SRRSRRRSOOOOOOOOOOO |
| | CfAmCfUmGfUmU*SmU*SmU | UU | OSS |
| WV-37125 | mU*SfU*RmA*RfU*SmA*RfG*RmA*SfG*RmCfAmAmGmAfAm | UUAUAGAGCAAGAACACUGUU | SRRSRRSROOOOOOOOOOO |
| | CfAmCfUmGfUmU*SmU*SmU | UU | OSS |
| WV-37126 | mU*SfU*RmA*RfU*SmA*RfG*RmA*SfG*SmCfAmAmGmAfAm | UUAUAGAGCAAGAACACUGUU | SRRSRRSSOOOOOOOOOOO |
| | CfAmCfUmGfUmU*SmU*SmU | UU | OSS |
| WV-37127 | mU*SfU*RmA*RfU*SmA*RfG*SmA*RfG*RmCfAmAmGmAfAm | UUAUAGAGCAAGAACACUGUU | SRRSRSRROOOOOOOOOOO |
| | CfAmCfUmGfUmU*SmU*SmU | UU | OSS |
| WV-37128 | mU*SfU*RmA*RfU*SmA*RfG*SmA*RfG*SmCfAmAmGmAfAm | UUAUAGAGCAAGAACACUGUU | SRRSRSRSOOOOOOOOOOO |
| | CfAmCfUmGfUmU*SmU*SmU | UU | OSS |
| WV-37129 | mU*SfU*RmA*RfU*SmA*RfG*SmA*SfG*RmCfAmAmGmAfAm | UUAUAGAGCAAGAACACUGUU | SRRSRSSROOOOOOOOOOO |
| | CfAmCfUmGfUmU*SmU*SmU | UU | OSS |
| WV-37130 | mU*SfU*RmA*RfU*SmA*RfG*SmA*SfG*SmCfAmAmGmAfAm | UUAUAGAGCAAGAACACUGUU | SRRSRSSSOOOOOOOOOOO |
| | CfAmCfUmGfUmU*SmU*SmU | UU | OSS |
| WV-37131 | mU*SfU*RmA*RfU*SmA*SfG*RmA*RfG*RmCfAmAmGmAfAm | UUAUAGAGCAAGAACACUGUU | SRRSSRRROOOOOOOOOOO |
| | CfAmCfUmGfUmU*SmU*SmU | UU | OSS |
| WV-37132 | mU*SfU*RmA*RfU*SmA*SfG*RmA*RfG*SmCfAmAmGmAfAm | UUAUAGAGCAAGAACACUGUU | SRRSSRRSOOOOOOOOOOO |
| | CfAmCfUmGfUmU*SmU*SmU | UU | OSS |
| WV-37133 | mU*SfU*RmA*RfU*SmA*SfG*RmA*SfG*RmCfAmAmGmAfAm | UUAUAGAGCAAGAACACUGUU | SRRSSRSROOOOOOOOOOO |
| | CfAmCfUmGfUmU*SmU*SmU | UU | OSS |
| WV-37134 | mU*SfU*RmA*RfU*SmA*SfG*RmA*SfG*SmCfAmAmGmAfAm | UUAUAGAGCAAGAACACUGUU | SRRSSRSSOOOOOOOOOOO |
| | CfAmCfUmGfUmU*SmU*SmU | UU | OSS |
| WV-37135 | mU*SfU*RmA*RfU*SmA*SfG*SmA*RfG*RmCfAmAmGmAfAm | UUAUAGAGCAAGAACACUGUU | SRRSSSRROOOOOOOOOOO |
| | CfAmCfUmGfUmU*SmU*SmU | UU | OSS |
| WV-37136 | mU*SfU*RmA*RfU*SmA*SfG*SmA*RfG*SmCfAmAmGmAfAm | UUAUAGAGCAAGAACACUGUU | SRRSSSRSOOOOOOOOOOO |
| | CfAmCfUmGfUmU*SmU*SmU | UU | OSS |
| WV-37137 | mU*SfU*RmA*RfU*SmA*SfG*SmA*SfG*RmCfAmAmGmAfAm | UUAUAGAGCAAGAACACUGUU | SRRSSSSROOOOOOOOOOO |
| | CfAmCfUmGfUmU*SmU*SmU | UU | OSS |
| WV-37138 | mU*SfU*RmA*RfU*SmA*SfG*SmA*SfG*SmCfAmAmGmAfAm | UUAUAGAGCAAGAACACUGUU | SRRSSSSSOOOOOOOOOOO |
| | CfAmCfUmGfUmU*SmU*SmU | UU | OSS |
| WV-37139 | mU*SfU*RmA*SfU*RmA*RfG*RmA*RfG*RmCfAmAmGmAfAm | UUAUAGAGCAAGAACACUGUU | SRSRRRRROOOOOOOOOOO |
| | CfAmCfUmGfUmU*SmU*SmU | UU | OSS |
| WV-37140 | mU*SfU*RmA*SfU*RmA*RfG*RmA*RfG*SmCfAmAmGmAfAm | UUAUAGAGCAAGAACACUGUU | SRSRRRRSOOOOOOOOOOO |
| | CfAmCfUmGfUmU*SmU*SmU | UU | OSS |
| WV-37141 | mU*SfU*RmA*SfU*RmA*RfG*RmA*SfG*RmCfAmAmGmAfAm | UUAUAGAGCAAGAACACUGUU | SRSRRRSROOOOOOOOOOO |
| | CfAmCfUmGfUmU*SmU*SmU | UU | OSS |
| WV-37142 | mU*SfU*RmA*SfU*RmA*RfG*RmA*SfG*SmCfAmAmGmAfAm | UUAUAGAGCAAGAACACUGUU | SRSRRRSSOOOOOOOOOOO |
| | CfAmCfUmGfUmU*SmU*SmU | UU | OSS |
| WV-37143 | mU*SfU*RmA*SfU*RmA*RfG*SmA*RfG*RmCfAmAmGmAfAm | UUAUAGAGCAAGAACACUGUU | SRSRRSRROOOOOOOOOOO |
| | CfAmCfUmGfUmU*SmU*SmU | UU | OSS |
| WV-37144 | mU*SfU*RmA*SfU*RmA*RfG*SmA*RfG*SmCfAmAmGmAfAm | UUAUAGAGCAAGAACACUGUU | SRSRRSRSOOOOOOOOOOO |
| | CfAmCfUmGfUmU*SmU*SmU | UU | OSS |
| WV-37145 | mU*SfU*RmA*SfU*RmA*RfG*SmA*SfG*RmCfAmAmGmAfAm | UUAUAGAGCAAGAACACUGUU | SRSRRSSROOOOOOOOOOO |
| | CfAmCfUmGfUmU*SmU*SmU | UU | OSS |
| WV-37146 | mU*SfU*RmA*SfU*RmA*RfG*SmA*SfG*SmCfAmAmGmAfAm | UUAUAGAGCAAGAACACUGUU | SRSRRSSSOOOOOOOOOOO |
| | CfAmCfUmGfUmU*SmU*SmU | UU | OSS |
| WV-37147 | mU*SfU*RmA*SfU*RmA*SfG*RmA*RfG*RmCfAmAmGmAfAm | UUAUAGAGCAAGAACACUGUU | SRSRSRRROOOOOOOOOOO |
| | CfAmCfUmGfUmU*SmU*SmU | UU | OSS |
| WV-37148 | mU*SfU*RmA*SfU*RmA*SfG*RmA*RfG*SmCfAmAmGmAfAm | UUAUAGAGCAAGAACACUGUU | SRSRSRRSOOOOOOOOOOO |
| | CfAmCfUmGfUmU*SmU*SmU | UU | OSS |
| WV-37149 | mU*SfU*RmA*SfU*RmA*SfG*RmA*SfG*RmCfAmAmGmAfAm | UUAUAGAGCAAGAACACUGUU | SRSRSRSROOOOOOOOOOO |
| | CfAmCfUmGfUmU*SmU*SmU | UU | OSS |
| WV-37150 | mU*SfU*RmA*SfU*RmA*SfG*RmA*SfG*SmCfAmAmGmAfAm | UUAUAGAGCAAGAACACUGUU | SRSRSRSSOOOOOOOOOOO |
| | CfAmCfUmGfUmU*SmU*SmU | UU | OSS |
| WV-37151 | mU*SfU*RmA*SfU*RmA*SfG*SmA*RfG*RmCfAmAmGmAfAm | UUAUAGAGCAAGAACACUGUU | SRSRSSRROOOOOOOOOOO |
| | CfAmCfUmGfUmU*SmU*SmU | UU | OSS |
| WV-37152 | mU*SfU*RmA*SfU*RmA*SfG*SmA*RfG*SmCfAmAmGmAfAm | UUAUAGAGCAAGAACACUGUU | SRSRSSRSOOOOOOOOOOO |
| | CfAmCfUmGfUmU*SmU*SmU | UU | OSS |
| WV-37153 | mU*SfU*RmA*SfU*RmA*SfG*SmA*SfG*RmCfAmAmGmAfAm | UUAUAGAGCAAGAACACUGUU | SRSRSSSROOOOOOOOOOO |
| | CfAmCfUmGfUmU*SmU*SmU | UU | OSS |
| WV-37154 | mU*SfU*RmA*SfU*RmA*SfG*SmA*SfG*SmCfAmAmGmAfAm | UUAUAGAGCAAGAACACUGUU | SRSRSSSSOOOOOOOOOOO |
| | CfAmCfUmGfUmU*SmU*SmU | UU | OSS |
| WV-37155 | mU*SfU*RmA*SfU*SmA*RfG*RmA*RfG*RmCfAmAmGmAfAm | UUAUAGAGCAAGAACACUGUU | SRSSRRRROOOOOOOOOOO |
| | CfAmCfUmGfUmU*SmU*SmU | UU | OSS |
| WV-37156 | mU*SfU*RmA*SfU*SmA*RfG*RmA*RfG*SmCfAmAmGmAfAm | UUAUAGAGCAAGAACACUGUU | SRSSRRRSOOOOOOOOOOO |
| | CfAmCfUmGfUmU*SmU*SmU | UU | OSS |
| WV-37157 | mU*SfU*RmA*SfU*SmA*RfG*RmA*SfG*RmCfAmAmGmAfAm | UUAUAGAGCAAGAACACUGUU | SRSSRRSROOOOOOOOOOO |
| | CfAmCfUmGfUmU*SmU*SmU | UU | OSS |
| WV-37158 | mU*SfU*RmA*SfU*SmA*RfG*RmA*SfG*SmCfAmAmGmAfAm | UUAUAGAGCAAGAACACUGUU | SRSSRRSSOOOOOOOOOOO |
| | CfAmCfUmGfUmU*SmU*SmU | UU | OSS |
| WV-37159 | mU*SfU*RmA*SfU*SmA*RfG*SmA*RfG*RmCfAmAmGmAfAm | UUAUAGAGCAAGAACACUGUU | SRSSRSRROOOOOOOOOOO |
| | CfAmCfUmGfUmU*SmU*SmU | UU | OSS |
| WV-37160 | mU*SfU*RmA*SfU*SmA*RfG*SmA*RfG*SmCfAmAmGmAfAm | UUAUAGAGCAAGAACACUGUU | SRSSRSRSOOOOOOOOOOO |
| | CfAmCfUmGfUmU*SmU*SmU | UU | OSS |
| WV-37161 | mU*SfU*RmA*SfU*SmA*RfG*SmA*SfG*RmCfAmAmGmAfAm | UUAUAGAGCAAGAACACUGUU | SRSSRSSROOOOOOOOOOO |
| | CfAmCfUmGfUmU*SmU*SmU | UU | OSS |
| WV-37162 | mU*SfU*RmA*SfU*SmA*RfG*SmA*SfG*SmCfAmAmGmAfAm | UUAUAGAGCAAGAACACUGUU | SRSSRSSSOOOOOOOOOOO |
| | CfAmCfUmGfUmU*SmU*SmU | UU | OSS |
| WV-37163 | mU*SfU*RmA*SfU*SmA*SfG*RmA*RfG*RmCfAmAmGmAfAm | UUAUAGAGCAAGAACACUGUU | SRSSSRRROOOOOOOOOOO |
| | CfAmCfUmGfUmU*SmU*SmU | UU | OSS |
| WV-37164 | mU*SfU*RmA*SfU*SmA*SfG*RmA*RfG*SmCfAmAmGmAfAm | UUAUAGAGCAAGAACACUGUU | SRSSSRRSOOOOOOOOOOO |
| | CfAmCfUmGfUmU*SmU*SmU | UU | OSS |
| WV-37165 | mU*SfU*RmA*SfU*SmA*SfG*RmA*SfG*RmCfAmAmGmAfAm | UUAUAGAGCAAGAACACUGUU | SRSSSRSROOOOOOOOOOO |
| | CfAmCfUmGfUmU*SmU*SmU | UU | OSS |
| WV-37166 | mU*SfU*RmA*SfU*SmA*SfG*RmA*SfG*SmCfAmAmGmAfAm | UUAUAGAGCAAGAACACUGUU | SRSSSRSSOOOOOOOOOOO |
| | CfAmCfUmGfUmU*SmU*SmU | UU | OSS |
| WV-37167 | mU*SfU*RmA*SfU*SmA*SfG*SmA*RfG*RmCfAmAmGmAfAm | UUAUAGAGCAAGAACACUGUU | SRSSSSRROOOOOOOOOOO |
| | CfAmCfUmGfUmU*SmU*SmU | UU | OSS |
| WV-37168 | mU*SfU*RmA*SfU*SmA*SfG*SmA*RfG*SmCfAmAmGmAfAm | UUAUAGAGCAAGAACACUGUU | SRSSSSRSOOOOOOOOOOO |
| | CfAmCfUmGfUmU*SmU*SmU | UU | OSS |
| WV-37169 | mU*SfU*RmA*SfU*SmA*SfG*SmA*SfG*RmCfAmAmGmAfAm | UUAUAGAGCAAGAACACUGUU | SRSSSSSROOOOOOOOOOO |
| | CfAmCfUmGfUmU*SmU*SmU | UU | OSS |
| WV-37170 | mU*SfU*RmA*SfU*SmA*SfG*SmA*SfG*SmCfAmAmGmAfAm | UUAUAGAGCAAGAACACUGUU | SRSSSSSSOOOOOOOOOOO |
| | CfAmCfUmGfUmU*SmU*SmU | UU | OSS |
| WV-37171 | mU*SfU*SmA*RfU*RmA*RfG*RmA*RfG*RmCfAmAmGmAfAm | UUAUAGAGCAAGAACACUGUU | SSRRRRRROOOOOOOOOOO |
| | CfAmCfUmGfUmU*SmU*SmU | UU | OSS |
| WV-37172 | mU*SfU*SmA*RfU*RmA*RfG*RmA*RfG*SmCfAmAmGmAfAm | UUAUAGAGCAAGAACACUGUU | SSRRRRRSOOOOOOOOOOO |
| | CfAmCfUmGfUmU*SmU*SmU | UU | OSS |
| WV-37173 | mU*SfU*SmA*RfU*RmA*RfG*RmA*SfG*RmCfAmAmGmAfAm | UUAUAGAGCAAGAACACUGUU | SSRRRRSROOOOOOOOOOO |
| | CfAmCfUmGfUmU*SmU*SmU | UU | OSS |
| WV-37174 | mU*SfU*SmA*RfU*RmA*RfG*RmA*SfG*SmCfAmAmGmAfAm | UUAUAGAGCAAGAACACUGUU | SSRRRRSSOOOOOOOOOOO |
| | CfAmCfUmGfUmU*SmU*SmU | UU | OSS |
| WV-37175 | mU*SfU*SmA*RfU*RmA*RfG*SmA*RfG*RmCfAmAmGmAfAm | UUAUAGAGCAAGAACACUGUU | SSRRRSRROOOOOOOOOOO |
| | CfAmCfUmGfUmU*SmU*SmU | UU | OSS |
| WV-37176 | mU*SfU*SmA*RfU*RmA*RfG*SmA*RfG*SmCfAmAmGmAfAm | UUAUAGAGCAAGAACACUGUU | SSRRRSRSOOOOOOOOOOO |
| | CfAmCfUmGfUmU*SmU*SmU | UU | OSS |
| WV-37177 | mU*SfU*SmA*RfU*RmA*RfG*SmA*SfG*RmCfAmAmGmAfAm | UUAUAGAGCAAGAACACUGUU | SSRRRSSROOOOOOOOOOO |
| | CfAmCfUmGfUmU*SmU*SmU | UU | OSS |
| WV-37178 | mU*SfU*SmA*RfU*RmA*RfG*SmA*SfG*SmCfAmAmGmAfAm | UUAUAGAGCAAGAACACUGUU | SSRRRSSSOOOOOOOOOOO |
| | CfAmCfUmGfUmU*SmU*SmU | UU | OSS |
| WV-37179 | mU*SfU*SmA*RfU*RmA*SfG*RmA*RfG*RmCfAmAmGmAfAm | UUAUAGAGCAAGAACACUGUU | SSRRSRRROOOOOOOOOOO |
| | CfAmCfUmGfUmU*SmU*SmU | UU | OSS |
| WV-37180 | mU*SfU*SmA*RfU*RmA*SfG*RmA*RfG*SmCfAmAmGmAfAm | UUAUAGAGCAAGAACACUGUU | SSRRSRRSOOOOOOOOOOO |
| | CfAmCfUmGfUmU*SmU*SmU | UU | OSS |
| WV-37181 | mU*SfU*SmA*RfU*RmA*SfG*RmA*SfG*RmCfAmAmGmAfAm | UUAUAGAGCAAGAACACUGUU | SSRRSRSROOOOOOOOOOO |
| | CfAmCfUmGfUmU*SmU*SmU | UU | OSS |
| WV-37182 | mU*SfU*SmA*RfU*RmA*SfG*RmA*SfG*SmCfAmAmGmAfAm | UUAUAGAGCAAGAACACUGUU | SSRRSRSSOOOOOOOOOOO |
| | CfAmCfUmGfUmU*SmU*SmU | UU | OSS |
| WV-37183 | mU*SfU*SmA*RfU*RmA*SfG*SmA*RfG*RmCfAmAmGmAfAm | UUAUAGAGCAAGAACACUGUU | SSRRSSRROOOOOOOOOOO |
| | CfAmCfUmGfUmU*SmU*SmU | UU | OSS |
| WV-37184 | mU*SfU*SmA*RfU*RmA*SfG*SmA*RfG*SmCfAmAmGmAfAm | UUAUAGAGCAAGAACACUGUU | SSRRSSRSOOOOOOOOOOO |
| | CfAmCfUmGfUmU*SmU*SmU | UU | OSS |
| WV-37185 | mU*SfU*SmA*RfU*RmA*SfG*SmA*SfG*RmCfAmAmGmAfAm | UUAUAGAGCAAGAACACUGUU | SSRRSSSROOOOOOOOOOO |
| | CfAmCfUmGfUmU*SmU*SmU | UU | OSS |
| WV-37186 | mU*SfU*SmA*RfU*RmA*SfG*SmA*SfG*SmCfAmAmGmAfAm | UUAUAGAGCAAGAACACUGUU | SSRRSSSSOOOOOOOOOOO |
| | CfAmCfUmGfUmU*SmU*SmU | UU | OSS |
| WV-37187 | mU*SfU*SmA*RfU*SmA*RfG*RmA*RfG*RmCfAmAmGmAfAm | UUAUAGAGCAAGAACACUGUU | SSRSRRRROOOOOOOOOOO |
| | CfAmCfUmGfUmU*SmU*SmU | UU | OSS |
| WV-37188 | mU*SfU*SmA*RfU*SmA*RfG*RmA*RfG*SmCfAmAmGmAfAm | UUAUAGAGCAAGAACACUGUU | SSRSRRRSOOOOOOOOOOO |
| | CfAmCfUmGfUmU*SmU*SmU | UU | OSS |
| WV-37189 | mU*SfU*SmA*RfU*SmA*RfG*RmA*SfG*RmCfAmAmGmAfAm | UUAUAGAGCAAGAACACUGUU | SSRSRRSROOOOOOOOOOO |
| | CfAmCfUmGfUmU*SmU*SmU | UU | OSS |
| WV-37190 | mU*SfU*SmA*RfU*SmA*RfG*RmA*SfG*SmCfAmAmGmAfAm | UUAUAGAGCAAGAACACUGUU | SSRSRRSSOOOOOOOOOOO |
| | CfAmCfUmGfUmU*SmU*SmU | UU | OSS |
| WV-37191 | mU*SfU*SmA*RfU*SmA*RfG*SmA*RfG*RmCfAmAmGmAfAm | UUAUAGAGCAAGAACACUGUU | SSRSRSRROOOOOOOOOOO |
| | CfAmCfUmGfUmU*SmU*SmU | UU | OSS |
| WV-37192 | mU*SfU*SmA*RfU*SmA*RfG*SmA*RfG*SmCfAmAmGmAfAm | UUAUAGAGCAAGAACACUGUU | SSRSRSRSOOOOOOOOOOO |
| | CfAmCfUmGfUmU*SmU*SmU | UU | OSS |
| WV-37193 | mU*SfU*SmA*RfU*SmA*RfG*SmA*SfG*RmCfAmAmGmAfAm | UUAUAGAGCAAGAACACUGUU | SSRSRSSROOOOOOOOOOO |
| | CfAmCfUmGfUmU*SmU*SmU | UU | OSS |
| WV-37194 | mU*SfU*SmA*RfU*SmA*RfG*SmA*SfG*SmCfAmAmGmAfAm | UUAUAGAGCAAGAACACUGUU | SSRSRSSSOOOOOOOOOOO |
| | CfAmCfUmGfUmU*SmU*SmU | UU | OSS |
| WV-37195 | mU*SfU*SmA*RfU*SmA*SfG*RmA*RfG*RmCfAmAmGmAfAm | UUAUAGAGCAAGAACACUGUU | SSRSSRRROOOOOOOOOOO |
| | CfAmCfUmGfUmU*SmU*SmU | UU | OSS |
| WV-37196 | mU*SfU*SmA*RfU*SmA*SfG*RmA*RfG*SmCfAmAmGmAfAm | UUAUAGAGCAAGAACACUGUU | SSRSSRRSOOOOOOOOOOO |
| | CfAmCfUmGfUmU*SmU*SmU | UU | OSS |
| WV-37197 | mU*SfU*SmA*RfU*SmA*SfG*RmA*SfG*RmCfAmAmGmAfAm | UUAUAGAGCAAGAACACUGUU | SSRSSRSROOOOOOOOOOO |
| | CfAmCfUmGfUmU*SmU*SmU | UU | OSS |
| WV-37198 | mU*SfU*SmA*RfU*SmA*SfG*RmA*SfG*SmCfAmAmGmAfAm | UUAUAGAGCAAGAACACUGUU | SSRSSRSSOOOOOOOOOOO |
| | CfAmCfUmGfUmU*SmU*SmU | UU | OSS |
| WV-37199 | mU*SfU*SmA*RfU*SmA*SfG*SmA*RfG*RmCfAmAmGmAfAm | UUAUAGAGCAAGAACACUGUU | SSRSSSRROOOOOOOOOOO |
| | CfAmCfUmGfUmU*SmU*SmU | UU | OSS |
| WV-37200 | mU*SfU*SmA*RfU*SmA*SfG*SmA*RfG*SmCfAmAmGmAfAm | UUAUAGAGCAAGAACACUGUU | SSRSSSRSOOOOOOOOOOO |
| | CfAmCfUmGfUmU*SmU*SmU | UU | OSS |
| WV-37201 | mU*SfU*SmA*RfU*SmA*SfG*SmA*SfG*RmCfAmAmGmAfAm | UUAUAGAGCAAGAACACUGUU | SSRSSSSROOOOOOOOOOO |
| | CfAmCfUmGfUmU*SmU*SmU | UU | OSS |
| WV-37202 | mU*SfU*SmA*RfU*SmA*SfG*SmA*SfG*SmCfAmAmGmAfAm | UUAUAGAGCAAGAACACUGUU | SSRSSSSSOOOOOOOOOOO |
| | CfAmCfUmGfUmU*SmU*SmU | UU | OSS |
| WV-37203 | mU*SfU*SmA*SfU*RmA*RfG*RmA*RfG*RmCfAmAmGmAfAm | UUAUAGAGCAAGAACACUGUU | SSSRRRRROOOOOOOOOOO |
| | CfAmCfUmGfUmU*SmU*SmU | UU | OSS |
| WV-37204 | mU*SfU*SmA*SfU*RmA*RfG*RmA*RfG*SmCfAmAmGmAfAm | UUAUAGAGCAAGAACACUGUU | SSSRRRRSOOOOOOOOOOO |
| | CfAmCfUmGfUmU*SmU*SmU | UU | OSS |
| WV-37205 | mU*SfU*SmA*SfU*RmA*RfG*RmA*SfG*RmCfAmAmGmAfAm | UUAUAGAGCAAGAACACUGUU | SSSRRRSROOOOOOOOOOO |
| | CfAmCfUmGfUmU*SmU*SmU | UU | OSS |
| WV-37206 | mU*SfU*SmA*SfU*RmA*RfG*RmA*SfG*SmCfAmAmGmAfAm | UUAUAGAGCAAGAACACUGUU | SSSRRRSSOOOOOOOOOOO |
| | CfAmCfUmGfUmU*SmU*SmU | UU | OSS |
| WV-37207 | mU*SfU*SmA*SfU*RmA*RfG*SmA*RfG*RmCfAmAmGmAfAm | UUAUAGAGCAAGAACACUGUU | SSSRRSRROOOOOOOOOOO |
| | CfAmCfUmGfUmU*SmU*SmU | UU | OSS |
| WV-37208 | mU*SfU*SmA*SfU*RmA*RfG*SmA*RfG*SmCfAmAmGmAfAm | UUAUAGAGCAAGAACACUGUU | SSSRRSRSOOOOOOOOOOO |
| | CfAmCfUmGfUmU*SmU*SmU | UU | OSS |
| WV-37209 | mU*SfU*SmA*SfU*RmA*RfG*SmA*SfG*RmCfAmAmGmAfAm | UUAUAGAGCAAGAACACUGUU | SSSRRSSROOOOOOOOOOO |
| | CfAmCfUmGfUmU*SmU*SmU | UU | OSS |
| WV-37210 | mU*SfU*SmA*SfU*RmA*RfG*SmA*SfG*SmCfAmAmGmAfAm | UUAUAGAGCAAGAACACUGUU | SSSRRSSSOOOOOOOOOOO |
| | CfAmCfUmGfUmU*SmU*SmU | UU | OSS |
| WV-37211 | mU*SfU*SmA*SfU*RmA*SfG*RmA*RfG*RmCfAmAmGmAfAm | UUAUAGAGCAAGAACACUGUU | SSSRSRRROOOOOOOOOOO |
| | CfAmCfUmGfUmU*SmU*SmU | UU | OSS |
| WV-37212 | mU*SfU*SmA*SfU*RmA*SfG*RmA*RfG*SmCfAmAmGmAfAm | UUAUAGAGCAAGAACACUGUU | SSSRSRRSOOOOOOOOOOO |
| | CfAmCfUmGfUmU*SmU*SmU | UU | OSS |
| WV-37213 | mU*SfU*SmA*SfU*RmA*SfG*RmA*SfG*RmCfAmAmGmAfAm | UUAUAGAGCAAGAACACUGUU | SSSRSRSROOOOOOOOOOO |
| | CfAmCfUmGfUmU*SmU*SmU | UU | OSS |
| WV-37214 | mU*SfU*SmA*SfU*RmA*SfG*RmA*SfG*SmCfAmAmGmAfAm | UUAUAGAGCAAGAACACUGUU | SSSRSRSSOOOOOOOOOOO |
| | CfAmCfUmGfUmU*SmU*SmU | UU | OSS |
| WV-37215 | mU*SfU*SmA*SfU*RmA*SfG*SmA*RfG*RmCfAmAmGmAfAm | UUAUAGAGCAAGAACACUGUU | SSSRSSRROOOOOOOOOOO |
| | CfAmCfUmGfUmU*SmU*SmU | UU | OSS |
| WV-37216 | mU*SfU*SmA*SfU*RmA*SfG*SmA*RfG*SmCfAmAmGmAfAm | UUAUAGAGCAAGAACACUGUU | SSSRSSRSOOOOOOOOOOO |
| | CfAmCfUmGfUmU*SmU*SmU | UU | OSS |
| WV-37217 | mU*SfU*SmA*SfU*RmA*SfG*SmA*SfG*RmCfAmAmGmAfAm | UUAUAGAGCAAGAACACUGUU | SSSRSSSROOOOOOOOOOO |
| | CfAmCfUmGfUmU*SmU*SmU | UU | OSS |
| WV-37218 | mU*SfU*SmA*SfU*RmA*SfG*SmA*SfG*SmCfAmAmGmAfAm | UUAUAGAGCAAGAACACUGUU | SSSRSSSSOOOOOOOOOOO |
| | CfAmCfUmGfUmU*SmU*SmU | UU | OSS |
| WV-37219 | mU*SfU*SmA*SfU*SmA*RfG*RmA*RfG*RmCfAmAmGmAfAm | UUAUAGAGCAAGAACACUGUU | SSSSRRRROOOOOOOOOOO |
| | CfAmCfUmGfUmU*SmU*SmU | UU | OSS |
| WV-37220 | mU*SfU*SmA*SfU*SmA*RfG*RmA*RfG*SmCfAmAmGmAfAm | UUAUAGAGCAAGAACACUGUU | SSSSRRRSOOOOOOOOOOO |
| | CfAmCfUmGfUmU*SmU*SmU | UU | OSS |
| WV-37221 | mU*SfU*SmA*SfU*SmA*RfG*RmA*SfG*RmCfAmAmGmAfAm | UUAUAGAGCAAGAACACUGUU | SSSSRRSROOOOOOOOOOO |
| | CfAmCfUmGfUmU*SmU*SmU | UU | OSS |
| WV-37222 | mU*SfU*SmA*SfU*SmA*RfG*RmA*SfG*SmCfAmAmGmAfAm | UUAUAGAGCAAGAACACUGUU | SSSSRRSSOOOOOOOOOOO |
| | CfAmCfUmGfUmU*SmU*SmU | UU | OSS |
| WV-37223 | mU*SfU*SmA*SfU*SmA*RfG*SmA*RfG*RmCfAmAmGmAfAm | UUAUAGAGCAAGAACACUGUU | SSSSRSRROOOOOOOOOOO |
| | CfAmCfUmGfUmU*SmU*SmU | UU | OSS |
| WV-37224 | mU*SfU*SmA*SfU*SmA*RfG*SmA*RfG*SmCfAmAmGmAfAm | UUAUAGAGCAAGAACACUGUU | SSSSRSRSOOOOOOOOOOO |
| | CfAmCfUmGfUmU*SmU*SmU | UU | OSS |
| WV-37225 | mU*SfU*SmA*SfU*SmA*RfG*SmA*SfG*RmCfAmAmGmAfAm | UUAUAGAGCAAGAACACUGUU | SSSSRSSROOOOOOOOOOO |
| | CfAmCfUmGfUmU*SmU*SmU | UU | OSS |
| WV-37226 | mU*SfU*SmA*SfU*SmA*RfG*SmA*SfG*SmCfAmAmGmAfAm | UUAUAGAGCAAGAACACUGUU | SSSSRSSSOOOOOOOOOOO |
| | CfAmCfUmGfUmU*SmU*SmU | UU | OSS |
| WV-37227 | mU*SfU*SmA*SfU*SmA*SfG*RmA*RfG*RmCfAmAmGmAfAm | UUAUAGAGCAAGAACACUGUU | SSSSSRRROOOOOOOOOOO |
| | CfAmCfUmGfUmU*SmU*SmU | UU | OSS |
| WV-37228 | mU*SfU*SmA*SfU*SmA*SfG*RmA*RfG*SmCfAmAmGmAfAm | UUAUAGAGCAAGAACACUGUU | SSSSSRRSOOOOOOOOOOO |
| | CfAmCfUmGfUmU*SmU*SmU | UU | OSS |
| WV-37229 | mU*SfU*SmA*SfU*SmA*SfG*RmA*SfG*RmCfAmAmGmAfAm | UUAUAGAGCAAGAACACUGUU | SSSSSRSROOOOOOOOOOO |
| | CfAmCfUmGfUmU*SmU*SmU | UU | OSS |
| WV-37230 | mU*SfU*SmA*SfU*SmA*SfG*RmA*SfG*SmCfAmAmGmAfAm | UUAUAGAGCAAGAACACUGUU | SSSSSRSSOOOOOOOOOOO |
| | CfAmCfUmGfUmU*SmU*SmU | UU | OSS |
| WV-37231 | mU*SfU*SmA*SfU*SmA*SfG*SmA*RfG*RmCfAmAmGmAfAm | UUAUAGAGCAAGAACACUGUU | SSSSSSRROOOOOOOOOOO |
| | CfAmCfUmGfUmU*SmU*SmU | UU | OSS |
| WV-37232 | mU*SfU*SmA*SfU*SmA*SfG*SmA*RfG*SmCfAmAmGmAfAm | UUAUAGAGCAAGAACACUGUU | SSSSSSRSOOOOOOOOOOO |
| | CfAmCfUmGfUmU*SmU*SmU | UU | OSS |
| WV-37233 | mU*SfU*SmA*SfU*SmA*SfG*SmA*SfG*RmCfAmAmGmAfAm | UUAUAGAGCAAGAACACUGUU | SSSSSSSROOOOOOOOOOO |
| | CfAmCfUmGfUmU*SmU*SmU | UU | OSS |
| WV-37234 | mU*SfU*SmA*SfU*SmA*SfG*SmA*SfG*SmCfAmAmGmAfAm | UUAUAGAGCAAGAACACUGUU | SSSSSSSSOOOOOOOOOOO |
| | CfAmCfUmGfUmU*SmU*SmU | UU | OSS |
| WV-37235 | mU*RfU*RmA*RfU*RmA*RfG*RmA*RfG*RmCfAmAmGmAfAm | UUAUAGAGCAAGAACACUGUU | RRRRRRRROOOOOOOOOOO |
| | CfAmCfUmGfUmU*SmU*SmU | UU | OSS |
| WV-37236 | mU*fU*mA*fU*mA*fG*mA*fG*mCfAmAmGmAfAmCfAmCfUm | UUAUAGAGCAAGAACACUGUU | XXXXXXXXOOOOOOOOOOO |
| | GfUmU*mU*mU | UU | OXX |
| WV-37236 | mU*fU*mA*fU*mA*fG*mA*fG*mCfAmAmGmAfAmCfAmCfUm | UUAUAGAGCAAGAACACUGUU | XXXXXXXXOOOOOOOOOOO |
| | GfUmU*mU*mU | UU | OXX |
| WV-38082 | mUfUmAfUmAfGmAfGmCfAmAmGmAfAmCfAmCfUmGfUmU*mU | UUAUAGAGCAAGAACACUGUU | OOOOOOOOOOOOOOOOOOO |
| | *mU | UU | OXX |
| WV-38083 | mUfUmAfUmAfGmAfGmCfAmAmGmAfAmCfAmCfUmGfUmU*Sm | UUAUAGAGCAAGAACACUGUU | OOOOOOOOOOOOOOOOOOO |
| | U*SmU | UU | OSS |
| WV-38087 | mU*RfUmAfUmAfGmAfGmCfAmAmGmAfAmCfAmCfUmGfUmU* | UUAUAGAGCAAGAACACUGUU | ROOOOOOOOOOOOOOOOOO |
| | SmU*SmU | UU | OSS |
| WV-38088 | mUfU*RmAfUmAfGmAfGmCfAmAmGmAfAmCfAmCfUmGfUmU* | UUAUAGAGCAAGAACACUGUU | OROOOOOOOOOOOOOOOOO |
| | SmU*SmU | UU | OSS |
| WV-38089 | mUfUmA*RfUmAfGmAfGmCfAmAmGmAfAmCfAmCfUmGfUmU* | UUAUAGAGCAAGAACACUGUU | OOROOOOOOOOOOOOOOOO |
| | SmU*SmU | UU | OSS |
| WV-38090 | mUfUmAfU*RmAfGmAfGmCfAmAmGmAfAmCfAmCfUmGfUmU* | UUAUAGAGCAAGAACACUGUU | OOOROOOOOOOOOOOOOOO |
| | SmU*SmU | UU | OSS |
| WV-38091 | mUfUmAfUmA*RfGmAfGmCfAmAmGmAfAmCfAmCfUmGfUmU* | UUAUAGAGCAAGAACACUGUU | OOOOROOOOOOOOOOOOOO |
| | SmU*SmU | UU | OSS |
| WV-38092 | mUfUmAfUmAfG*RmAfGmCfAmAmGmAfAmCfAmCfUmGfUmU* | UUAUAGAGCAAGAACACUGUU | OOOOOROOOOOOOOOOOOO |
| | SmU*SmU | UU | OSS |
| WV-38093 | mUfUmAfUmAfGmA*RfGmCfAmAmGmAfAmCfAmCfUmGfUmU* | UUAUAGAGCAAGAACACUGUU | OOOOOOROOOOOOOOOOOO |
| | SmU*SmU | UU | OSS |
| WV-38094 | mUfUmAfUmAfGmAfG*RmCfAmAmGmAfAmCfAmCfUmGfUmU* | UUAUAGAGCAAGAACACUGUU | OOOOOOOROOOOOOOOOOO |
| | SmU*SmU | UU | OSS |
| WV-38095 | mUfUmAfUmAfGmAfGmC*RfAmAmGmAfAmCfAmCfUmGfUmU* | UUAUAGAGCAAGAACACUGUU | OOOOOOOOROOOOOOOOOO |
| | SmU*SmU | UU | OSS |
| WV-38096 | mUfUmAfUmAfGmAfGmCfA*RmAmGmAfAmCfAmCfUmGfUmU* | UUAUAGAGCAAGAACACUGUU | OOOOOOOOOROOOOOOOOO |
| | SmU*SmU | UU | OSS |
| WV-38097 | mUfUmAfUmAfGmAfGmCfAmA*RmGmAfAmCfAmCfUmGfUmU* | UUAUAGAGCAAGAACACUGUU | OOOOOOOOOOROOOOOOOO |
| | SmU*SmU | UU | OSS |
| WV-38098 | mUfUmAfUmAfGmAfGmCfAmAmG*RmAfAmCfAmCfUmGfUmU* | UUAUAGAGCAAGAACACUGUU | OOOOOOOOOOOROOOOOOO |
| | SmU*SmU | UU | OSS |
| WV-38099 | mUfUmAfUmAfGmAfGmCfAmAmGmA*RfAmCfAmCfUmGfUmU* | UUAUAGAGCAAGAACACUGUU | OOOOOOOOOOOOROOOOOO |
| | SmU*SmU | UU | OSS |
| WV-38100 | mUfUmAfUmAfGmAfGmCfAmAmGmAfA*RmCfAmCfUmGfUmU* | UUAUAGAGCAAGAACACUGUU | OOOOOOOOOOOOOROOOOO |
| | SmU*SmU | UU | OSS |
| WV-38101 | mUfUmAfUmAfGmAfGmCfAmAmGmAfAmC*RfAmCfUmGfUmU* | UUAUAGAGCAAGAACACUGUU | OOOOOOOOOOOOOOROOOO |
| | SmU*SmU | UU | OSS |
| WV-38102 | mUfUmAfUmAfGmAfGmCfAmAmGmAfAmCfA*RmCfUmGfUmU* | UUAUAGAGCAAGAACACUGUU | OOOOOOOOOOOOOOOROOO |
| | SmU*SmU | UU | OSS |
| WV-38103 | mUfUmAfUmAfGmAfGmCfAmAmGmAfAmCfAmC*RfUmGfUmU* | UUAUAGAGCAAGAACACUGUU | OOOOOOOOOOOOOOOOROO |
| | SmU*SmU | UU | OSS |
| WV-38104 | mUfUmAfUmAfGmAfGmCfAmAmGmAfAmCfAmCfU*RmGfUmU* | UUAUAGAGCAAGAACACUGUU | OOOOOOOOOOOOOOOOORO |
| | SmU*SmU | UU | OSS |
| WV-38105 | mUfUmAfUmAfGmAfGmCfAmAmGmAfAmCfAmCfUmG*RfUmU* | UUAUAGAGCAAGAACACUGUU | OOOOOOOOOOOOOOOOOOR |
| | SmU*SmU | UU | OSS |
| WV-38106 | mUfUmAfUmAfGmAfGmCfAmAmGmAfAmCfAmCfUmGfU*RmU* | UUAUAGAGCAAGAACACUGUU | OOOOOOOOOOOOOOOOOOO |
| | SmU*SmU | UU | RSS |
| WV-38107 | mU*SfUmAfUmAfGmAfGmCfAmAmGmAfAmCfAmCfUmGfUmU* | UUAUAGAGCAAGAACACUGUU | SOOOOOOOOOOOOOOOOOO |
| | SmU*SmU | UU | OSS |
| WV-38108 | mUfU*SmAfUmAfGmAfGmCfAmAmGmAfAmCfAmCfUmGfUmU* | UUAUAGAGCAAGAACACUGUU | OSOOOOOOOOOOOOOOOOO |
| | SmU*SmU | UU | OSS |
| WV-38109 | mUfUmA*SfUmAfGmAfGmCfAmAmGmAfAmCfAmCfUmGfUmU* | UUAUAGAGCAAGAACACUGUU | OOSOOOOOOOOOOOOOOOO |
| | SmU*SmU | UU | OSS |
| WV-38110 | mUfUmAfU*SmAfGmAfGmCfAmAmGmAfAmCfAmCfUmGfUmU* | UUAUAGAGCAAGAACACUGUU | OOOOSOOOOOOOOOOOOOO |
| | SmU*SmU | UU | OSS |
| WV-38111 | mUfUmAfUmA*SfGmAfGmCfAmAmGmAfAmCfAmCfUmGfUmU* | UUAUAGAGCAAGAACACUGUU | OOOOSOOOOOOOOOOOOOO |
| | SmU*SmU | UU | OSS |
| WV-38112 | mUfUmAfUmAfG*SmAfGmCfAmAmGmAfAmCfAmCfUmGfUmU* | UUAUAGAGCAAGAACACUGUU | OOOOOSOOOOOOOOOOOOO |
| | SmU*SmU | UU | OSS |
| WV-38113 | mUfUmAfUmAfGmA*SfGmCfAmAmGmAfAmCfAmCfUmGfUmU* | UUAUAGAGCAAGAACACUGUU | OOOOOOSOOOOOOOOOOOO |
| | SmU*SmU | UU | OSS |
| WV-38114 | mUfUmAfUmAfGmAfG*SmCfAmAmGmAfAmCfAmCfUmGfUmU* | UUAUAGAGCAAGAACACUGUU | OOOOOOOSOOOOOOOOOOO |
| | SmU*SmU | UU | OSS |
| WV-38115 | mUfUmAfUmAfGmAfGmC*SfAmAmGmAfAmCfAmCfUmGfUmU* | UUAUAGAGCAAGAACACUGUU | OOOOOOOOSOOOOOOOOOO |
| | SmU*SmU | UU | OSS |
| WV-38116 | mUfUmAfUmAfGmAfGmCfA*SmAmGmAfAmCfAmCfUmGfUmU* | UUAUAGAGCAAGAACACUGUU | OOOOOOOOOOSOOOOOOOO |
| | SmU*SmU | UU | OSS |
| WV-38117 | mUfUmAfUmAfGmAfGmCfAmA*SmGmAfAmCfAmCfUmGfUmU* | UUAUAGAGCAAGAACACUGUU | OOOOOOOOOOSOOOOOOOO |
| | SmU*SmU | UU | OSS |
| WV-38118 | mUfUmAfUmAfGmAfGmCfAmAmG*SmAfAmCfAmCfUmGfUmU* | UUAUAGAGCAAGAACACUGUU | OOOOOOOOOOO5OOOOOOO |
| | SmU*SmU | UU | OSS |
| WV-38119 | mUfUmAfUmAfGmAfGmCfAmAmGmA*SfAmCfAmCfUmGfUmU* | UUAUAGAGCAAGAACACUGUU | OOOOOOOOOOOOSOOOOOO |
| | SmU*SmU | UU | OSS |
| WV-38120 | mUfUmAfUmAfGmAfGmCfAmAmGmAfA*SmCfAmCfUmGfUmU* | UUAUAGAGCAAGAACACUGUU | OOOOOOOOOOOOO$OOOOO |
| | SmU*SmU | UU | OSS |
| WV-38121 | mUfUmAfUmAfGmAfGmCfAmAmGmAfAmC*SfAmCfUmGfUmU* | UUAUAGAGCAAGAACACUGUU | OOOOOOOOOOOOOOSOOOO |
| | SmU*SmU | UU | OSS |
| WV-38122 | mUfUmAfUmAfGmAfGmCfAmAmGmAfAmCfA*SmCfUmGfUmU* | UUAUAGAGCAAGAACACUGUU | OOOOOOOOOOOOOOOSOOO |
| | SmU*SmU | UU | OSS |
| WV-38123 | mUfUmAfUmAfGmAfGmCfAmAmGmAfAmCfAmC*SfUmGfUmU* | UUAUAGAGCAAGAACACUGUU | OOOOOOOOOOOOOOOOSOO |
| | SmU*SmU | UU | OSS |
| WV-38124 | mUfUmAfUmAfGmAfGmCfAmAmGmAfAmCfAmCfU*SmGfUmU* | UUAUAGAGCAAGAACACUGUU | OOOOOOOOOOOOOOOOOSO |
| | SmU*SmU | UU | OSS |
| WV-38125 | mUfUmAfUmAfGmAfGmCfAmAmGmAfAmCfAmCfUmG*SfUmU* | UUAUAGAGCAAGAACACUGUU | OOOOOOOOOOOOOOOOOOS |
| | SmU*SmU | UU | OSS |
| WV-38126 | mUfUmAfUmAfGmAfGmCfAmAmGmAfAmCfAmCfUmGfU*SmU* | UUAUAGAGCAAGAACACUGUU | OOOOOOOOOOOOOOOOOOO |
| | SmU*SmU | UU | SSS |
| WV-38127 | mU*fUmAfUmAfGmAfGmCfAmAmGmAfAmCfAmCfUmGfUmU*S | UUAUAGAGCAAGAACACUGUU | XOOOOOOOOOOOOOOOOOO |
| | mU*SmU | UU | OSS |
| WV-38128 | mUfU*mAfUmAfGmAfGmCfAmAmGmAfAmCfAmCfUmGfUmU*S | UUAUAGAGCAAGAACACUGUU | OXOOOOOOOOOOOOOOOOO |
| | mU*SmU | UU | OSS |
| WV-38129 | mUfUmA*fUmAfGmAfGmCfAmAmGmAfAmCfAmCfUmGfUmU*S | UUAUAGAGCAAGAACACUGUU | OOXOOOOOOOOOOOOOOOO |
| | mU*SmU | UU | OSS |
| WV-38130 | mUfUmAfU*mAfGmAfGmCfAmAmGmAfAmCfAmCfUmGfUmU*S | UUAUAGAGCAAGAACACUGUU | OOOXOOOOOOOOOOOOOOO |
| | mU*SmU | UU | OSS |
| WV-38131 | mUfUmAfUmA*fGmAfGmCfAmAmGmAfAmCfAmCfUmGfUmU*S | UUAUAGAGCAAGAACACUGUU | OOOOXOOOOOOOOOOOOOO |
| | mU*SmU | UU | OSS |
| WV-38132 | mUfUmAfUmAfG*mAfGmCfAmAmGmAfAmCfAmCfUmGfUmU*S | UUAUAGAGCAAGAACACUGUU | OOOOOXOOOOOOOOOOOOO |
| | mU*SmU | UU | OSS |
| WV-38133 | mUfUmAfUmAfGmA*fGmCfAmAmGmAfAmCfAmCfUmGfUmU*S | UUAUAGAGCAAGAACACUGUU | OOOOOOXOOOOOOOOOOOO |
| | mU*SmU | UU | OSS |
| WV-38134 | mUfUmAfUmAfGmAfG*mCfAmAmGmAfAmCfAmCfUmGfUmU*S | UUAUAGAGCAAGAACACUGUU | OOOOOOOXOOOOOOOOOOO |
| | mU*SmU | UU | OSS |
| WV-38135 | mUfUmAfUmAfGmAfGmC*fAmAmGmAfAmCfAmCfUmGfUmU*S | UUAUAGAGCAAGAACACUGUU | OOOOOOOOXOOOOOOOOOO |
| | mU*SmU | UU | OSS |
| WV-38136 | mUfUmAfUmAfGmAfGmCfA*mAmGmAfAmCfAmCfUmGfUmU*S | UUAUAGAGCAAGAACACUGUU | OOOOOOOOOXOOOOOOOOO |
| | mU*SmU | UU | OSS |
| WV-38137 | mUfUmAfUmAfGmAfGmCfAmA*mGmAfAmCfAmCfUmGfUmU*S | UUAUAGAGCAAGAACACUGUU | OOOOOOOOOOXOOOOOOOO |
| | mU*SmU | UU | OSS |
| WV-38138 | mUfUmAfUmAfGmAfGmCfAmAmG*mAfAmCfAmCfUmGfUmU*S | UUAUAGAGCAAGAACACUGUU | OOOOOOOOOOOXOOOOOOO |
| | mU*SmU | UU | OSS |
| WV-38139 | mUfUmAfUmAfGmAfGmCfAmAmGmA*fAmCfAmCfUmGfUmU*S | UUAUAGAGCAAGAACACUGUU | OOOOOOOOOOOOXOOOOOO |
| | mU*SmU | UU | OSS |
| WV-38140 | mUfUmAfUmAfGmAfGmCfAmAmGmAfA*mCfAmCfUmGfUmU*S | UUAUAGAGCAAGAACACUGUU | OOOOOOOOOOOOOXOOOOO |
| | mU*SmU | UU | OSS |
| WV-38141 | mUfUmAfUmAfGmAfGmCfAmAmGmAfAmC*fAmCfUmGfUmU*S | UUAUAGAGCAAGAACACUGUU | OOOOOOOOOOOOOOXOOOO |
| | mU*SmU | UU | OSS |
| WV-38142 | mUfUmAfUmAfGmAfGmCfAmAmGmAfAmCfA*mCfUmGfUmU*S | UUAUAGAGCAAGAACACUGUU | OOOOOOOOOOOOOOOXOOO |
| | mU*SmU | UU | OSS |
| WV-38143 | mUfUmAfUmAfGmAfGmCfAmAmGmAfAmCfAmC*fUmGfUmU*S | UUAUAGAGCAAGAACACUGUU | OOOOOOOOOOOOOOOOXOO |
| | mU*SmU | UU | OSS |
| WV-38144 | mUfUmAfUmAfGmAfGmCfAmAmGmAfAmCfAmCfU*mGfUmU*S | UUAUAGAGCAAGAACACUGUU | OOOOOOOOOOOOOOOOOXO |
| | mU*SmU | UU | OSS |
| WV-38145 | mUfUmAfUmAfGmAfGmCfAmAmGmAfAmCfAmCfUmG*fUmU*S | UUAUAGAGCAAGAACACUGUU | OOOOOOOOOOOOOOOOOOX |
| | mU*SmU | UU | OSS |
| WV-38146 | mUfUmAfUmAfGmAfGmCfAmAmGmAfAmCfAmCfUmGfU*mU*S | UUAUAGAGCAAGAACACUGUU | OOOOOOOOOOOOOOOOOOO |
| | mU*SmU | UU | XSS |
| WV-38678 | mU*fU*mAn001fUmAfGmAfGmCfAn001mAmGmAfAmCfAmCf | UUAUAGAGCAAGAACACUGUU | XXXOOOOOOnXOOOOOOOO |
| | UmGfUmU*mU*mU | UU | OOXX |
| WV-38687 | mU*fU*mAn001fUmAfGmAfGmCfAmAmGmAfAmCfAmCfUmGn | UUAUAGAGCAAGAACACUGUU | XXnXOOOOOOOOOOOOOOO |
| | 001fUmU*mU*mU | UU | nXOXX |
| WV-38703 | mU*RfU*SmAn001fUmAfGmAfGmCfAn001mAmGmAfAmCfAm | UUAUAGAGCAAGAACACUGUU | RSnXOOOOOOnXOOOOOOO |
| | CfUmGfUmU*SmU*SmU | UU | OOOSS |
| WV-38704 | mU*RfU*SmAn001fUmAfGmAfGmCfAn001mAmGmAfAmCfAm | UUAUAGAGCAAGAACACUGUU | RSnXOOOOOOnXOOOOOOO |
| | CfUmGn001fUmU*SmU*SmU | UU | OnXOSS |
| WV-38705 | mU*RfU*SmAn001RfUmAfGmAfGmCfAn001RmAmGmAfAmCf | UUAUAGAGCAAGAACACUGUU | RSnROOOOOOnROOOOOOO |
| | AmCfUmGfUmU*SmU*SmU | UU | OOOSS |
| WV-38706 | mU*RfU*SmAn001RfUmAfGmAfGmCfAn001RmAmGmAfAmCf | UUAUAGAGCAAGAACACUGUU | RSnROOOOOOnROOOOOOO |
| | AmCfUmGn001RfUmU*SmU*SmU | UU | OnROSS |
| WV-38707 | mU*RfU*SmAn001SfUmAfGmAfGmCfAn001SmAmGmAfAmCf | UUAUAGAGCAAGAACACUGUU | RSnSOOOOOOnSOOOOOOO |
| | AmCfUmGfUmU*SmU*SmU | UU | OOOSS |
| WV-40362 | Mod001L001mA*mAfCmAfGmUfGmUfUfCfUmUfGmCfUmCfU | AACAGUGUUCUUGCUCUAUAA | OXOOOOOOOOOOOOOOOOO |
| | mAfUmA*fA | | OX |
| WV-40363 | Mod001L001mA*SmAfCmAfGmUfGmUfUfCfUmUfGmCfUmCf | AACAGUGUUCUUGCUCUAUAA | OSOOOOOOOOOOOOOOOOO |
| | UmAfUmA*SfA | | OS |
| WV-40552 | mU*RfU*SmAn001SfUmAfGmAfGmCfAn001RmAmGmAfAmCf | UUAUAGAGCAAGAACACUGUU | RSnSOOOOOOnROOOOOOO |
| | AmCfUmGn001RfUmU*SmU*SmU | UU | OnROSS |
| WV-40553 | mU*RfU*SmAn001RfUmAfGmAfGmCfAn001RmAmGmAfAmCf | UUAUAGAGCAAGAACACUGUU | RSnROOOOOOnROOOOOOO |
| | AmCfUmGn001SfUmU*SmU*SmU | UU | OnSOSS |
| WV-40555 | mU*RfU*SmAn001RfUmAfGmAfGmCfAn001SmAmGmAfAmCf | UUAUAGAGCAAGAACACUGUU | RSnROOOOOOnSOOOOOOO |
| | AmCfUmGn001SfUmU*SmU*SmU | UU | OnSOSS |
| WV-40556 | mU*RfU*SmAn001SfUmAfGmAfGmCfAn001RmAmGmAfAmCf | UUAUAGAGCAAGAACACUGUU | RSnSOOOOOOnROOOOOOO |
| | AmCfUmGn001SfUmU*SmU*SmU | UU | OnSOSS |
| WV-40796 | mU*RfU*SmAn001RfUmAfGmAfGmCfAn001SmAmGmAfAmCf | UUAUAGAGCAAGAACACUGUU | RSnROOOOOOnSOOOOOOO |
| | AmCfUmGn001RfUmU*SmU*SmU | UU | OnROSS |
| WV-40797 | mU*RfU*SmAn001SfUmAfGmAfGmCfAn001SmAmGmAfAmCf | UUAUAGAGCAAGAACACUGUU | RSnSOOOOOOnSOOOOOOO |
| | AmCfUmGn001RfUmU*SmU*SmU | UU | OnROSS |
| WV-40838 | mU*RfU*SmAn001SfUmAfGmAn001SfGmCfAn001SmAmGmA | UUAUAGAGCAAGAACACUGUU | RSnSOOOnSOOnSOOOOOO |
| | fAmCfAmCfUmGn001SfUmU*SmU*SmU | UU | OOnSOSS |
| WV-40839 | mU*RfU*SmAn001SfUmAfGmAfGn001SmCfAn001SmAmGmA | UUAUAGAGCAAGAACACUGUU | RSnSOOOOnSOnSOOOOOO |
| | fAmCfAmCfUmGn001SfUmU*SmU*SmU | UU | OOnSOSS |
| WV-40842 | mU*RfU*SmAn001SfUmAfGmAn001SfGmCfAn001SmAmGmA | UUAUAGAGCAAGAACACUGUU | RSnSOOOnSOOnSOOOOOn |
| | fAmCfAn001SmCfUmGn001SfUmU*SmU*SmU | UU | SOOnSOSS |
| WV-40843 | mU*RfU*SmAn001SfUmAfGmAfGn001SmCfAn001SmAmGmA | UUAUAGAGCAAGAACACUGUU | RSnSOOOOnSOnSOOOOOn |
| | fAmCfAn001SmCfUmGn001SfUmU*SmU*SmU | UU | SOOnSOSS |
| WV-41896 | mU*RfU*SmAn001RfUmAfGmAfGmCfAmAmGmAfAmCfAmCfU | UUAUAGAGCAAGAACACUGUU | RSnROOOOOOOOOOOOOOO |
| | mGfUmU*SmU*SmU | UU | OOSS |
| WV-41898 | mU*RfU*SmAfUmAn001RfGmAfGmCfAmAmGmAfAmCfAmCfU | UUAUAGAGCAAGAACACUGUU | RSOOnROOOOOOOOOOOOO |
| | mGfUmU*SmU*SmU | UU | OOSS |
| WV-41903 | mU*RfU*SmAfUmAfGmAfGmCfAn001RmAmGmAfAmCfAmCfU | UUAUAGAGCAAGAACACUGUU | RSOOOOOOOnROOOOOOOO |
| | mGfUmU*SmU*SmU | UU | OOSS |
| WV-41912 | mU*RfU*SmAfUmAfGmAfGmCfAmAmGmAfAmCfAmCfUmGn00 | UUAUAGAGCAAGAACACUGUU | RSOOOOOOOOOOOOOOOOn |
| | 1RfUmU*SmU*SmU | UU | ROSS |
| WV-41918 | mU*RfU*SmAn001SfUmAfGmAfGmCfAmAmGmAfAmCfAmCfU | UUAUAGAGCAAGAACACUGUU | RSnSOOOOOOOOOOOOOOO |
| | mGfUmU*SmU*SmU | UU | OOSS |
| WV-41920 | mU*RfU*SmAfUmAn001SfGmAfGmCfAmAmGmAfAmCfAmCfU | UUAUAGAGCAAGAACACUGUU | RSOOnSOOOOOOOOOOOOO |
| | mGfUmU*SmU*SmU | UU | OOSS |
| WV-41925 | mU*RfU*SmAfUmAfGmAfGmCfAn001SmAmGmAfAmCfAmCfU | UUAUAGAGCAAGAACACUGUU | RSOOOOOOOnSOOOOOOOO |
| | mGfUmU*SmU*SmU | UU | OOSS |
| WV-41934 | mU*RfU*SmAfUmAfGmAfGmCfAmAmGmAfAmCfAmCfUmGn00 | UUAUAGAGCAAGAACACUGUU | RSOOOOOOOOOOOOOOOOn |
| | 1SfUmU*SmU*SmU | UU | SOSS |
| WV-41940 | mU*SfU*RmAn001RfUmAfGmAfGmCfAmAmGmAfAmCfAmCfU | UUAUAGAGCAAGAACACUGUU | SRnROOOOOOOOOOOOOOO |
| | mGfUmU*SmU*SmU | UU | OOSS |
| WV-41942 | mU*SfU*RmAfUmAn001RfGmAfGmCfAmAmGmAfAmCfAmCfU | UUAUAGAGCAAGAACACUGUU | SROOnROOOOOOOOOOOOO |
| | mGfUmU*SmU*SmU | UU | OOSS |
| WV-41947 | mU*SfU*RmAfUmAfGmAfGmCfAn001RmAmGmAfAmCfAmCfU | UUAUAGAGCAAGAACACUGUU | SROOOOOOOnROOOOOOOO |
| | mGfUmU*SmU*SmU | UU | OOSS |
| WV-41956 | mU*SfU*RmAfUmAfGmAfGmCfAmAmGmAfAmCfAmCfUmGn00 | UUAUAGAGCAAGAACACUGUU | SROOOOOOOOOOOOOOOOn |
| | 1RfUmU*SmU*SmU | UU | ROSS |
| WV-41962 | mU*SfU*RmAn001SfUmAfGmAfGmCfAmAmGmAfAmCfAmCfU | UUAUAGAGCAAGAACACUGUU | SRnSOOOOOOOOOOOOOOO |
| | mGfUmU*SmU*SmU | UU | OOSS |
| WV-41964 | mU*SfU*RmAfUmAn001SfGmAfGmCfAmAmGmAfAmCfAmCfU | UUAUAGAGCAAGAACACUGUU | SROOnSOOOOOOOOOOOOO |
| | mGfUmU*SmU*SmU | UU | OOSS |
| WV-41969 | mU*SfU*RmAfUmAfGmAfGmCfAn001SmAmGmAfAmCfAmCfU | UUAUAGAGCAAGAACACUGUU | SROOOOOOOnSOOOOOOOO |
| | mGfUmU*SmU*SmU | UU | OOSS |
| WV-41978 | mU*SfU*RmAfUmAfGmAfGmCfAmAmGmAfAmCfAmCfUmGn00 | UUAUAGAGCAAGAACACUGUU | SROOOOOOOOOOOOOOOOn |
| | 1SfUmU*SmU*SmU | UU | SOSS |
| WV-43987 | mU*SfU*RfAn001SmUmAfGmAmGmCfAn001SmAmGmAfAmCf | UUAUAGAGCAAGAACACUGUU | SRnSOOOOOOnSOOOOOOO |
| | AmCmUfGn001SmUmU*SmU*SmU | UU | OnSOSS |
| WV-43990 | mU*SfU*RfAn001SfUmAfGmAmGmCfAn001SfAmGmAfAmCf | UUAUAGAGCAAGAACACUGUU | SRnSOOOOOOnSOOOOOOO |
| | AmCmUfGn001SfUmU*SmU*SmU | UU | OnSOSS |
| WV-43991 | mU*SfU*RmAn001SmUmAfGmAfGmCmAn001SmAmGmAfAmCf | UUAUAGAGCAAGAACACUGUU | SRnSOOOOOOnSOOOOOOO |
| | AmCfUmGn001SmUmU*SmU*SmU | UU | OnSOSS |
| WV-43992 | mU*SfU*RfAn001SmUmAfGmAfGmCfAn001SmAmGmAfAmCf | UUAUAGAGCAAGAACACUGUU | SRnSOOOOOOnSOOOOOOO |
| | AmCfUfGn001SmUmU*SmU*SmU | UU | OnSOSS |
| WV-43993 | mU*SfU*RmAn001SfUmAfGmAfGmCmAn001SfAmGmAfAmCf | UUAUAGAGCAAGAACACUGUU | SRnSOOOOOOnSOOOOOOO |
| | AmCfUmGn001SfUmU*SmU*SmU | UU | OnSOSS |
| WV-49611 | mU*fU*mAfUmAfGmAmGmCmAfAmGmAfAmCfAmCmUmGmUmU* | UUAUAGAGCAAGAACACUGUU | XXOOOOOOOOOOOOOOOOO |
| | mU*mU | UU | OXX |
| WV-49612 | mU*fU*mAn001fUmAfGmAmGmCmAn001fAmGmAfAmCfAmCm | UUAUAGAGCAAGAACACUGUU | XXnXOOOOOOnXOOOOOOO |
| | UmGmUmU*mU*mU | UU | OOOXX |
| WV-49613 | mU*SfC*RmCn001SfUmUfCmCmCmUmGn001SfAmAmGfGmUf | UCCUUCCCUGAAGGUUCCUCC | SRnSOOOOOOnSOOOOOOO |
| | UmCmCmUmCmC*SmU*SmU | UU | OOOSS |
| WV-49614 | mU*SfC*RmCn001SfUmUfCmCmCmUmGn001RfAmAmGfGmUf | UCCUUCCCUGAAGGUUCCUCC | SRnSOOOOOOnROOOOOOO |
| | UmCmCmUmCmC*SmU*SmU | UU | OOOSS |
| WV-49615 | Mod001L001mG*SmGmAmGmGmAfAmCfCfUfUmCmAmGmGmGm | GGAGGAACCUUCAGGGAAGGA | OSOOOOOOOOOOOOOOOOO |
| | AmAmGmG*SmA | | OS |
| WV-49626 | mU*SfU*RmAn001fUmAfGmAmGmCmAn001fAmGmAfAmCfAm | UUAUAGAGCAAGAACACUGUU | SRnXOOOOOOnXOOOOOOO |
| | CmUmGmUmU*SmU*SmU | UU | OOOSS |
| WV-49900 | mU*fC*mCfUmUfCmCfCmUfGmAmAmGfGmUfUmCfCmUfCmC* | UCCUUCCCUGAAGGUUCCUCC | XXOOOOOOOOOOOOOOOOO |
| | mU*mU | UU | OXX |
| WV-49901 | Mod001L001mG*mGfAmGfGmAfAmCfCfUfUmCfAmGfGmGfA | GGAGGAACCUUCAGGGAAGGA | OXOOOOOOOOOOOOOOOOO |
| | mAfGmG*fA | | OX |
| WV-50034 | mU*SfU*RmAn003SfUmAfGmAmGmCmAn003RfAmGmAfAmCf | UUAUAGAGCAAGAACACUGUU | SRnSOOOOOOnROOOOOOO |
| | AmCmUmGmUmU*SmU*SmU | UU | OOOSS |
| WV-50035 | mU*SfU*RmAn003SfUmAfGmAmGmCmAn003SfAmGmAfAmCf | UUAUAGAGCAAGAACACUGUU | SRnSOOOOOOnSOOOOOOO |
| | AmCmUmGmUmU*SmU*SmU | UU | OOOSS |
| WV-50036 | mU*SfU*RmAn004SfUmAfGmAmGmCmAn004RfAmGmAfAmCf | UUAUAGAGCAAGAACACUGUU | SRnSOOOOOOnROOOOOOO |
| | AmCmUmGmUmU*SmU*SmU | UU | OOOSS |
| WV-50037 | mU*SfU*RmAn004SfUmAfGmAmGmCmAn004SfAmGmAfAmCf | UUAUAGAGCAAGAACACUGUU | SRnSOOOOOOnSOOOOOOO |
| | AmCmUmGmUmU*SmU*SmU | UU | OOOSS |
| WV-50040 | mU*SfU*RmAn008SfUmAfGmAmGmCmAn008RfAmGmAfAmCf | UUAUAGAGCAAGAACACUGUU | SRnSOOOOOOnROOOOOOO |
| | AmCmUmGmUmU*SmU*SmU | UU | OOOSS |
| WV-50041 | mU*SfU*RmAn008SfUmAfGmAmGmCmAn008SfAmGmAfAmCf | UUAUAGAGCAAGAACACUGUU | SRnSOOOOOOnSOOOOOOO |
| | AmCmUmGmUmU*SmU*SmU | UU | OOOSS |
| WV-50042 | mU*SfU*RmAn025SfUmAfGmAmGmCmAn025RfAmGmAfAmCf | UUAUAGAGCAAGAACACUGUU | SRnSOOOOOOnROOOOOOO |
| | AmCmUmGmUmU*SmU*SmU | UU | OOOSS |
| WV-50043 | mU*SfU*RmAn025SfUmAfGmAmGmCmAn025SfAmGmAfAmCf | UUAUAGAGCAAGAACACUGUU | SRnSOOOOOOnSOOOOOOO |
| | AmCmUmGmUmU*SmU*SmU | UU | OOOSS |
| WV-50044 | mU*SfU*RmAn026SfUmAfGmAmGmCmAn026RfAmGmAfAmCf | UUAUAGAGCAAGAACACUGUU | SRnSOOOOOOnROOOOOOO |
| | AmCmUmGmUmU*SmU*SmU | UU | OOOSS |
| WV-50045 | mU*SfU*RmAn026SfUmAfGmAmGmCmAn026SfAmGmAfAmCf | UUAUAGAGCAAGAACACUGUU | SRnSOOOOOOnSOOOOOOO |
| | AmCmUmGmUmU*SmU*SmU | UU | OOOSS |
| WV-50046 | mU*SfU*RmAn043SfUmAfGmAmGmCmAn043RfAmGmAfAmCf | UUAUAGAGCAAGAACACUGUU | SRnSOOOOOOnROOOOOOO |
| | AmCmUmGmUmU*SmU*SmU | UU | OOOSS |
| WV-50047 | mU*SfU*RmAn043SfUmAfGmAmGmCmAn043SfAmGmAfAmCf | UUAUAGAGCAAGAACACUGUU | SRnSOOOOOOnSOOOOOOO |
| | AmCmUmGmUmU*SmU*SmU | UU | OOOSS |
| WV-50048 | mU*SfU*RmAn058SfUmAfGmAmGmCmAn058RfAmGmAfAmCf | UUAUAGAGCAAGAACACUGUU | SRnSOOOOOOnROOOOOOO |
| | AmCmUmGmUmU*SmU*SmU | UU | OOOSS |
| WV-50049 | mU*SfU*RmAn058SfUmAfGmAmGmCmAn058SfAmGmAfAmCf | UUAUAGAGCAAGAACACUGUU | SRnSOOOOOOnSOOOOOOO |
| | AmCmUmGmUmU*SmU*SmU | UU | OOOSS |
| WV-50101 | 5mrpmU*RfU*SmAmUmAfGmAmGmCmAmAmGmAfAmCfAmCmUm | UUAUAGAGCAAGAACACUGUU | RSOOOOOOOOOOOOOOOOO |
| | GmUmU*SmU*SmU | UU | OSS |
| WV-50102 | 5mrpmU*SfU*RmAmUmAfGmAmGmCmAmAmGmAfAmCfAmCmUm | UUAUAGAGCAAGAACACUGUU | SROOOOOOOOOOOOOOOOO |
| | GmUmU*SmU*SmU | UU | OSS |
| WV-50103 | 5mrpmU*RfU*SmAn001SfUmAfGmAmGmCmAn001SfAmGmAf | UUAUAGAGCAAGAACACUGUU | RSnSOOOOOOnSOOOOOOO |
| | AmCfAmCmUmGmUmU*SmU*SmU | UU | OOOSS |
| WV-50104 | 5mrpmU*SfU*RmAn001SfUmAfGmAmGmCmAn001SfAmGmAf | UUAUAGAGCAAGAACACUGUU | SRnSOOOOOOnSOOOOOOO |
| | AmCfAmCmUmGmUmU*SmU*SmU | UU | OOOSS |
| WV-50105 | 5mrpmU*RfU*SmAn001SfUmAfGmAmGmCmAn001RfAmGmAf | UUAUAGAGCAAGAACACUGUU | RSnSOOOOOOnROOOOOOO |
| | AmCfAmCmUmGmUmU*SmU*SmU | UU | OOOSS |
| WV-50106 | 5mrpmU*SfU*RmAn001SfUmAfGmAmGmCmAn001RfAmGmAf | UUAUAGAGCAAGAACACUGUU | SRnSOOOOOOnROOOOOOO |
| | AmCfAmCmUmGmUmU*SmU*SmU | UU | OOOSS |
| WV-50108 | 5mvpmU*SfU*RmAmUmAfGmAmGmCmAmAmGmAfAmCfAmCmUm | UUAUAGAGCAAGAACACUGUU | SROOOOOOOOOOOOOOOOO |
| | GmUmU*SmU*SmU | UU | OSS |
| WV-50110 | 5mvpmU*SfU*RmAn001SfUmAfGmAmGmCmAn001SfAmGmAf | UUAUAGAGCAAGAACACUGUU | SRnSOOOOOOnSOOOOOOO |
| | AmCfAmCmUmGmUmU*SmU*SmU | UU | OOOSS |
| WV-50112 | 5mvpmU*SfU*RmAn001SfUmAfGmAmGmCmAn001RfAmGmAf | UUAUAGAGCAAGAACACUGUU | SRnSOOOOOOnROOOOOOO |
| | AmCfAmCmUmGmUmU*SmU*SmU | UU | OOOSS |
| WV-50113 | mU*SfU*RmAn001SfUmAfGmAmGmCmAn009RfAmGmAfAmCf | UUAUAGAGCAAGAACACUGUU | SRnSOOOOOOnROOOOOOO |
| | AmCmUmGmUmU*SmU*SmU | UU | OOOSS |
| WV-50114 | mU*SfU*RmAn001SfUmAfGmAmGmCmAn009SfAmGmAfAmCf | UUAUAGAGCAAGAACACUGUU | SRnSOOOOOOnSOOOOOOO |
| | AmCmUmGmUmU*SmU*SmU | UU | OOOSS |
| WV-50115 | mU*SfU*RmAn001SfUmAfGmAmGmCmAn033RfAmGmAfAmCf | UUAUAGAGCAAGAACACUGUU | SRnSOOOOOOnROOOOOOO |
| | AmCmUmGmUmU*SmU*SmU | UU | OOOSS |
| WV-50116 | mU*SfU*RmAn001SfUmAfGmAmGmCmAn033SfAmGmAfAmCf | UUAUAGAGCAAGAACACUGUU | SRnSOOOOOOnSOOOOOOO |
| | AmCmUmGmUmU*SmU*SmU | UU | OOOSS |
| WV-50481 | mU*fU*mAn001fUmAfGmAmGmCmAn001fAmGmAfAmCfAmCm | UUAUAGAGCAAGAACACUGUU | XXnXOOOOOOnXOOOOOOO |
| | UmGn001fUmU*mU*mU | UU | OnXOXX |
| WV-50482 | mU*fU*mAn001fUmAfGmAmGmCfAn001mAmGmAfAmCfAmCm | UUAUAGAGCAAGAACACUGUU | XXnXOOOOOOnXOOOOOOO |
| | UmGn001fUmU*mU*mU | UU | OnXOXX |
| WV-50485 | mU*SfU*RmAn001fUmAfGmAmGmCmAn001fAmGmAfAmCfAm | UUAUAGAGCAAGAACACUGUU | SRnXOOOOOOnXOOOOOOO |
| | CmUmGn001fUmU*SmU*SmU | UU | OnXOSS |
| WV-50486 | mU*SfU*RmAn001fUmAfGmAmGmCfAn001mAmGmAfAmCfAm | UUAUAGAGCAAGAACACUGUU | SRnXOOOOOOnXOOOOOOO |
| | CmUmGn001fUmU*SmU*SmU | UU | OnXOSS |
| WV-51122 | mU*SfU*RmAfUmAfGmAmGmCmAfAmGmAfAmCfAmCmUmGmUm | UUAUAGAGCAAGAACACUGUU | SROOOOOOOOOOOOOOOOO |
| | U*SmU*SmU | UU | OSS |

TABLE 1a
Example Oligonucleotides/Compositions for non-targeting controls.

| | | | Stereochemistry/ |
|---|---|---|---|
| ID | HELM | Naked Sequence | linkage |
| WV- | mU*SfC*RmCn001SfUmUfCmCmCmUmGn001SfAmAmGfGmU | UCCUUCCCUGAAGGUUCCUCCU | SRnSOOOOOOnSOOOOOOOO |
| 49613 | fUmCmCmUmCmC*SmU*SmU | U | OOSS |
| WV- | mU*SfC*RmCn001SfUmUfCmCmCmUmGn001RfAmAmGfGmU | UCCUUCCCUGAAGGUUCCUCCU | SRnSOOOOOOnROOOOOOO |
| 49614 | fUmCmCmUmCmC*SmU*SmU | U | OOOSS |
| WV- | Mod001L001mG*SmGmAmGmGmAfAmCfCfUfUmCmAmGmG | GGAGGAACCUUCAGGGAAGGA | OSOOOOOOOOOOOOOOOO |
| 49615 | mGmAmAmGmG*SmA | | OOS |
| WV- | mU*fC*mCfUmUfCmCfCmUfGmAmAmGfGmUfUmCfCmUfCm | UCCUUCCCUGAAGGUUCCUCCU | XXOOOOOOOOOOOOOOOO |
| 49900 | C*mU*mU | U | OOXX |
| WV- | Mod001L001mG*mGfAmGfGmAfAmCfCfUfUmCfAmGfGm | GGAGGAACCUUCAGGGAAGGA | OXOOOOOOOOOOOOOOOO |
| 49901 | GfAmAfGmG*fA | | OOX |
| WV- | mU*fC*mCmUmUfCmCmCmUmGmAmAmGfGmUfUmCmCmU | UCCUUCCCUGAAGGUUCCUCCU | XXOOOOOOOOOOOOOOOO |
| 49903 | mCmC*mU*mU | U | OOXX |
| WV- | Mod001L001mG*mGmAmGmGmAfAmCfCfUfUmCmAmGmG | GGAGGAACCUUCAGGGAAGGA | OXOOOOOOOOOOOOOOOO |
| 49904 | mGmAmAmGmG*mA | | OOX |

TABLE 1b
Example Oligonucleotides/Compositions that target TTR.

| ID | HELM | Naked Sequence |
|---|---|---|
| SSR- | RNA1{m(U)[Ssp].[fl2r](U)[Rsp].m(A)[n001S].[fl2r](U)p.m(A)p.[fl2r](G)p.m(A)p.m(G)p.m(C)p.m(A)[n001S].[fl2r](A) | UUAUAGAGCA |
| 0106266 | p.m(G)[n001S].m(A)[n001S].[fl2r](A)p.m(C)p.[fl2r](A)p.m(C)p.m(U)p.m(G)p.m(U)p.m(U)[Ssp].m(U)[Ssp].m(U)}$$ | AGAACACUGU |
| | $$V2.0 | UUU |
| SSR- | RNA1{m(U)[Ssp].[fl2r](U)[Rsp].m(A)[n001S].[fl2r](U)p.m(A)p.[fl2r](G)p.m(A)p.m(G)p.m(C)p.m(A)[n001S].[fl2r](A) | UUAUAGAGCA |
| 0106267 | p.m(G)p.m(A)[n001S].[fl2r](A)[n001S].m(C)p.[fl2r](A)p.m(C)p.m(U)p.m(G)p.m(U)p.m(U)[Ssp].m(U)[Ssp].m(U)}$$ | AGAACACUGU |
| | $$V2.0 | UUU |
| SSR- | RNA1{m(U)[Ssp].[fl2r](U)[Rsp].m(A)[n001S].[fl2r](U)p.m(A)p.[fl2r](G)p.m(A)p.m(G)p.m(C)p.m(A)[n001S].[fl2r](A) | UUAUAGAGCA |
| 0106268 | p.m(G)p.m(A)p.[fl2r](A)[n001S].m(C)[n001S].[fl2r](A)p.m(C)p.m(U)p.m(G)p.m(U)p.m(U)[Ssp].m(U)[Ssp].m(U)}$$ | AGAACACUGU |
| | $$V2.0 | UUU |
| SSR- | RNA1{m(U)[Ssp].[fl2r](U)[Rsp].m(A)[n001S].[fl2r](U)p.m(A)p.[fl2r](G)p.m(A)p.m(G)p.m(C)p.m(A)[n001S].[fl2r](A) | UUAUAGAGCA |
| 0106269 | p.m(G)p.m(A)p.[fl2r](A)p.m(C)[n001S].[fl2r](A)[n001S].m(C)p.m(U)p.m(G)p.m(U)p.m(U)[Ssp].m(U)[Ssp].m(U)}$$ | AGAACACUGU |
| | $$V2.0 | UUU |
| SSR- | RNA1{m(U)[Ssp].[fl2r](U)[Rsp].m(A)[n001S].[fl2r](U)p.m(A)p.[fl2r](G)p.m(A)p.m(G)p.m(C)p.m(A)[n001S].[fl2r](A) | UUAUAGAGCA |
| 0106270 | p.m(G)p.m(A)p.[fl2r](A)p.m(C)p.[fl2r](A)[n001S].m(C)[n001S].m(U)p.m(G)p.m(U)p.m(U)[Ssp].m(U)[Ssp].m(U)}$$ | AGAACACUGU |
| | $$V2.0 | UUU |
| SSR- | RNA1{m(U)[Ssp].[fl2r](U)[Rsp].m(A)[n001S].[fl2r](U)p.m(A)p.[fl2r](G)p.m(A)p.m(G)p.m(C)p.m(A)[n001S].[fl2r](A) | UUAUAGAGCA |
| 0106271 | p.m(G)p.m(A)p.[fl2r](A)p.m(C)p.[fl2r](A)p.m(C)[n001S].m(U)[n001S].m(G)p.m(U)p.m(U)[Ssp].m(U)[Ssp].m(U)}$$ | AGAACACUGU |
| | $$V2.0 | UUU |
| SSR- | RNA1{m(U)[Ssp].[fl2r](U)[Rsp].m(A)[n001S].[fl2r](U)p.m(A)p.[fl2r](G)p.m(A)p.m(G)p.m(C)p.m(A)[n001S].[fl2r](A) | UUAUAGAGCA |
| 0106272 | p.m(G)p.m(A)p.[fl2r](A)p.m(C)p.[fl2r](A)p.m(C)p.m(U)[n001S].m(G)[n001S].m(U)p.m(U)[Ssp].m(U)[Ssp].m(U)}$$ | AGAACACUGU |
| | $$V2.0 | UUU |
| SSR- | RNA1{m(U)[Ssp].[fl2r](U)[Rsp].m(A)[n001S].[fl2r](U)p.m(A)p.[fl2r](G)p.m(A)p.m(G)p.m(C)p.m(A)[n001S].[fl2r](A) | UUAUAGAGCA |
| 0106273 | p.m(G)p.m(A)p.[fl2r](A)p.m(C)p.[fl2r](A)p.m(C)p.m(U)p.m(G)[n001S].m(U)[n001S].m(U)[Ssp].m(U)[Ssp].m(U)}$$ | AGAACACUGU |
| | $$V2.0 | UUU |
| SSR- | RNA1{m(U)[Ssp].[fl2r](U)[Rsp].m(A)[n001S].[fl2r](U)p.m(A)p.[fl2r](G)p.m(A)p.m(G)p.m(C)p.m(A)[n001S].[fl2r](A) | UUAUAGAGCA |
| 0106274 | p.m(G)[n001S].m(A)[n001S].[fl2r](A)[n001S].m(C)p.[fl2r](A)p.m(C)p.m(U)p.m(G)p.m(U)p.m(U)[Ssp].m(U)[Ssp]. | AGAACACUGU |
| | m(U)}$$$$V2.0 | UUU |
| SSR- | RNA1{m(U)[Ssp].[fl2r](U)[Rsp].m(A)[n001S].[fl2r](U)p.m(A)p.[fl2r](G)p.m(A)p.m(G)p.m(C)p.m(A)[n001S].[fl2r](A) | UUAUAGAGCA |
| 0106275 | p.m(G)p.m(A)[n001S].[fl2r](A)[n001S].m(C)[n001S].[fl2r](A)p.m(C)p.m(U)p.m(G)p.m(U)p.m(U)[Ssp].m(U)[Ssp]. | AGAACACUGU |
| | m(U)}$$$$V2.0 | UUU |
| SSR- | RNA1{m(U)[Ssp].[fl2r](U)[Rsp].m(A)[n001S].[fl2r](U)p.m(A)p.[fl2r](G)p.m(A)p.m(G)p.m(C)p.m(A)[n001S].[fl2r](A) | UUAUAGAGCA |
| 0106276 | p.m(G)p.m(A)p.[fl2r](A)[n001S].m(C)[n001S].[fl2r](A)[n001S].m(C)p.m(U)p.m(G)p.m(U)p.m(U)[Ssp].m(U)[Ssp]. | AGAACACUGU |
| | m(U)}$$$$V2.0 | UUU |
| SSR- | RNA1{m(U)[Ssp].[fl2r](U)[Rsp].m(A)[n001S].[fl2r](U)p.m(A)p.[fl2r](G)p.m(A)p.m(G)p.m(C)p.m(A)[n001S].[fl2r](A) | UUAUAGAGCA |
| 0106277 | p.m(G)p.m(A)p.[fl2r](A)p.m(C)[n001S].[fl2r](A)[n001S].m(C)[n001S].m(U)p.m(G)p.m(U)p.m(U)[Ssp].m(U)[Ssp]. | AGAACACUGU |
| | m(U)}$$$$V2.0 | UUU |
| SSR- | RNA1{m(U)[Ssp].[fl2r](U)[Rsp].m(A)[n001S].[fl2r](U)p.m(A)p.[fl2r](G)p.m(A)p.m(G)p.m(C)p.m(A)[n001S].[fl2r](A) | UUAUAGAGCA |
| 0106278 | p.m(G)p.m(A)p.[fl2r](A)p.m(C)p.[fl2r](A)[n001S].m(C)[n001S].m(U)[n001S].m(G)p.m(U)p.m(U)[Ssp].m(U)[Ssp]. | AGAACACUGU |
| | m(U)}$$$$V2.0 | UUU |
| SSR- | RNA1{m(U)[Ssp].[fl2r](U)[Rsp].m(A)[n001S].[fl2r](U)p.m(A)p.[fl2r](G)p.m(A)p.m(G)p.m(C)p.m(A)[n001S].[fl2r](A) | UUAUAGAGCA |
| 0106279 | p.m(G)p.m(A)p.[fl2r](A)p.m(C)p.[fl2r](A)p.m(C)[n001S].m(U)[n001S].m(G)[n001S].m(U)p.m(U)[Ssp].m(U)[Ssp]. | AGAACACUGU |
| | m(U)}$$$$V2.0 | UUU |
| SSR- | RNA1{m(U)[Ssp].[fl2r](U)[Rsp].m(A)[n001S].[fl2r](U)p.m(A)p.[fl2r](G)p.m(A)p.m(G)p.m(C)p.m(A)[n001S].[fl2r](A) | UUAUAGAGCA |
| 0106280 | p.m(G)p.m(A)p.[fl2r](A)p.m(C)p.[fl2r](A)p.m(C)p.m(U)[n001S].m(G)[n001S].m(U)[n001S].m(U)[Ssp].m(U)[Ssp]. | AGAACACUGU |
| | m(U)}$$$$V2.0 | UUU |
| SSR- | RNA1{m(U)[Ssp].[fl2r](U)[Rsp].m(A)[n001S].[fl2r](U)p.m(A)p.[fl2r](G)p.m(A)p.m(G)p.m(C)p.m(A)[n001S].[fl2r](A) | UUAUAGAGCA |
| 0106281 | p.m(G)[n001S].m(A)[n001S].[fl2r](A)[n001S].m(C)[n001S].[fl2r](A)p.m(C)p.m(U)p.m(G)p.m(U)p.m(U)[Ssp].m(U)[S | AGAACACUGU |
| | sp].m(U)}$$$$V2.0 | UUU |
| SSR- | RNA1{m(U)[Ssp].[fl2r](U)[Rsp].m(A)[n001S].[fl2r](U)p.m(A)p.[fl2r](G)p.m(A)p.m(G)p.m(C)p.m(A)[n001S].[fl2r](A) | UUAUAGAGCA |
| 0106282 | p.m(G)p.m(A)[n001S].[fl2r](A)[n001S].m(C)[n001S].[fl2r](A)[n001S].m(C)p.m(U)p.m(G)p.m(U)p.m(U)[Ssp].m(U)[S | AGAACACUGU |
| | sp].m(U)}$$$$V2.0 | UUU |
| SSR- | RNA1{m(U)[Ssp].[fl2r](U)[Rsp].m(A)[n001S].[fl2r](U)p.m(A)p.[fl2r](G)p.m(A)p.m(G)p.m(C)p.m(A)[n001S].[fl2r](A) | UUAUAGAGCA |
| 0106283 | p.m(G)p.m(A)p.[fl2r](A)[n001S].m(C)[n001S].[fl2r](A)[n001S].m(C)[n001S].m(U)p.m(G)p.m(U)p.m(U)[Ssp].m(U)[S | AGAACACUGU |
| | sp].m(U)}$$$$V2.0 | UUU |
| SSR- | RNA1{m(U)[Ssp].[fl2r](U)[Rsp].m(A)[n001S].[fl2r](U)p.m(A)p.[fl2r](G)p.m(A)p.m(G)p.m(C)p.m(A)[n001S].[fl2r](A) | UUAUAGAGCA |
| 0106284 | p.m(G)p.m(A)p.[fl2r](A)p.m(C)[n001S].[fl2r](A)[n001S].m(C)[n001S].m(U)[n001S].m(G)p.m(U)p.m(U)[Ssp].m(U)[S | AGAACACUGU |
| | sp].m(U)}$$$$V2.0 | UUU |
| SSR- | RNA1{m(U)[Ssp].[fl2r](U)[Rsp].m(A)[n001S].[fl2r](U)p.m(A)p.[fl2r](G)p.m(A)p.m(G)p.m(C)p.m(A)[n001S].[fl2r](A) | UUAUAGAGCA |
| 0106285 | p.m(G)p.m(A)p.[fl2r](A)p.m(C)p.[fl2r](A)[n001S].m(C)[n001S].m(U)[n001S].m(G)[n001S].m(U)p.m(U)[Ssp].m(U)[S | AGAACACUGU |
| | sp].m(U)}$$$$V2.0 | UUU |
| SSR- | RNA1{m(U)[Ssp].[fl2r](U)[Rsp].m(A)[n001S].[fl2r](U)p.m(A)p.[fl2r](G)p.m(A)p.m(G)p.m(C)p.m(A)[n001S].[fl2r](A) | UUAUAGAGCA |
| 0106286 | p.m(G)p.m(A)p.[fl2r](A)p.m(C)p.[fl2r](A)p.m(C)[n001S].m(U)[n001S].m(G)[n001S].m(U)[n001S].m(U)[Ssp].m(U)[S | AGAACACUGU |
| | sp].m(U)}$$$$V2.0 | UUU |
| SSR- | RNA1{m(U)[Ssp].[fl2r](U)[Rsp].m(A)[n001S].[fl2r](U)p.m(A)p.[fl2r](G)p.m(A)p.m(G)p.m(C)p.m(A)[n001S].[fl2r](A) | UUAUAGAGCA |
| 0106287 | p.m(G)[n001S].m(A)p.[fl2r](A)[n001S].m(C)p.[fl2r](A)[n001S].m(C)p.m(U)[n001S].m(G)p.m(U)[n001S].m(U)[Ssp]. | AGAACACUGU |
| | m(U)[Ssp].m(U)}$$$$V2.0 | UUU |
| SSR- | RNA1{m(U)[Ssp].[fl2r](U)[Rsp].m(A)[n001S].[fl2r](U)p.m(A)p.[fl2r](G)p.m(A)p.m(G)p.m(C)p.m(A)[n001S].[fl2r](A) | UUAUAGAGCA |
| 0106288 | p.m(G)p.m(A)[n001S].[fl2r](A)p.m(C)[n001S].[fl2r](A)p.m(C)[n001S].m(U)p.m(G)[n001S].m(U)p.m(U)[Ssp].m(U)[S | AGAACACUGU |
| | sp].m(U)}$$$$V2.0 | UUU |
| SSR- | RNA1{m(U)[Ssp].[fl2r](U)[Rsp].m(A)[n001S].[fl2r](U)p.m(A)p.[fl2r](G)p.m(A)p.m(G)p.m(C)p.m(A)[n001S].[fl2r](A) | UUAUAGAGCA |
| 0106289 | p.m(G)[n001S].[fl2r](A)p.[fl2r](A)[n001S].[fl2r](C)p.[fl2r](A)[n001S].[fl2r](C)p.m(U)[n001S].[fl2r](G)p.m(U) | AGAACACUGU |
| | [n001S].[fl2r](U)[Ssp].m(U)[Ssp].m(U)}$$$$V2.0 | UUU |
| SSR- | RNA1{m(U)[Ssp].[fl2r](U)[Rsp].m(A)[n001S].[fl2r](U)p.m(A)p.[fl2r](G)p.m(A)p.m(G)p.m(C)p.m(A)[n001S].[fl2r](A) | UUAUAGAGCA |
| 0106290 | p.m(G)p.m(A)[n001S].[fl2r](A)p.m(C)[n001S].[fl2r](A)p.m(C)[n001S].[fl2r](U)p.m(G)[n001S].[fl2r](U)p.m(U)[Ssp]. | AGAACACUGU |
| | m(U)[Ssp].m(U)}$$$$V2.0 | UUU |
| SSR- | RNA1{m(U)[Ssp].[fl2r](U)[Rsp].m(A)[n001S].[fl2r](U)p.m(A)p.[fl2r](G)p.m(A)p.m(G)p.m(C)p.m(A)[n001S].[fl2r](A) | UUAUAGAGCA |
| 0106291 | p.m(G)p.m(A)[n001S].[fl2r](A)[n001S].m(C)p.[fl2r](A)p.m(C)[n001S].m(U)[n001S].m(G)p.m(U)p.m(U)[Ssp].m(U)[S | AGAACACUGU |
| | sp].m(U)}$$$$V2.0 | UUU |
| SSR- | RNA1{m(U)[Ssp].[fl2r](U)[Rsp].m(A)[n001S].[fl2r](U)p.m(A)p.[fl2r](G)p.m(A)p.m(G)p.m(C)p.m(A)[n001S].[fl2r](A) | UUAUAGAGCA |
| 0106292 | p.m(G)p.m(A)p.[fl2r](A)[n001S].m(C)[n001S].[fl2r](A)p.m(C)p.m(U)[n001S].m(G)[n001S].m(U)p.m(U)[Ssp].m(U)[S | AGAACACUGU |
| | sp].m(U)}$$$$V2.0 | UUU |
| SSR- | RNA1{m(U)[Ssp].[fl2r](U)[Rsp].m(A)[n001S].[fl2r](U)p.m(A)p.[fl2r](G)p.m(A)p.m(G)p.m(C)p.m(A)[n001S].[fl2r](A) | UUAUAGAGCA |
| 0106293 | p.m(G)[n001S].m(A)p.[fl2r](A)p.m(C)p.[fl2r](A)p.m(C)p.m(U)p.m(G)p.m(U)p.m(U)[Ssp].m(U)[Ssp].m(U)}$$$$V2.0 | AGAACACUGU |
| | | UUU |
| SSR- | RNA1{m(U)[Ssp].[fl2r](U)[Rsp].m(A)[n001S].[fl2r](U)p.m(A)p.[fl2r](G)p.m(A)p.m(G)p.m(C)p.m(A)[n001S].[fl2r](A) | UUAUAGAGCA |
| 0106294 | p.m(G)p.m(A)[n001S].[fl2r](A)p.m(C)p.[fl2r](A)p.m(C)p.m(U)p.m(G)p.m(U)p.m(U)[Ssp].m(U)[Ssp].m(U)}$$$$V2.0 | AGAACACUGU |
| | | UUU |
| SSR- | RNA1{m(U)[Ssp].[fl2r](U)[Rsp].m(A)[n001S].[fl2r](U)p.m(A)p.[fl2r](G)p.m(A)p.m(G)p.m(C)p.m(A)[n001S].[fl2r](A) | UUAUAGAGCA |
| 0106295 | p.m(G)p.m(A)p.[fl2r](A)[n001S].m(C)p.[fl2r](A)p.m(C)p.m(U)p.m(G)p.m(U)p.m(U)[Ssp].m(U)[Ssp].m(U)}$$$$V2.0 | AGAACACUGU |
| | | UUU |
| SSR- | RNA1{m(U)[Ssp].[fl2r](U)[Rsp].m(A)[n001S].[fl2r](U)p.m(A)p.[fl2r](G)p.m(A)p.m(G)p.m(C)p.m(A)[n001S].[fl2r](A) | UUAUAGAGCA |
| 0106296 | p.m(G)p.m(A)p.[fl2r](A)p.m(C)[n001S].[fl2r](A)p.m(C)p.m(U)p.m(G)p.m(U)p.m(U)[Ssp].m(U)[Ssp].m(U)}$$$$V2.0 | AGAACACUGU |
| | | UUU |
| SSR- | RNA1{m(U)[Ssp].[fl2r](U)[Rsp].m(A)[n001S].[fl2r](U)p.m(A)p.[fl2r](G)p.m(A)p.m(G)p.m(C)p.m(A)[n001S].[fl2r](A) | UUAUAGAGCA |
| 0106297 | p.m(G)p.m(A)p.[fl2r](A)p.m(C)p.[fl2r](A)[n001S].m(C)p.m(U)p.m(G)p.m(U)p.m(U)[Ssp].m(U)[Ssp].m(U)}$$$$V2.0 | AGAACACUGU |
| | | UUU |
| SSR- | RNA1{m(U)[Ssp].[fl2r](U)[Rsp].m(A)[n001S].[fl2r](U)p.m(A)p.[fl2r](G)p.m(A)p.m(G)p.m(C)p.m(A)[n001S].[fl2r](A) | UUAUAGAGCA |
| 0106298 | p.m(G)p.m(A)p.[fl2r](A)p.m(C)p.[fl2r](A)p.m(C)[n001S].m(U)p.m(G)p.m(U)p.m(U)[Ssp].m(U)[Ssp].m(U)}$$$$V2.0 | AGAACACUGU |
| | | UUU |
| SSR- | RNA1{m(U)[Ssp].[fl2r](U)[Rsp].m(A)[n001S].[fl2r](U)p.m(A)p.[fl2r](G)p.m(A)p.m(G)p.m(C)p.m(A)[n001S].[fl2r](A) | UUAUAGAGCA |
| 0106299 | p.m(G)p.m(A)p.[fl2r](A)p.m(C)p.[fl2r](A)p.m(C)p.m(U)[n001S].m(G)p.m(U)p.m(U)[Ssp].m(U)[Ssp].m(U)}$$$$V2.0 | AGAACACUGU |
| | | UUU |
| SSR- | RNA1{m(U)[Ssp].[fl2r](U)[Rsp].m(A)[n001S].[fl2r](U)p.m(A)p.[fl2r](G)p.m(A)p.m(G)p.m(C)p.m(A)[n001S].[fl2r](A) | UUAUAGAGCA |
| 0106300 | p.m(G)p.m(A)p.[fl2r](A)p.m(C)p.[fl2r](A)p.m(C)p.m(U)p.m(G)[n001S].m(U)p.m(U)[Ssp].m(U)[Ssp].m(U)}$$$$V2.0 | AGAACACUGU |
| | | UUU |
| SSR- | RNA1{m(U)[Ssp].[fl2r](U)[Rsp].m(A)[n001S].[fl2r](U)p.m(A)p.[fl2r](G)p.m(A)p.m(G)p.m(C)p.m(A)[n001S].[fl2r](A) | UUAUAGAGCA |
| 0106301 | p.m(G)p.m(A)p.[fl2r](A)p.m(C)p.[fl2r](A)p.m(C)p.m(U)p.m(G)p.m(U)[n001S].m(U)[Ssp].m(U)[Ssp].m(U)}$$$$V2.0 | AGAACACUGU |
| | | UUU |
| SSR- | RNA1{m(U)[Ssp].[fl2r](U)[Rsp].m(A)[n001S].[fl2r](U)p.m(A)p.[fl2r](G)p.m(A)p.m(G)p.m(C)p.m(A)[n001S].[fl2r](A) | UUAUAGAGCA |
| 0106302 | p.m(G)[n001S].[fl2r](A)p.[fl2r](A)p.m(C)p.[fl2r](A)p.m(C)p.m(U)p.m(G)p.m(U)p.m(U)[Ssp].m(U)[Ssp].m(U)}$$$$V | AGAACACUGU |
| | 2.0 | UUU |
| SSR- | RNA1{m(U)[Ssp].[fl2r](U)[Rsp].m(A)[n001S].[fl2r](U)p.m(A)p.[fl2r](G)p.m(A)p.m(G)p.m(C)p.m(A)[n001S].[fl2r](A) | UUAUAGAGCA |
| 0106303 | p.m(G)p.m(A)p.[fl2r](A)[n001S].[fl2r](C)p.[fl2r](A)p.m(C)p.m(U)p.m(G)p.m(U)p.m(U)[Ssp].m(U)[Ssp].m(U)}$$$$V | AGAACACUGU |
| | 2.0 | UUU |
| SSR- | RNA1{m(U)[Ssp].[fl2r](U)[Rsp].m(A)[n001S].[fl2r](U)p.m(A)p.[fl2r](G)p.m(A)p.m(G)p.m(C)p.m(A)[n001S].[fl2r](A) | UUAUAGAGCA |
| 0106304 | p.m(G)p.m(A)p.[fl2r](A)p.m(C)p.[fl2r](A)[n001S].[fl2r](C)p.m(U)p.m(G)p.m(U)p.m(U)[Ssp].m(U)[Ssp].m(U)}$$$$V | AGAACACUGU |
| | 2.0 | UUU |
| SSR- | RNA1{m(U)[Ssp].[fl2r](U)[Rsp].m(A)[n001S].[fl2r](U)p.m(A)p.[fl2r](G)p.m(A)p.m(G)p.m(C)p.m(A)[n001S].[fl2r](A) | UUAUAGAGCA |
| 0106305 | p.m(G)p.m(A)p.[fl2r](A)p.m(C)p.[fl2r](A)p.m(C)[n001S].[fl2r](U)p.m(G)p.m(U)p.m(U)[Ssp].m(U)[Ssp].m(U)}$$$$V | AGAACACUGU |
| | 2.0 | UUU |
| SSR- | RNA1{m(U)[Ssp].[fl2r](U)[Rsp].m(A)[n001S].[fl2r](U)p.m(A)p.[fl2r](G)p.m(A)p.m(G)p.m(C)p.m(A)[n001S].[fl2r](A) | UUAUAGAGCA |
| 0106306 | p.m(G)p.m(A)p.[fl2r](A)p.m(C)p.[fl2r](A)p.m(C)p.m(U)[n001S].[fl2r](G)p.m(U)p.m(U)[Ssp].m(U)[Ssp].m(U)}$$$$V | AGAACACUGU |
| | 2.0 | UUU |
| SSR- | RNA1{m(U)[Ssp].[fl2r](U)[Rsp].m(A)[n001S].[fl2r](U)p.m(A)p.[fl2r](G)p.m(A)p.m(G)p.m(C)p.m(A)[n001S].[fl2r](A) | UUAUAGAGCA |
| 0104474 | p.m(G)p.m(A)p.[fl2r](A)p.m(C)p.[fl2r](A)p.m(C)p.m(U)p.m(G)[n001S].[fl2r](U)p.m(U)[Ssp].m(U)[Ssp].m(U)}$$$$V | AGAACACUGU |
| | 2.0 | UUU |
| SSR- | RNA1{m(U)[Ssp].[fl2r](U)[Rsp].m(A)[n001S].[fl2r](U)p.m(A)p.[fl2r](G)p.m(A)p.m(G)p.m(C)p.m(A)[n001S].[fl2r](A) | UUAUAGAGCA |
| 0106307 | p.m(G)p.m(A)p.[fl2r](A)p.m(C)p.[fl2r](A)p.m(C)p.m(U)p.m(G)p.m(U)[n001S].[fl2r](U)[Ssp].m(U)[Ssp].m(U)}$$$$V | AGAACACUGU |
| | 2.0 | UUU |
| SSR- | RNA1{m(U)[Ssp].[fl2r](U)[Rsp].m(A)[n001S].[fl2r](U)p.m(A)p.[fl2r](G)p.m(A)p.m(G)p.m(C)p.m(A)[n001S].[fl2r](A) | UUAUAGAGCA |
| 0104475 | p.m(G)p.m(A)p.[fl2r](A)p.m(C)p.[fl2r](A)p.m(C)p.m(U)p.m(G)p.m(U)p.m(U)[Ssp].m(U)[Ssp].m(U)}$$$$V2.0 | AGAACACUGU |
| | | UUU |
| SSR- | RNA1{m(U)[sp].[fl2r](U)[sp].m(A)p.m(U)p.m(A)p.[fl2r](G)p.m(A)p.m(G)p.m(C)p.m(A)p.m(A)p.m(G)p.m(A)p.[fl2r] | UUAUAGAGCA |
| 0104720 | (A)p.m(C)p.[fl2r](A)p.m(C)p.m(U)p.m(G)p.m(U)p.m(U)[sp].m(U)[sp].m(U)}$$$$V2.0 | AGAACACUGU |
| | | UUU |
| SSR- | RNA1{p.m(A)[Ssp].m(A)p.m(C)p.m(A)p.m(G)p.m(U)p.[fl2r](G)p.m(U)p.[fl2r](U)p.[fl2r](C)p.[fl2r](U)p.m(U)p.m(G)p. | AACAGUGUUC |
| 0101599 | m(C)p.m(U)p.m(C)p.m(U)p.m(A)p.m(U)p.m(A)[Ssp].m(A)}\|CHEM1{[GalNAc3C12oyl]}\|CHEM2{[nC60]}$CHEM2,R | UUGCUCUAUA |
| | NA1,1:R1-1:R1\|CHEM2,CHEM1,1:R2-1:R1$$$V2. | A |
| SSR- | RNA1{p.m(A)[sp].m(A)p.m(C)p.m(A)p.m(G)p.m(U)p.[fl2r](G)p.m(U)p.[fl2r](U)p.[fl2r](C)p.[fl2r](U)p.m(U)p.m(G)p. | AACAGUGUUC |
| 0101596 | m(C)p.m(U)p.m(C)p.m(U)p.m(A)p.m(U)p.m(A)[sp].m(A)}\|CHEM1{[GalNAc3C12oyl]}\|CHEM2{[nC60]}$CHEM2,RN | UUGCUCUAUA |
| | A1,1:R1-1:R1\|CHEM2,CHEM1,1:R2-1:R1$$$V2.0 | A |
| SSR- | RNA1{p.m(U)[sp].m(G)p.m(G)p.m(U)p.m(A)p.m(U)p.[fl2r](C)p.m(A)p.[fl2r](A)p.[fl2r](A)p.[fl2r](A)p.m(C)p.m(C)p. | UGGUAUCAAA |
| 0101630 | m(U)p.m(C)p.m(A)p.m(U)p.m(G)p.m(U)p.m(C)[sp].m(A)}\|CHEM1{[GalNAc3C12oyl]}\|CHEM2{[nC60]}$CHEM2,RN | ACCUCAUGUC |
| | A1,1:R1-1:R1\|CHEM2,CHEM1,1:R2-1:R1$$$V2.0 | A |
| SSR- | RNA1{p.m(U)[Ssp].m(G)p.m(G)p.m(U)p.m(A)p.m(U)p.[fl2r](C)p.m(A)p.[fl2r](A)p.[fl2r](A)p.[fl2r](A)p.m(C)p.m(C)p. | UGGUAUCAAA |
| 0101695 | m(U)p.m(C)p.m(A)p.m(U)p.m(G)p.m(U)p.m(C)[Ssp].m(A)}\|CHEM1{[GalNAc3C12oyl]}\|CHEM2{[nC60]}$CHEM2,R | ACCUCAUGUC |
| | NA1,1:R1-1:R1\|CHEM2,CHEM1,1:R2-1:R1$$$V2.0 | A |
| SSR- | RNA1{m(U)[sp].[fl2r](G)[sp].m(A)p.[fl2r](C)p.m(A)p.[fl2r](U)p.m(G)p.m(A)p.m(G)p.m(G)p.[fl2r](U)p.m(U)p.m(U)p. | UGACAUGAGG |
| 0105101 | [fl2r](U)p.m(G)p.[fl2r](A)p.m(U)p.m(A)p.m(C)p.m(C)p.m(A)[sp].m(U)[sp].m(U)}$$$$V2.0 | UUUUGAUACC |
| | | AUU |
| SSR- | RNA1{m(U)[Ssp].[fl2r](U)[Rsp].m(A)p.[fl2r](U)p.m(A)p.[fl2r](G)p.m(A)p.m(G)p.m(C)p.m(A)p.m(A)p.m(G)p.m(A)p. | UUAUAGAGCA |
| 0106582 | [fl2r](A)p.m(C)p.[fl2r](A)p.m(C)p.m(U)p.m(G)p.m(U)p.m(U)[Ssp].m(U)[Ssp].m(U)}$$$$V2.0 | AGAACACUGU |
| | | UUU |

Note:
SSR-0104474 = WV-43988
SSR-0104475 = WV-47145
SSR-0104720 = WV-41826
SSR-0101599 = WV-42080
SSR-0101596 = WV-41828
SSR-0101630 = WV-42427
SSR-0101695 = WV-42589
SSR-0105101 = WV-49593

TABLE 1c
Example Oligonucleotides/Compositions

| Compound | | Naked | |
|---|---|---|---|
| ID | HELM | Sequence | Name |
| SSR-0101596 | RNA1{p.m(A)[sp].m(A)p.m(C)p.m(A)p.m(G)p.m(U)p.[fl2 | AACAGUGUUC | WV-41828 |
| | r](G)p.m(U)p.[fl2r](U)p.[fl2r](C)p.[fl2r](U)p.m(U) | UUGCUCUAUA | |
| | p.m(G)p.m(C)p.m(U)p.m(C)p.m(U)p.m(A)p.m(U)p.m(A)[s | A | |
| | p].m(A)}\|CHEM1{[GalNAc3C12oyl]}\|CHEM2{[nC6o]}$CHEM | | |
| | 2,RNA1,1:R1-1:R1\|CHEM2,CHEM1,1:R2-1:R1$$$V2.0 | | |
| SSR-0101599 | RNA1{p.m(A)[Ssp].m(A)p.m(C)p.m(A)p.m(G)p.m(U)p.[fl | AACAGUGUUC | WV-42080 |
| | 2r](G)p.m(U)p.[fl2r](U)p.[fl2r](C)p.[fl2r](U)p.m(U | UUGCUCUAUA | |
| | )p.m(G)p.m(C)p.m(U)p.m(C)p.m(U)p.m(A)p.m(U)p.m(A)[ | A | |
| | Ssp].m(A)}\|CHEM1{[GalNAc3C12oyl]}\|CHEM2{[nC6o]}$CH | | |
| | EM2,RNA1,1:R1-1:R1\|CHEM2,CHEM1,1:R2-1:R1$$$V2.0 | | |
| SSR-0104021 | RNA1{m(A)[Ssp].m(G)[Ssp].[fl2r](A)[Ssp].m(U)[Ssp]. | AGAUGCCUGA | WV-48429 |
| | [fl2r](G)[Ssp].m(C)[Ssp].[fl2r](C)[n001R].m(U)p.[f | ACUUGAAUUA | |
| | l2r](G)p.[fl2r](A)p.[fl2r](A)p.m(C)p.[fl2r](U)p.m( | A | |
| | U)p.[fl2r](G)[n001R].m(A)[Ssp].[fl2r](A)[Ssp].m(U) | | |
| | [Ssp].[fl2r](U)[Ssp].m(A)[Ssp].m(A)}$$$$V2.0 | | |
| SSR-0104022 | RNA1{m(A)[Ssp].m(G)[Ssp].m(A)[Ssp].m(U)[Ssp].m(G)[ | AGAUGCCUGA | WV-49628 |
| | Ssp].m(C)[Ssp].[fl2r](C)[n001R].m(U)p.[fl2r](G)p.[ | ACUUGAAUUA | |
| | fl2r](A)p.[fl2r](A)p.m(C)p.m(U)p.m(U)p.m(G)[n001R] | A | |
| | .m(A)[Ssp].m(A)[Ssp].m(U)[Ssp].m(U)[Ssp].m(A)[Ssp] | | |
| | .m(A)}$$$$V2.0 | | |
| SSR-0104024 | RNA1{m(A)[sp].m(G)p.[fl2r](A)p.m(U)p.[fl2r](G)p.m( | AGAUGCCUGA | WV-50665 |
| | C)p.[fl2r](C)p.m(U)p.[fl2r](G)p.[fl2r](A)p.[fl2r]( | ACUUGAAUUA | |
| | A)p.m(C)p.[fl2r](U)p.m(U)p.[fl2r](G)p.m(A)p.[fl2r] | A | |
| | (A)p.m(U)p.[fl2r](U)p.m(A)[sp].[fl2r](A)}$$$$V2.0 | | |
| SSR-0104025 | RNA1{m(A)[sp].m(G)p.m(A)p.m(U)p.m(G)p.m(C)p.[fl2r] | AGAUGCCUGA | WV-50667 |
| | (C)p.m(U)p.[fl2r](G)p.[fl2r](A)p.[fl2r](A)p.m(C)p. | ACUUGAAUUA | |
| | m(U)p.m(U)p.m(G)p.m(A)p.m(A)p.m(U)p.m(U)p.m(A)[sp] | A | |
| | .m(A)}$$$$V2.0 | | |
| SSR-0104026 | RNA1{m(C)[Ssp].m(U)[Ssp].[fl2r](G)[Ssp].m(U)[Ssp]. | CUGUGCUGUA | WV-48435 |
| | [fl2r](G)[Ssp].m(C)[Ssp].[fl2r](U)[n001R].m(G)p.[f | ACACAAGUAG | |
| | l2r](U)p.[fl2r](A)p.[fl2r](A)p.m(C)p.[fl2r](A)p.m( | A | |
| | C)p.[fl2r](A)[n001R].m(A)[Ssp].[fl2r](G)[Ssp].m(U) | | |
| | [Ssp].[fl2r](A)[Ssp].m(G)[Ssp].m(A)}$$$$V2.0 | | |
| SSR-0104027 | RNA1{m(C)[Ssp].m(U)[Ssp].m(G)[Ssp].m(U)[Ssp].m(G)[ | CUGUGCUGUA | WV-49633 |
| | Ssp].m(C)[Ssp].[fl2r](U)[n001R].m(G)p.[fl2r](U)p.[ | ACACAAGUAG | |
| | fl2r](A)p.[fl2r](A)p.m(C)p.m(A)p.m(C)p.m(A)[n001R] | A | |
| | .m(A)[Ssp].m(G)[Ssp].m(U)[Ssp].m(A)[Ssp].m(G)[Ssp] | | |
| | .m(A)}$$$$V2.0 | | |
| SSR-0104028 | RNA1{m(C)[sp].m(U)p.[fl2r](G)p.m(U)p.[fl2r](G)p.m( | CUGUGCUGUA | WV-50669 |
| | C)p.[fl2r](U)p.m(G)p.[fl2r](U)p.[f\|2r](A)p.[fl2r]( | ACACAAGUAG | |
| | A)p.m(C)p.[fl2r](A)p.m(C)p.[fl2r](A)p.m(A)p.[fl2r] | A | |
| | (G)p.m(U)p.[fl2r](A)p.m(G)[sp].[fl2r](A)}$$$$V2.0 | | |
| SSR-0104029 | RNA1{m(C)[sp].m(U)p.m(G)p.m(U)p.m(G)p.m(C)p.[fl2r] | CUGUGCUGUA | WV-50671 |
| | (U)p.m(G)p.[fl2r](U)p.[fl2r](A)p.[fl2r](A)p.m(C)p. | ACACAAGUAG | |
| | m(A)p.m(C)p.m(A)p.m(A)p.m(G)p.m(U)p.m(A)p.m(G)[sp] | A | |
| | .m(A)}$$$$V2.0 | | |
| SSR-0104030 | RNA1{m(G)[Ssp].m(G)[Ssp].[fl2r](A)[Ssp].m(U)[Ssp]. | GGAUGAUUGU | WV-48438 |
| | [fl2r](G)[Ssp].m(A)[Ssp].[fl2r](U)[n001R].m(U)p.[f | ACAGAAUCAU | |
| | l2r](G)p.[fl2r](U)p.[fl2r](A)p.m(C)p.[fl2r](A)p.m( | A | |
| | G)p.[fl2r](A)[n001R].m(A)[Ssp].[fl2r](U)[Ssp].m(C) | | |
| | [Ssp].[fl2r](A)[Ssp].m(U)[Ssp].m(A)}$$$$V2.0 | | |
| SSR-0104031 | RNA1{m(U)[Rsp].[fl2r](A)[Ssp].m(A)[n001S].[fl2r](A | UAAAUGCAUA | WV-48433 |
| | )p.m(U)p.[fl2r](G)p.m(C)[n001S].[fl2r](A)p.m(U)p.[ | GUGAUCAGGA | |
| | fl2r](A)p.m(G)p.m(U)p.m(G)[Ssp].[fl2r](A)[Ssp].m(U | AUU | |
| | )[Ssp].[fl2r](C)[Ssp].m(A)[Ssp].[fl2r](G)[n001S].m | | |
| | (G)[Ssp].[fl2r](A)[Ssp].m(A)[Ssp].m(U)[Ssp].m(U)}$ | | |
| | $$$V2.0 | | |
| SSR-0104035 | RNA1{m(U)[Rsp].[fl2r](A)[Ssp].m(U)[n001S].[fl2r] | UAUGAUUCUG | WV-48439 |
| | (G)p.m(A)p.[fl2r](U)p.m(U)[n001S].[fl2r](C)p.m(U) | UACAAUCAUC | |
| | p.[fl2r](G)p.m(U)p.m(A)p.m(C)[Ssp].[fl2r](A)[Ssp] | CUU | |
| | .m(A)[Ssp].[fl2r](U)[Ssp].m(C)[Ssp].[fl2r](A)[n00 | | |
| | 1S].m(U)[Ssp].[fl2r](C)[Ssp].m(C)[Ssp].m(U)[Ssp]. | | |
| | m(U)}$$$$V2.0 | | |
| SSR-0104036 | RNA1{m(U)[Rsp].[fl2r](C)[Ssp].m(A)[n001S].[fl2r](U | UCAUGUUGAG | WV-48427 |
| | )p.m(G)p.[fl2r](U)p.m(U)[n001S].[fl2r](G)p.m(A)p.[ | UUUACCACAG | |
| | fl2r](G)p.m(U)p.m(U)p.m(U)[Ssp].[fl2r](A)[Ssp].m(C | AUU | |
| | )[Ssp].[fl2r](C)[Ssp].m(A)[Ssp].[fl2r](C)[n001S].m | | |
| | (A)[Ssp].[fl2r](G)[Ssp].m(A)[Ssp].m(U)[Ssp].m(U)}$ | | |
| | $$$V2.0 | | |
| SSR-0104037 | RNA1{m(U)[Rsp].[fl2r](C)[Ssp].m(U)[n001S].[fl2r](A | UCUACUUGUG | WV-48436 |
| | )p.m(C)p.[fl2r](U)p.m(U)[n001S].[fl2r](G)p.m(U)p.[ | UUACAGCACA | |
| | fl2r](G)p.m(U)p.m(U)p.m(A)[Ssp].[fl2r](C)[Ssp].m(A | GUU | |
| | )[Ssp].[fl2r](G)[Ssp].m(C)[Ssp].[fl2r](A)[n001S].m | | |
| | (C)[Ssp].[fl2r](A)[Ssp].m(G)[Ssp].m(U)[Ssp].m(U)}$ | | |
| | $$$V2.0 | | |
| SSR-0104038 | RNA1{m(U)[Rsp].[fl2r](C)[Ssp].m(U)[n001S].[fl2r](A | UCUACUUGUG | WV-49636 |
| | )p.m(C)p.[fl2r](U)p.m(U)p.m(G)p.m(U)p.m(G)[n001R]. | UUACAGCACA | |
| | [fl2r](U)p.m(U)p.m(A)[Ssp].[fl2r](C)[Ssp].m(A)[Ssp | GUU | |
| | ].[fl2r](G)[Ssp].m(C)[Ssp].m(A)[Ssp].m(C)[Ssp].m(A | | |
| | )[Ssp].m(G)[Ssp].m(U)[Ssp].m(U)}$$$$V2.0 | | |
| SSR-0104039 | RNA1{m(U)[Rsp].[fl2r](C)[Ssp].m(U)[n001S].[fl2r](A | UCUACUUGUG | WV-49634 |
| | )p.m(C)p.[fl2r](U)p.m(U)p.m(G)p.m(U)p.m(G)[n001S]. | UUACAGCACA | |
| | [fl2r](U)p.m(U)p.m(A)[Ssp].[fl2r](C)[Ssp].m(A)[Ssp | GUU | |
| | ].[fl2r](G)[Ssp].m(C)[Ssp].m(A)[Ssp].m(C)[Ssp].m(A | | |
| | )[Ssp].m(G)[Ssp].m(U)[Ssp].m(U)}$$$$V2.0 | | |
| SSR-0104043 | RNA1{m(U)[Rsp].[fl2r](G)[Ssp].m(A)[n001S].[fl2r](G | UGAGAAUCUA | WV-48442 |
| | )p.m(A)p.[fl2r](A)p.m(U)[n001S].[fl2r](C)p.m(U)p.[ | UUCAUGCACU | |
| | fl2r](A)p.m(U)p.m(U)p.m(C)[Ssp].[fl2r](A)[Ssp].m(U | AUU | |
| | )[Ssp].[fl2r](G)[Ssp].m(C)[Ssp].[fl2r](A)[n001S].m | | |
| | (C)[Ssp].[fl2r](U)[Ssp].m(A)[Ssp].m(U)[Ssp].m(U)}$ | | |
| | $$$V2.0 | | |
| SSR-0104044 | RNA1{m(U)[Rsp].[fl2r](G)[Ssp].m(A)[n001S].[fl2r](G | UGAGAAUCUA | WV-49641 |
| | )p.m(A)p.[fl2r](A)p.m(U)p.m(C)p.m(U)p.m(A)[n001R]. | UUCAUGCACU | |
| | [fl2r](U)p.m(U)p.m(C)[Ssp].[fl2r](A)[Ssp].m(U)[Ssp | AUU | |
| | ].[fl2r](G)[Ssp].m(C)[Ssp].m(A)[Ssp].m(C)[Ssp].m(U | | |
| | )[Ssp].m(A)[Ssp].m(U)[Ssp].m(U)}$$$$V2.0 | | |
| SSR-0104045 | RNA1{m(U)[Rsp].[fl2r](G)[Ssp].m(A)[n001S].[fl2r](G | UGAGAAUCUA | WV-49639 |
| | )p.m(A)p.[fl2r](A)p.m(U)p.m(C)p.m(U)p.m(A)[n001S]. | UUCAUGCACU | |
| | [fl2r](U)p.m(U)p.m(C)[Ssp].[fl2r](A)[Ssp].m(U)[Ssp | AUU | |
| | ].[fl2r](G)[Ssp].m(C)[Ssp].m(A)[Ssp].m(C)[Ssp].m(U | | |
| | )[Ssp].m(A)[Ssp].m(U)[Ssp].m(U)}$$$$V2.0 | | |
| SSR-0104052 | RNA1{m(U)[Rsp].[fl2r](U)[Ssp].m(A)[n001S].[fl2r](A | UUAAUUCAAG | WV-48430 |
| | )p.m(U)p.[fl2r](U)p.m(C)[n001S].[fl2r](A)p.m(A)p.[ | UUCAGGCAUC | |
| | fl2r](G)p.m(U)p.m(U)p.m(C)[Ssp].[fl2r](A)[Ssp].m(G | UUU | |
| | )[Ssp].[fl2r](G)[Ssp].m(C)[Ssp].[fl2r](A)[n001S].m | | |
| | (U)[Ssp].[fl2r](C)[Ssp].m(U)[Ssp].m(U)[Ssp].m(U)}$ | | |
| | $$$V2.0 | | |
| SSR-0104053 | RNA1{m(U)[Rsp].[fl2r](U)[Ssp].m(A)[n001S].[fl2r](A | UUAAUUCAAG | WV-49631 |
| | )p.m(U)p.[fl2r](U)p.m(C)p.m(A)p.m(A)p.m(G)[n001R]. | UUCAGGCAUC | |
| | [fl2r](U)p.m(U)p.m(C)[Ssp].[fl2r](A)[Ssp].m(G)[Ssp | UUU | |
| | ].[fl2r](G)[Ssp].m(C)[Ssp].m(A)[Ssp].m(U)[Ssp].m(C | | |
| | )[Ssp].m(U)[Ssp].m(U)[Ssp].m(U)}$$$$V2.0 | | |
| SSR-0104054 | RNA1{m(U)[Rsp].[fl2r](U)[Ssp].m(A)[n001S].[fl2r](A | UUAAUUCAAG | WV-49629 |
| | )p.m(U)p.[fl2r](U)p.m(C)p.m(A)p.m(A)p.m(G)[n001S]. | UUCAGGCAUC | |
| | [fl2r](U)p.m(U)p.m(C)[Ssp].[fl2r](A)[Ssp].m(G)[Ssp | UUU | |
| | ].[fl2r](G)[Ssp].m(C)[Ssp].m(A)[Ssp].m(U)[Ssp].m(C | | |
| | )[Ssp].m(U)[Ssp].m(U)[Ssp].m(U)}$$$$V2.0 | | |
| SSR-0104061 | RNA1{m(U)[Ssp].[fl2r](A)[Rsp].m(A)[n001S].[fl2r](A | UAAAUGCAUA | WV-48434 |
| | )p.m(U)p.[fl2r](G)p.m(C)[n001S].[fl2r](A)p.m(U)p.[ | GUGAUCAGGA | |
| | fl2r](A)p.m(G)p.m(U)p.m(G)[Ssp].[fl2r](A)[Ssp].m(U | AUU | |
| | )[Ssp].[fl2r](C)[Ssp].m(A)[Ssp].[fl2r](G)[n001S].m | | |
| | (G)[Ssp].[fl2r](A)[Ssp].m(A)[Ssp].m(U)[Ssp].m(U)}$ | | |
| | $$$V2.0 | | |
| SSR-0104065 | RNA1{m(U)[Ssp].[fl2r](A)[Rsp].m(U)[n001S].[fl2r](G | UAUGAUUCUG | WV-48440 |
| | )p.m(A)p.[fl2r](U)p.m(U)[n001S].[fl2r](C)p.m(U)p.[ | UACAAUCAUC | |
| | fl2r](G)p.m(U)p.m(A)p.m(C)[Ssp].[fl2r](A)[Ssp].m(A | CUU | |
| | )[Ssp].[fl2r](U)[Ssp].m(C)[Ssp].[fl2r](A)[n001S].m | | |
| | (U)[Ssp].[fl2r](C)[Ssp].m(C)[Ssp].m(U)[Ssp].m(U)}$ | | |
| | $$$V2.0 | | |
| SSR-0104066 | RNA1{m(U)[Ssp].[fl2r](C)[Rsp].m(A)[n001S].[fl2r](U | UCAUGUUGAG | WV-48428 |
| | )p.m(G)p.[fl2r](U)p.m(U)[n001S].[fl2r](G)p.m(A)p.[ | UUUACCACAG | |
| | fl2r](G)p.m(U)p.m(U)p.m(U)[Ssp].[fl2r](A)[Ssp].m(C | AUU | |
| | )[Ssp].[fl2r](C)[Ssp].m(A)[Ssp].[fl2r](C)[n001S].m | | |
| | (A)[Ssp].[fl2r](G)[Ssp].m(A)[Ssp].m(U)[Ssp].m(U)}$ | | |
| | $$$V2.0 | | |
| SSR-0104067 | RNA1{m(U)[Ssp].[fl2r](C)[Rsp].m(U)[n001S].[fl2r](A | UCUACUUGUG | WV-48437 |
| | )p.m(C)p.[fl2r](U)p.m(U)[n001S].[fl2r](G)p.m(U)p.[ | UUACAGCACA | |
| | fl2r](G)p.m(U)p.m(U)p.m(A)[Ssp].[fl2r](C)[Ssp].m(A | GUU | |
| | )[Ssp].[fl2r](G)[Ssp].m(C)[Ssp].[fl2r](A)[n001S].m | | |
| | (C)[Ssp].[fl2r](A)[Ssp].m(G)[Ssp].m(U)[Ssp].m(U)}$ | | |
| | $$$V2.0 | | |
| SSR-0104068 | RNA1{m(U)[Ssp].[fl2r](C)[Rsp].m(U)[n001S].[fl2r](A | UCUACUUGUG | WV-49637 |
| | )p.m(C)p.[fl2r](U)p.m(U)p.m(G)p.m(U)p.m(G)[n001R]. | UUACAGCACA | |
| | [fl2r](U)p.m(U)p.m(A)[Ssp].[fl2r](C)[Ssp].m(A)[Ssp | GUU | |
| | ].[fl2r](G)[Ssp].m(C)[Ssp].m(A)[Ssp].m(C)[Ssp].m(A | | |
| | )[Ssp].m(G)[Ssp].m(U)[Ssp].m(U)}$$$$V2.0 | | |
| SSR-0104069 | RNA1{m(U)[Ssp].[fl2r](C)[Rsp].m(U)[n001S].[fl2r](A | UCUACUUGUG | WV-49635 |
| | )p.m(C)p.[fl2r](U)p.m(U)p.m(G)p.m(U)p.m(G)[n001S]. | UUACAGCACA | |
| | [fl2r](U)p.m(U)p.m(A)[Ssp].[fl2r](C)[Ssp].m(A)[Ssp | GUU | |
| | ].[fl2r](G)[Ssp].m(C)[Ssp].m(A)[Ssp].m(C)[Ssp].m(A | | |
| | )[Ssp].m(G)[Ssp].m(U)[Ssp].m(U)}$$$$V2.0 | | |
| SSR-0104073 | RNA1{m(U)[Ssp].[fl2r](G)[Rsp].m(A)[n001S].[fl2r](G | UGAGAAUCUA | WV-48443 |
| | )p.m(A)p.[fl2r](A)p.m(U)[n001S].[fl2r](C)p.m(U)p.[ | UUCAUGCACU | |
| | fl2r](A)p.m(U)p.m(U)p.m(C)[Ssp].[fl2r](A)[Ssp].m(U | AUU | |
| | )[Ssp].[fl2r](G)[Ssp].m(C)[Ssp].[fl2r](A)[n001S].m | | |
| | (C)[Ssp].[fl2r](U)[Ssp].m(A)[Ssp].m(U)[Ssp].m(U)}$ | | |
| | $$$V2.0 | | |
| SSR-0104074 | RNA1{m(U)[Ssp].[fl2r](G)[Rsp].m(A)[n001S].[fl2r](G | UGAGAAUCUA | WV-49642 |
| | )p.m(A)p.[fl2r](A)p.m(U)p.m(C)p.m(U)p.m(A)[n001R]. | UUCAUGCACU | |
| | [fl2r](U)p.m(U)p.m(C)[Ssp].[fl2r](A)[Ssp].m(U)[Ssp | AUU | |
| | ].[fl2r](G)[Ssp].m(C)[Ssp].m(A)[Ssp].m(C)[Ssp].m(U | | |
| | )[Ssp].m(A)[Ssp].m(U)[Ssp].m(U)}$$$$V2.0 | | |
| SSR-0104075 | RNA1{m(U)[Ssp].[fl2r](G)[Rsp].m(A)[n001S].[fl2r](G | UGAGAAUCUA | WV-49640 |
| | )p.m(A)p.[fl2r](A)p.m(U)p.m(C)p.m(U)p.m(A)[n001S]. | UUCAUGCACU | |
| | [fl2r](U)p.m(U)p.m(C)[Ssp].[fl2r](A)[Ssp].m(U)[Ssp | AUU | |
| | ].[fl2r](G)[Ssp].m(C)[Ssp].m(A)[Ssp].m(C)[Ssp].m(U | | |
| | )[Ssp].m(A)[Ssp].m(U)[Ssp].m(U)}$$$$V2.0 | | |
| SSR-0104082 | RNA1{m(U)[Ssp].[fl2r](U)[Rsp].m(A)[n001S].[fl2r](A | UUAAUUCAAG | WV-48431 |
| | )p.m(U)p.[fl2r](U)p.m(C)[n001S].[fl2r](A)p.m(A)p.[ | UUCAGGCAUC | |
| | fl2r](G)p.m(U)p.m(U)p.m(C)[Ssp].[fl2r](A)[Ssp].m(G | UUU | |
| | )[Ssp].[fl2r](G)[Ssp].m(C)[Ssp].[fl2r](A)[n001S].m | | |
| | (U)[Ssp].[fl2r](C)[Ssp].m(U)[Ssp].m(U)[Ssp].m(U)}$ | | |
| | $$$V2.0 | | |
| SSR-0104083 | RNA1{m(U)[Ssp].[fl2r](U)[Rsp].m(A)[n001S].[fl2r](A | UUAAUUCAAG | WV-49632 |
| | )p.m(U)p.[fl2r](U)p.m(C)p.m(A)p.m(A)p.m(G)[n001R]. | UUCAGGCAUC | |
| | [fl2r](U)p.m(U)p.m(C)[Ssp].[fl2r](A)[Ssp].m(G)[Ssp | UUU | |
| | ].[fl2r](G)[Ssp].m(C)[Ssp].m(A)[Ssp].m(U)[Ssp].m(C | | |
| | )[Ssp].m(U)[Ssp].m(U)[Ssp].m(U)}$$$$V2.0 | | |
| SSR-0104084 | RNA1{m(U)[Ssp].[fl2r](U)[Rsp].m(A)[n001S].[fl2r](A | UUAAUUCAAG | WV-49630 |
| | )p.m(U)p.[fl2r](U)p.m(C)p.m(A)p.m(A)p.m(G)[n001S]. | UUCAGGCAUC | |
| | [fl2r](U)p.m(U)p.m(C)[Ssp].[fl2r](A)[Ssp].m(G)[Ssp | UUU | |
| | ].[fl2r](G)[Ssp].m(C)[Ssp].m(A)[Ssp].m(U)[Ssp].m(C | | |
| | )[Ssp].m(U)[Ssp].m(U)[Ssp].m(U)}$$$$V2.0 | | |
| SSR-0104092 | RNA1{m(U)[Ssp].m(A)[Ssp].[fl2r](G)[Ssp].m(U)[Ssp]. | UAGUGCAUGA | WV-48441 |
| | [fl2r](G)[Ssp].m(C)[Ssp].[fl2r](A)[n001R].m(U)p.[f | AUAGAUUCUC | |
| | l2r](G)p.[fl2r](A)p.[fl2r](A)p.m(U)p.[fl2r](A)p.m( | A | |
| | G)p.[fl2r](A)[n001R].m(U)[Ssp].[fl2r](U)[Ssp].m(C) | | |
| | [Ssp].[fl2r](U)[Ssp].m(C)[Ssp].m(A)}$$$$V2.0 | | |
| SSR-0104094 | RNA1{m(U)[Ssp].m(A)[Ssp].m(G)[Ssp].m(U)[Ssp].m(G)[ | UAGUGCAUGA | WV-49638 |
| | Ssp].m(C)[Ssp].[fl2r](A)[n001R].m(U)p.[fl2r](G)p.[ | AUAGAUUCUC | |
| | fl2r](A)p.[fl2r](A)p.m(U)p.m(A)p.m(G)p.m(A)[n001R] | A | |
| | .m(U)[Ssp].m(U)[Ssp].m(C)[Ssp].m(U)[Ssp].m(C)[Ssp] | | |
| | .m(A)}$$$$V2.0 | | |
| SSR-0104097 | RNA1{m(U)[Ssp].m(C)[Ssp].[fl2r](U)[Ssp].m(G)[Ssp]. | UCUGUGGUAA | WV-48426 |
| | [fl2r](U)[Ssp].m(G)[Ssp].[fl2r](G)[n001R].m(U)p.[f | ACUCAACAUG | |
| | l2r](A)p.[fl2r](A)p.[fl2r](A)p.m(C)p.[fl2r](U)p.m( | A | |
| | C)p.[fl2r](A)[n001R].m(A)[Ssp].[fl2r](C)[Ssp].m(A) | | |
| | [Ssp].[fl2r](U)[Ssp].m(G)[Ssp].m(A)}$$$$V2.0 | | |
| SSR-0104099 | RNA1{m(U)[Ssp].m(U)[Ssp].[fl2r](C)[Ssp].m(C)[Ssp]. | UUCCUGAUCA | WV-48432 |
| | [fl2r](U)[Ssp].m(G)[Ssp].[fl2r](A)[n001R].m(U)p.[f | CUAUGCAUUU | |
| | l2r](C)p.[fl2r](A)p.[fl2r](C)p.m(U)p.[fl2r](A)p.m( | A | |
| | U)p.[fl2r](G)[n001R].m(C)[Ssp].[fl2r](A)[Ssp].m(U) | | |
| | [Ssp].[fl2r](U)[Ssp].m(U)[Ssp].m(A)}$$$$V2.0 | | |
| SSR-0104100 | RNA1{m(U)[sp].[fl2r](C)[sp].m(U)p.[fl2r](A)p.m(C)p | UCUACUUGUG | WV-50670 |
| | .[fl2r](U)p.m(U)p.[fl2r](G)p.m(U)p.[fl2r](G)p.m(U) | UUACAGCACA | |
| | p.m(U)p.m(A)p.[fl2r](C)p.m(A)p.[fl2r](G)p.m(C)p.[f | GUU | |
| | l2r](A)p.m(C)p.[fl2r](A)p.m(G)[sp].m(U)[sp].m(U)}$ | | |
| | $$$V2.0 | | |
| SSR-0104101 | RNA1{m(U)[sp].[fl2r](C)[sp].m(U)p.m(A)p.m(C)p.[fl2 | UCUACUUGUG | WV-50672 |
| | r](U)p.m(U)p.m(G)p.m(U)p.m(G)p.m(U)p.m(U)p.m(A)p.[ | UUACAGCACA | |
| | fl2r](C)p.m(A)p.[fl2r](G)p.m(C)p.m(A)p.m(C)p.m(A)p | GUU | |
| | .m(G)[sp].m(U)[sp].m(U)}$$$$V2.0 | | |
| SSR-0104102 | RNA1{m(U)[sp].[fl2r](G)[sp].m(A)p.[fl2r](G)p.m(A)p | UGAGAAUCUA | WV-50674 |
| | .[fl2r](A)p.m(U)p.[fl2r](C)p.m(U)p.[fl2r](A)p.m(U) | UUCAUGCACU | |
| | p.m(U)p.m(C)p.[fl2r](A)p.m(U)p.[fl2r](G)p.m(C)p.[f | AUU | |
| | l2r](A)p.m(C)p.[fl2r](U)p.m(A)[sp].m(U)[sp].m(U)}$ | | |
| | $$$V2.0 | | |
| SSR-0104103 | RNA1{m(U)[sp].[fl2r](G)[sp].m(A)p.m(G)p.m(A)p.[fl2 | UGAGAAUCUA | WV-50676 |
| | r](A)p.m(U)p.m(C)p.m(U)p.m(A)p.m(U)p.m(U)p.m(C)p.[ | UUCAUGCACU | |
| | fl2r](A)p.m(U)p.[fl2r](G)p.m(C)p.m(A)p.m(C)p.m(U)p | AUU | |
| | .m(A)[sp].m(U)[sp].m(U)}$$$$V2.0 | | |
| SSR-0104104 | RNA1{m(U)[sp].[fl2r](U)[sp].m(A)p.[fl2r](A)p.m(U)p | UUAAUUCAAG | WV-50666 |
| | .[fl2r](U)p.m(C)p.[fl2r](A)p.m(A)p.[fl2r](G)p.m(U) | UUCAGGCAUC | |
| | p.m(U)p.m(C)p.[fl2r](A)p.m(G)p.[fl2r](G)p.m(C)p.[f | UUU | |
| | l2r](A)p.m(U)p.[fl2r](C)p.m(U)[sp].m(U)[sp].m(U)}$ | | |
| | $$$V2.0 | | |
| SSR-0104105 | RNA1{m(U)[sp].[fl2r](U)[sp].m(A)p.m(A)p.m(U)p.[fl2 | UUAAUUCAAG | WV-50668 |
| | r](U)p.m(C)p.m(A)p.m(A)p.m(G)p.m(U)p.m(U)p.m(C)p.[ | UUCAGGCAUC | |
| | fl2r](A)p.m(G)p.[fl2r](G)p.m(C)p.m(A)p.m(U)p.m(C)p | UUU | |
| | .m(U)[sp].m(U)[sp].m(U)}$$$$V2.0 | | |
| SSR-0104106 | RNA1{m(U)[sp].m(A)p.[fl2r](G)p.m(U)p.[fl2r](G)p.m( | UAGUGCAUGA | WV-50673 |
| | C)p.[fl2r](A)p.m(U)p.[fl2r](G)p.[fl2r](A)p.[fl2r]( | AUAGAUUCUC | |
| | A)p.m(U)p.[fl2r](A)p.m(G)p.[fl2r](A)p.m(U)p.[fl2r] | A | |
| | (U)p.m(C)p.[fl2r](U)p.m(C)[sp].[fl2r](A)}$$$$V2.0 | | |
| SSR-0104107 | RNA1{m(U)[sp].m(A)p.m(G)p.m(U)p.m(G)p.m(C)p.[fl2r] | UAGUGCAUGA | WV-50675 |
| | (A)p.m(U)p.[fl2r](G)p.[fl2r](A)p.[fl2r](A)p.m(U)p. | AUAGAUUCUC | |
| | m(A)p.m(G)p.m(A)p.m(U)p.m(U)p.m(C)p.m(U)p.m(C)[sp] | A | |
| | .m(A)}$$$$V2.0 | | |
| SSR-0104474 | RNA1{m(U)[Ssp].[fl2r](U)[Rsp].m(A)[n001S].[fl2r](U | UUAUAGAGCA | WV-43988 |
| | )p.m(A)p.[fl2r](G)p.m(A)p.m(G)p.m(C)p.m(A)[n001S]. | AGAACACUGU | |
| | [fl2r](A)p.m(G)p.m(A)p.[fl2r](A)p.m(C)p.[fl2r](A)p | UUU | |
| | .m(C)p.m(U)p.m(G)[n001S].[fl2r](U)p.m(U)[Ssp].m(U) | | |
| | [Ssp].m(U)}$$$$V2.0 | | |
| SSR-0104475 | RNA1{m(U)[Ssp].[fl2r](U)[Rsp].m(A)[n001S].[fl2r](U | UUAUAGAGCA | WV-47145 |
| | )p.m(A)p.[fl2r](G)p.m(A)p.m(G)p.m(C)p.m(A)[n001S]. | AGAACACUGU | |
| | [fl2r](A)p.m(G)p.m(A)p.[fl2r](A)p.m(C)p.[fl2r](A)p | UUU | |
| | .m(C)p.m(U)p.m(G)p.m(U)p.m(U)[Ssp].m(U)[Ssp].m(U)} | | |
| | $$$$V2.0 | | |
| SSR-0104720 | RNA1{m(U)[sp].[fl2r](U)[sp].m(A)p.m(U)p.m(A)p.[fl2 | UUAUAGAGCA | WV-41826 |
| | r](G)p.m(A)p.m(G)p.m(C)p.m(A)p.m(A)p.m(G)p.m(A)p.[ | AGAACACUGU | |
| | fl2r](A)p.m(C)p.[fl2r](A)p.m(C)p.m(U)p.m(G)p.m(U)p | UUU | |
| | .m(U)[sp].m(U)[sp].m(U)}$$$$V2.0 | | |
| SSR-0106170 | RNA1{m(U)[Rsp].[fl2r](C)[Ssp].m(U)[n001S].[fl2r](A | UCUACUUGUG | |
| | )p.m(C)p.[fl2r](U)p.m(U)[n001S].[fl2r](G)p.m(U)p.[ | UUACAGCACA | |
| | fl2r](G)p.m(U)p.m(U)p.m(A)[Ssp].[fl2r](C)[Ssp].m(A | GUU | |
| | )[Ssp].[fl2r](G)[Ssp].m(C)[Ssp].[fl2r](A)[Ssp].m(C | | |
| | )[n001S].[fl2r](A)[Ssp].m(G)[Ssp].m(U)[Ssp].m(U)}$ | | |
| | $$$V2.0 | | |
| SSR-0106171 | RNA1{m(U)[Rsp].[fl2r](C)[Ssp].m(U)[n001S].[fl2r](A | UCUACUUGUG | |
| | )p.m(C)p.[fl2r](U)p.m(U)p.[fl2r](G)p.m(U)p.[fl2r]( | UUACAGCACA | |
| | G)[n001S].m(U)p.m(U)p.m(A)[Ssp].[fl2r](C)[Ssp].m(A | GUU | |
| | )[Ssp].[fl2r](G)[Ssp].m(C)[Ssp].[fl2r](A)[Ssp].m(C | | |
| | )[n001S].[fl2r](A)[Ssp].m(G)[Ssp].m(U)[Ssp].m(U)}$ | | |
| | $$$V2.0 | | |
| SSR-0106172 | RNA1{m(U)[Rsp].[fl2r](C)[Ssp].m(U)[n001S].[fl2r](A | UCUACUUGUG | |
| | )p.m(C)p.[fl2r](U)p.m(U)p.[fl2r](G)p.m(U)p.m(G)[n0 | UUACAGCACA | |
| | 01S].[fl2r](U)p.m(U)p.m(A)[Ssp].[fl2r](C)[Ssp].m(A | GUU | |
| | )[Ssp].[fl2r](G)[Ssp].m(C)[Ssp].[fl2r](A)[Ssp].m(C | | |
| | )[n001S].[fl2r](A)[Ssp].m(G)[Ssp].m(U)[Ssp].m(U)}$ | | |
| | $$$V2.0 | | |
| SSR-0106173 | RNA1{m(U)[Rsp].[fl2r](C)[Ssp].m(U)[n001S].[fl2r](A | UCUACUUGUG | |
| | )p.m(C)p.[fl2r](U)p.m(U)p.m(G)p.m(U)p.m(G)[n001S]. | UUACAGCACA | |
| | [fl2r](U)p.m(U)p.m(A)[Ssp].[fl2r](C)[Ssp].m(A)[Ssp | GUU | |
| | ].[fl2r](G)[Ssp].m(C)[Ssp].m(A)[Ssp].m(C)[n001S].[ | | |
| | fl2r](A)[Ssp].m(G)[Ssp].m(U)[Ssp].m(U)}$$$$V2.0 | | |
| SSR-0106174 | RNA1{m(U)[Rsp].[fl2r](C)[Ssp].m(U)[n001S].[fl2r](A | UCUACUUGUG | |
| | )p.m(C)p.[fl2r](U)p.m(U)[n001S].[fl2r](G)p.m(U)p.[ | UUACAGCACA | |
| | fl2r](G)p.m(U)p.m(U)p.m(A)[Ssp].[fl2r](C)[Ssp].m(A | GUU | |
| | )[Ssp].[fl2r](G)[Ssp].m(C)[Ssp].[fl2r](A)[Ssp].m(C | | |
| | )[Ssp].[fl2r](A)[Ssp].m(G)[Ssp].m(U)[Ssp].m(U)}$$$ | | |
| | $V2.0 | | |
| SSR-0106175 | RNA1{m(U)[Rsp].[fl2r](C)[Ssp].m(U)[n001S].[fl2r](A | UCUACUUGUG | |
| | )p.m(C)p.[fl2r](U)p.m(U)p.[fl2r](G)p.m(U)p.[fl2r]( | UUACAGCACA | |
| | G)[n001S].m(U)p.m(U)p.m(A)[Ssp].[fl2r](C)[Ssp].m(A | GUU | |
| | )[Ssp].[fl2r](G)[Ssp].m(C)[Ssp].[fl2r](A)[Ssp].m(C | | |
| | )[Ssp].[fl2r](A)[Ssp].m(G)[Ssp].m(U)[Ssp].m(U)}$$$ | | |
| | $V2.0 | | |
| SSR-0106176 | RNA1{m(U)[Rsp].[fl2r](C)[Ssp].m(U)[n001S].[fl2r](A | UCUACUUGUG | |
| | )p.m(C)p.[fl2r](U)p.m(U)p.[fl2r](G)p.m(U)p.m(G)[n0 | UUACAGCACA | |
| | 01S].[fl2r](U)p.m(U)p.m(A)[Ssp].[fl2r](C)[Ssp].m(A | GUU | |
| | )[Ssp].[fl2r](G)[Ssp].m(C)[Ssp].[fl2r](A)[Ssp].m(C | | |
| | )[Ssp].[fl2r](A)[Ssp].m(G)[Ssp].m(U)[Ssp].m(U)}$$$ | | |
| | $V2.0 | | |
| SSR-0106177 | RNA1{m(U)[Rsp].[fl2r](C)[Ssp].m(U)[n001S].[fl2r](A | UCUACUUGUG | |
| | )p.m(C)p.[fl2r](U)p.m(U)p.m(G)p.m(U)p.m(G)[n001S]. | UUACAGCACA | |
| | [fl2r](U)p.m(U)p.m(A)[Ssp].[fl2r](C)[Ssp].m(A)[Ssp | GUU | |
| | ].[fl2r](G)[Ssp].m(C)[Ssp].m(A)[Ssp].m(C)[Ssp].[fl | | |
| | 2r](A)[Ssp].m(G)[Ssp].m(U)[Ssp].m(U)}$$$$V2.0 | | |
| SSR-0106178 | RNA1{m(U)[Rsp].[fl2r](C)[Ssp].m(U)[n001S].[fl2r](A | UCUACUUGUG | |
| | )p.m(C)p.[fl2r](U)p.m(U)[n001S].[fl2r](G)p.m(U)p.[ | UUACAGCACA | |
| | fl2r](G)p.m(U)p.m(U)p.m(A)[Ssp].[fl2r](C)[Ssp].m(A | GUU | |
| | )[n001S].[fl2r](G)[Ssp].m(C)[Ssp].[fl2r](A)[n001S] | | |
| | .m(C)[Ssp].[fl2r](A)[Ssp].m(G)[Ssp].m(U)[Ssp].m(U) | | |
| | }$$$$V2.0 | | |
| SSR-0106179 | RNA1{m(U)[Rsp].[fl2r](C)[Ssp].m(U)[n001S].[fl2r](A | UCUACUUGUG | |
| | )p.m(C)p.[fl2r](U)p.m(U)[n001S].[fl2r](G)p.m(U)p.[ | UUACAGCACA | |
| | fl2r](G)p.m(U)p.m(U)p.m(A)[Ssp].[fl2r](C)[Ssp].m(A | GUU | |
| | )[n001S].[fl2r](G)[Ssp].m(C)[Ssp].[fl2r](A)[Ssp].m | | |
| | (C)[n001S].[fl2r](A)[Ssp].m(G)[Ssp].m(U)[Ssp].m(U) | | |
| | }$$$$V2.0 | | |
| SSR-0106180 | RNA1{m(U)[Rsp].[fl2r](C)[Ssp].m(U)[n001S].[fl2r](A | UCUACUUGUG | |
| | )p.m(C)p.[fl2r](U)p.m(U)p.[fl2r](G)p.m(U)p.[fl2r]( | UUACAGCACA | |
| | G)[n001S].m(U)p.m(U)p.m(A)[Ssp].[fl2r](C)[Ssp].m(A | GUU | |
| | )[n001S].[fl2r](G)[Ssp].m(C)[Ssp].[fl2r](A)[Ssp].m | | |
| | (C)[n001S].[fl2r](A)[Ssp].m(G)[Ssp].m(U)[Ssp].m(U) | | |
| | }$$$$V2.0 | | |
| SSR-0106181 | RNA1{m(U)[Rsp].[fl2r](C)[Ssp].m(U)[n001S].[fl2r](A | UCUACUUGUG | |
| | )p.m(C)p.[fl2r](U)p.m(U)p.[fl2r](G)p.m(U)p.m(G)[n0 | UUACAGCACA | |
| | 01S].[fl2r](U)p.m(U)p.m(A)[Ssp].[fl2r](C)[Ssp].m(A | GUU | |
| | )[n001S].[fl2r](G)[Ssp].m(C)[Ssp].[fl2r](A)[Ssp].m | | |
| | (C)[n001S].[fl2r](A)[Ssp].m(G)[Ssp].m(U)[Ssp].m(U) | | |
| | }$$$$V2.0 | | |
| SSR-0106182 | RNA1{m(U)[Rsp].[fl2r](C)[Ssp].m(U)[n001S].[fl2r](A | UCUACUUGUG | |
| | )p.m(C)p.[fl2r](U)p.m(U)p.m(G)p.m(U)p.m(G)[n001S]. | UUACAGCACA | |
| | [fl2r](U)p.m(U)p.m(A)[Ssp].[fl2r](C)[Ssp].m(A)[n00 | GUU | |
| | 1S].[fl2r](G)[Ssp].m(C)[Ssp].m(A)[Ssp].m(C)[n001S] | | |
| | .[fl2r](A)[Ssp].m(G)[Ssp].m(U)[Ssp].m(U)}$$$$V2.0 | | |
| SSR-0106183 | RNA1{p.[Rm5d5m](U)[Rsp].[fl2r](C)[Ssp].m(U)[n001S] | UCUACUUGUG | |
| | .[fl2r](A)p.m(C)p.[fl2r](U)p.m(U)[n001S].[fl2r](G) | UUACAGCACA | |
| | p.m(U)p.[fl2r](G)p.m(U)p.m(U)p.m(A)[Ssp].[fl2r](C) | GUU | |
| | [Ssp].m(A)[Ssp].[fl2r](G)[Ssp].m(C)[Ssp].[fl2r](A) | | |
| | [n001S].m(C)[Ssp].[fl2r](A)[Ssp].m(G)[Ssp].m(U)[Ss | | |
| | p].m(U)}$$$$V2.0 | | |
| SSR-0106184 | RNA1{p.[Rm5d5m](U)[Rsp].[fl2r](C)[Ssp].m(U)[n001S] | UCUACUUGUG | |
| | .[fl2r](A)p.m(C)p.[fl2r](U)p.m(U)[n001S].[fl2r](G) | UUACAGCACA | |
| | p.m(U)p.[fl2r](G)p.m(U)p.m(U)p.m(A)[Ssp].[fl2r](C) | GUU | |
| | [Ssp].m(A)[Ssp].[fl2r](G)[Ssp].m(C)[Ssp].[fl2r](A) | | |
| | [Ssp].m(C)[n001S].[fl2r](A)[Ssp].m(G)[Ssp].m(U)[Ss | | |
| | p].m(U)}$$$$V2.0 | | |
| SSR-0106185 | RNA1{p.[Rm5d5m](U)[Rsp].[fl2r](C)[Ssp].m(U)[n001S] | UCUACUUGUG | |
| | .[fl2r](A)p.m(C)p.[fl2r](U)p.m(U)p.[fl2r](G)p.m(U) | UUACAGCACA | |
| | p.[fl2r](G)[n001S].m(U)p.m(U)p.m(A)[Ssp].[fl2r](C) | GUU | |
| | [Ssp].m(A)[Ssp].[fl2r](G)[Ssp].m(C)[Ssp].[fl2r](A) | | |
| | [Ssp].m(C)[n001S].[fl2r](A)[Ssp].m(G)[Ssp].m(U)[Ss | | |
| | p].m(U)}$$$$V2.0 | | |
| SSR-0106186 | RNA1{p.[Rm5d5m](U)[Rsp].[fl2r](C)[Ssp].m(U)[n001S] | UCUACUUGUG | |
| | .[fl2r](A)p.m(C)p.[fl2r](U)p.m(U)p.[fl2r](G)p.m(U) | UUACAGCACA | |
| | p.m(G)[n001S].[fl2r](U)p.m(U)p.m(A)[Ssp].[fl2r](C) | GUU | |
| | [Ssp].m(A)[Ssp].[fl2r](G)[Ssp].m(C)[Ssp].[fl2r](A) | | |
| | [Ssp].m(C)[n001S].[fl2r](A)[Ssp].m(G)[Ssp].m(U)[Ss | | |
| | p].m(U)}$$$$V2.0 | | |
| SSR-0106187 | RNA1{p.[Rm5d5m](U)[Rsp].[fl2r](C)[Ssp].m(U)[n001S] | UCUACUUGUG | |
| | .[fl2r](A)p.m(C)p.[fl2r](U)p.m(U)p.m(G)p.m(U)p.m(G | UUACAGCACA | |
| | )[n001S].[fl2r](U)p.m(U)p.m(A)[Ssp].[fl2r](C)[Ssp] | GUU | |
| | .m(A)[Ssp].[fl2r](G)[Ssp].m(C)[Ssp].m(A)[Ssp].m(C) | | |
| | [n001S].[fl2r](A)[Ssp].m(G)[Ssp].m(U)[Ssp].m(U)}$$ | | |
| | $$V2.0 | | |
| SSR-0106188 | RNA1{p.[Rm5d5m](U)[Rsp].[fl2r](C)[Ssp].m(U)[n001S] | UCUACUUGUG | |
| | .[fl2r](A)p.m(C)p.[fl2r](U)p.m(U)[n001S].[fl2r](G) | UUACAGCACA | |
| | p.m(U)p.[fl2r](G)p.m(U)p.m(U)p.m(A)[Ssp].[fl2r](C) | GUU | |
| | [Ssp].m(A)[Ssp].[fl2r](G)[Ssp].m(C)[Ssp].[fl2r](A) | | |
| | [Ssp].m(C)[Ssp].[fl2r](A)[Ssp].m(G)[Ssp].m(U)[Ssp] | | |
| | .m(U)}$$$$V2.0 | | |
| SSR-0106189 | RNA1{p.[Rm5d5m](U)[Rsp].[fl2r](C)[Ssp].m(U)[n001S] | UCUACUUGUG | |
| | .[fl2r](A)p.m(C)p.[fl2r](U)p.m(U)p.[fl2r](G)p.m(U) | UUACAGCACA | |
| | p.[fl2r](G)[n001S].m(U)p.m(U)p.m(A)[Ssp].[fl2r](C) | GUU | |
| | [Ssp].m(A)[Ssp].[fl2r](G)[Ssp].m(C)[Ssp].[fl2r](A) | | |
| | [Ssp].m(C)[Ssp].[fl2r](A)[Ssp].m(G)[Ssp].m(U)[Ssp] | | |
| | .m(U)}$$$$V2.0 | | |
| SSR-0106190 | RNA1{p.[Rm5d5m](U)[Rsp].[fl2r](C)[Ssp].m(U)[n001S] | UCUACUUGUG | |
| | .[fl2r](A)p.m(C)p.[fl2r](U)p.m(U)p.[fl2r](G)p.m(U) | UUACAGCACA | |
| | p.m(G)[n001S].[fl2r](U)p.m(U)p.m(A)[Ssp].[fl2r](C) | GUU | |
| | [Ssp].m(A)[Ssp].[fl2r](G)[Ssp].m(C)[Ssp].[fl2r](A) | | |
| | [Ssp].m(C)[Ssp].[fl2r](A)[Ssp].m(G)[Ssp].m(U)[Ssp] | | |
| | .m(U)}$$$$V2.0 | | |
| SSR-0106191 | RNA1{p.[Rm5d5m](U)[Rsp].[fl2r](C)[Ssp].m(U)[n001S] | UCUACUUGUG | |
| | .[fl2r](A)p.m(C)p.[fl2r](U)p.m(U)p.m(G)p.m(U)p.m(G | UUACAGCACA | |
| | )[n001S].[fl2r](U)p.m(U)p.m(A)[Ssp].[fl2r](C)[Ssp] | GUU | |
| | .m(A)[Ssp].[fl2r](G)[Ssp].m(C)[Ssp].m(A)[Ssp].m(C) | | |
| | [Ssp].[fl2r](A)[Ssp].m(G)[Ssp].m(U)[Ssp].m(U)}$$$$ | | |
| | V2.0 | | |
| SSR-0106192 | RNA1{p.[Rm5d5m](U)[Rsp].[fl2r](C)[Ssp].m(U)[n001S] | UCUACUUGUG | |
| | .[fl2r](A)p.m(C)p.[fl2r](U)p.m(U)p.m(G)p.m(U)p.m(G | UUACAGCACA | |
| | )[n001S].[fl2r](U)p.m(U)p.m(A)[Ssp].[fl2r](C)[Ssp] | GUU | |
| | .m(A)[Ssp].[fl2r](G)[Ssp].m(C)[Ssp].m(A)[Ssp].m(C) | | |
| | [Ssp].m(A)[Ssp].m(G)[Ssp].m(U)[Ssp].m(U)}$$$$V2.0 | | |
| SSR-0106193 | RNA1{p.[Rm5d5m](U)[Rsp].[fl2r](C)[Ssp].m(U)[n001S] | UCUACUUGUG | |
| | .[fl2r](A)p.m(C)p.[fl2r](U)p.m(U)[n001S].[fl2r](G) | UUACAGCACA | |
| | p.m(U)p.[fl2r](G)p.m(U)p.m(U)p.m(A)[Ssp].[fl2r](C) | GUU | |
| | [Ssp].m(A)[n001S].[fl2r](G)[Ssp].m(C)[Ssp].[fl2r]( | | |
| | A)[n001S].m(C)[Ssp].[fl2r](A)[Ssp].m(G)[Ssp].m(U)[ | | |
| | Ssp].m(U)}$$$$V2.0 | | |
| SSR-0106194 | RNA1{p.[Rm5d5m](U)[Rsp].[fl2r](C)[Ssp].m(U)[n001S] | UCUACUUGUG | |
| | .[fl2r](A)p.m(C)p.[fl2r](U)p.m(U)[n001S].[fl2r](G) | UUACAGCACA | |
| | p.m(U)p.[fl2r](G)p.m(U)p.m(U)p.m(A)[Ssp].[fl2r](C) | GUU | |
| | [Ssp].m(A)[n001S].[fl2r](G)[Ssp].m(C)[Ssp].[fl2r]( | | |
| | A)[Ssp].m(C)[n001S].[fl2r](A)[Ssp].m(G)[Ssp].m(U)[ | | |
| | Ssp].m(U)}$$$$V2.0 | | |
| SSR-0106195 | RNA1{p.[Rm5d5m](U)[Rsp].[fl2r](C)[Ssp].m(U)[n001S] | UCUACUUGUG | |
| | .[fl2r](A)p.m(C)p.[fl2r](U)p.m(U)p.[fl2r](G)p.m(U) | UUACAGCACA | |
| | p.[fl2r](G)[n001S].m(U)p.m(U)p.m(A)[Ssp].[fl2r](C) | GUU | |
| | [Ssp].m(A)[n001S].[fl2r](G)[Ssp].m(C)[Ssp].[fl2r]( | | |
| | A)[Ssp].m(C)[n001S].[fl2r](A)[Ssp].m(G)[Ssp].m(U)[ | | |
| | Ssp].m(U)}$$$$V2.0 | | |
| SSR-0106196 | RNA1{p.[Rm5d5m](U)[Rsp].[fl2r](C)[Ssp].m(U)[n001S] | UCUACUUGUG | |
| | .[fl2r](A)p.m(C)p.[fl2r](U)p.m(U)p.[fl2r](G)p.m(U) | UUACAGCACA | |
| | p.m(G)[n001S].[fl2r](U)p.m(U)p.m(A)[Ssp].[fl2r](C) | GUU | |
| | [Ssp].m(A)[n001S].[fl2r](G)[Ssp].m(C)[Ssp].[fl2r]( | | |
| | A)[Ssp].m(C)[n001S].[fl2r](A)[Ssp].m(G)[Ssp].m(U)[ | | |
| | Ssp].m(U)}$$$$V2.0 | | |
| SSR-0106197 | RNA1{p.[Rm5d5m](U)[Rsp].[fl2r](C)[Ssp].m(U)[n001S] | UCUACUUGUG | |
| | .[fl2r](A)p.m(C)p.[fl2r](U)p.m(U)p.m(G)p.m(U)p.m(G | UUACAGCACA | |
| | )[n001S].[fl2r](U)p.m(U)p.m(A)[Ssp].[fl2r](C)[Ssp] | GUU | |
| | .m(A)[n001S].[fl2r](G)[Ssp].m(C)[Ssp].m(A)[Ssp].m( | | |
| | C)[n001S].[fl2r](A)[Ssp].m(G)[Ssp].m(U)[Ssp].m(U)} | | |
| | $$$$V2.0 | | |
| SSR-0106206 | RNA1{m(C)[Ssp].m(U)p.[fl2r](G)p.m(U)p.[fl2r](G)p.m | CUGUGCUGUA | |
| | (C)p.[fl2r](U)[n001R].m(G)p.[fl2r](U)p.[fl2r](A)p. | ACACAAGUAG | |
| | [fl2r](A)p.m(C)p.[fl2r](A)p.m(C)p.[fl2r](A)[n001R] | A | |
| | .m(A)p.[fl2r](G)p.m(U)p.[fl2r](A)p.m(G)[Ssp].m(A)} | | |
| | $$$$V2.0 | | |
| SSR-0106207 | RNA1{m(C)[Ssp].m(U)p.[fl2r](G)p.m(U)p.[fl2r](G)p.m | CUGUGCUGUA | |
| | (C)p.[fl2r](U)[n001R].m(G)p.[fl2r](U)p.[fl2r](A)p. | ACACAAGUAG | |
| | [fl2r](A)p.m(C)p.[fl2r](A)p.m(C)p.[fl2r](A)[n001R] | A | |
| | .m(A)[Ssp].[fl2r](G)[Ssp].m(U)[Ssp].[fl2r](A)[Ssp] | | |
| | .m(G)[Ssp].m(A)}$$$$V2.0 | | |
| SSR-0106208 | RNA1{m(C)[Ssp].m(U)[Ssp].[fl2r](G)[Ssp].m(U)[Ssp]. | CUGUGCUGUA | |
| | [fl2r](G)[Ssp].m(C)[Ssp].[fl2r](U)[n001R].m(G)p.[f | ACACAAGUAG | |
| | l2r](U)p.[fl2r](A)p.[fl2r](A)p.m(C)p.[fl2r](A)p.m( | A | |
| | C)p.[fl2r](A)[n001R].m(A)p.[fl2r](G)p.m(U)p.[fl2r] | | |
| | (A)p.m(G)[Ssp].m(A)}$$$$V2.0 | | |
| SSR-0106209 | RNA1{m(C)[Ssp].m(U)p.[fl2r](G)p.m(U)p.[fl2r](G)p.m | CUGUGCUGUA | |
| | (C)p.[fl2r](U)[n001R].m(G)p.[fl2r](U)p.[fl2r](A)p. | ACACAAGUAG | |
| | [fl2r](A)p.m(C)[Ssp].[fl2r](A)[Ssp].m(C)[Ssp].[fl2 | A | |
| | r](A)[n001R].m(A)[Ssp].[fl2r](G)[Ssp].m(U)[Ssp].[f | | |
| | 12r](A)[Ssp].m(G)[Ssp].m(A)}$$$$V2.0 | | |
| SSR-0106210 | RNA1{m(C)[Ssp].m(U)[Ssp].[fl2r](G)[Ssp].m(U)[Ssp]. | CUGUGCUGUA | |
| | [fl2r](G)[Ssp].m(C)[Ssp].[fl2r](U)[n001R].m(G)[Ssp | ACACAAGUAG | |
| | ].[fl2r](U)[Ssp].[fl2r](A)[Ssp].[fl2r](A)p.m(C)p.[ | A | |
| | fl2r](A)p.m(C)p.[fl2r](A)[n001R].m(A)p.[fl2r](G)p. | | |
| | m(U)p.[fl2r](A)p.m(G)[Ssp].m(A)}$$$$V2.0 | | |
| SSR-0106211 | RNA1{m(C)[Ssp].m(U)[Ssp].[fl2r](G)[Ssp].m(U)[Ssp]. | CUGUGCUGUA | |
| | [fl2r](G)[Ssp].m(C)[Ssp].[fl2r](U)[n001R].m(G)[Ssp | ACACAAGUAG | |
| | ].[fl2r](U)[Ssp].[fl2r](A)[Ssp].[fl2r](A)p.m(C)[Ss | A | |
| | p].[fl2r](A)[Ssp].m(C)[Ssp].[fl2r](A)[n001R].m(A)[ | | |
| | Ssp].[fl2r](G)[Ssp].m(U)[Ssp].[fl2r](A)[Ssp].m(G)[ | | |
| | Ssp].m(A)}$$$$V2.0 | | |
| SSR-0106212 | RNA1{m(C)[Ssp].m(U)[Ssp].[fl2r](G)[Ssp].m(U)[Ssp]. | CUGUGCUGUA | |
| | [fl2r](G)[Ssp].m(C)[Ssp].[fl2r](U)[n001R].m(G)[Ssp | ACACAAGUAG | |
| | ].[fl2r](U)[Ssp].[fl2r](A)[Ssp].[fl2r](A)[Ssp].m(C | A | |
| | )[Ssp].[fl2r](A)[Ssp].m(C)[Ssp].[fl2r](A)[n001R].m | | |
| | (A)[Ssp].[fl2r](G)[Ssp].m(U)[Ssp].[fl2r](A)[Ssp].m | | |
| | (G)[Ssp].m(A)}$$$$V2.0 | | |
| SSR-0106213 | RNA1{m(C)[Ssp].m(U)p.m(G)p.m(U)p.m(G)p.m(C)p.[fl2r | CUGUGCUGUA | |
| | ](U)[n001R].m(G)p.[fl2r](U)p.[fl2r](A)p.[fl2r](A)p | ACACAAGUAG | |
| | .m(C)p.m(A)p.m(C)p.m(A)[n001R].m(A)p.m(G)p.m(U)p.m | A | |
| | (A)p.m(G)[Ssp].m(A)}$$$$V2.0 | | |
| SSR-0106214 | RNA1{m(C)[Ssp].m(U)p.m(G)p.m(U)p.m(G)p.m(C)p.[fl2r | CUGUGCUGUA | |
| | ](U)[n001R].m(G)p.[fl2r](U)p.[fl2r](A)p.[fl2r](A)p | ACACAAGUAG | |
| | .m(C)p.m(A)p.m(C)p.m(A)[n001R].m(A)[Ssp].m(G)[Ssp] | A | |
| | .m(U)[Ssp].m(A)[Ssp].m(G)[Ssp].m(A)}$$$$V2.0 | | |
| SSR-0106215 | RNA1{m(C)[Ssp].m(U)[Ssp].m(G)[Ssp].m(U)[Ssp].m(G)[ | CUGUGCUGUA | |
| | Ssp].m(C)[Ssp].[fl2r](U)[n001R].m(G)p.[fl2r](U)p.[ | ACACAAGUAG | |
| | fl2r](A)p.[fl2r](A)p.m(C)p.m(A)p.m(C)p.m(A)[n001R] | A | |
| | .m(A)p.m(G)p.m(U)p.m(A)p.m(G)[Ssp].m(A)}$$$$V2.0 | | |
| SSR-0106216 | RNA1{m(C)[Ssp].m(U)p.m(G)p.m(U)p.m(G)p.m(C)p.[fl2r | CUGUGCUGUA | |
| | ](U)[n001R].m(G)p.[fl2r](U)p.[fl2r](A)p.[fl2r](A)p | ACACAAGUAG | |
| | .m(C)[Ssp].m(A)[Ssp].m(C)[Ssp].m(A)[n001R].m(A)[Ss | A | |
| | p].m(G)[Ssp].m(U)[Ssp].m(A)[Ssp].m(G)[Ssp].m(A)}$$ | | |
| | $$V2.0 | | |
| SSR-0106217 | RNA1{m(C)[Ssp].m(U)[Ssp].m(G)[Ssp].m(U)[Ssp].m(G)[ | CUGUGCUGUA | |
| | Ssp].m(C)[Ssp].[fl2r](U)[n001R].m(G)[Ssp].[fl2r](U | ACACAAGUAG | |
| | )[Ssp].[fl2r](A)[Ssp].[fl2r](A)p.m(C)p.m(A)p.m(C)p | A | |
| | .m(A)[n001R].m(A)p.m(G)p.m(U)p.m(A)p.m(G)[Ssp].m(A | | |
| | )}$$$$V2.0 | | |
| SSR-0106218 | RNA1{m(C)[Ssp].m(U)[Ssp].m(G)[Ssp].m(U)[Ssp].m(G)[ | CUGUGCUGUA | |
| | Ssp].m(C)[Ssp].[fl2r](U)[n001R].m(G)[Ssp].[fl2r](U | ACACAAGUAG | |
| | )[Ssp].[fl2r](A)[Ssp].[fl2r](A)p.m(C)[Ssp].m(A)[Ss | A | |
| | p].m(C)[Ssp].m(A)[n001R].m(A)[Ssp].m(G)[Ssp].m(U)[ | | |
| | Ssp].m(A)[Ssp].m(G)[Ssp].m(A)}$$$$V2.0 | | |
| SSR-0106219 | RNA1{m(C)[Ssp].m(U)[Ssp].m(G)[Ssp].m(U)[Ssp].m(G)[ | CUGUGCUGUA | |
| | Ssp].m(C)[Ssp].[fl2r](U)[n001R].m(G)[Ssp].[fl2r](U | ACACAAGUAG | |
| | )[Ssp].[fl2r](A)[Ssp].[fl2r](A)[Ssp].m(C)[Ssp].m(A | A | |
| | )[Ssp].m(C)[Ssp].m(A)[n001R].m(A)[Ssp].m(G)[Ssp].m | | |
| | (U)[Ssp].m(A)[Ssp].m(G)[Ssp].m(A)}$$$$V2.0 | | |
| SSR-0106220 | RNA1{p.[Rm5d5m](U)[Ssp].[fl2r](C)[Rsp].m(U)[n001S] | UCUACUUGUG | |
| | .[fl2r](A)p.m(C)p.[fl2r](U)p.m(U)[n001S].[fl2r](G) | UUACAGCACA | |
| | p.m(U)p.[fl2r](G)p.m(U)p.m(U)p.m(A)[Ssp].[fl2r](C) | GUU | |
| | [Ssp].m(A)[Ssp].[fl2r](G)[Ssp].m(C)[Ssp].[fl2r](A) | | |
| | [n001S].m(C)[Ssp].[fl2r](A)[Ssp].m(G)[Ssp].m(U)[Ss | | |
| | p].m(U)}$$$$V2.0 | | |
| SSR-0106221 | RNA1{p.[Rm5d5m](U)[Ssp].[fl2r](C)[Rsp].m(U)[n001S] | UCUACUUGUG | |
| | .[fl2r](A)p.m(C)p.[fl2r](U)p.m(U)[n001S].[fl2r](G) | UUACAGCACA | |
| | p.m(U)p.[fl2r](G)p.m(U)p.m(U)p.m(A)[Ssp].[fl2r](C) | GUU | |
| | [Ssp].m(A)[Ssp].[fl2r](G)[Ssp].m(C)[Ssp].[fl2r](A) | | |
| | [Ssp].m(C)[Ssp].[fl2r](A)[Ssp].m(G)[Ssp].m(U)[Ssp] | | |
| | .m(U)}$$$$V2.0 | | |
| SSR-0106222 | RNA1{p.[Rm5d5m](U)[Rsp].[fl2r](C)[Rsp].m(U)[n001S] | UCUACUUGUG | |
| | .[fl2r](A)p.m(C)p.[fl2r](U)p.m(U)[n001S].[fl2r](G) | UUACAGCACA | |
| | p.m(U)p.[fl2r](G)p.m(U)p.m(U)p.m(A)[Ssp].[fl2r](C) | GUU | |
| | [Ssp].m(A)[Ssp].[fl2r](G)[Ssp].m(C)[Ssp].[fl2r](A) | | |
| | [n001S].m(C)[Ssp].[fl2r](A)[Ssp].m(G)[Ssp].m(U)[Ss | | |
| | p].m(U)}$$$$V2.0 | | |
| SSR-0106223 | RNA1{p.[Rm5d5m](U)[Rsp].[fl2r](C)[Rsp].m(U)[n001S] | UCUACUUGUG | |
| | .[fl2r](A)p.m(C)p.[fl2r](U)p.m(U)[n001S].[fl2r](G) | UUACAGCACA | |
| | p.m(U)p.[fl2r](G)p.m(U)p.m(U)p.m(A)[Ssp].[fl2r](C) | GUU | |
| | [Ssp].m(A)[Ssp].[fl2r](G)[Ssp].m(C)[Ssp].[fl2r](A) | | |
| | [Ssp].m(C)[Ssp].[fl2r](A)[Ssp].m(G)[Ssp].m(U)[Ssp] | | |
| | .m(U)}$$$$V2.0 | | |
| SSR-0106224 | RNA1{p.[Rm5d5m](U)[Ssp].[fl2r](C)[Ssp].m(U)[n001S] | UCUACUUGUG | |
| | .[fl2r](A)p.m(C)p.[fl2r](U)p.m(U)[n001S].[fl2r](G) | UUACAGCACA | |
| | p.m(U)p.[fl2r](G)p.m(U)p.m(U)p.m(A)[Ssp].[fl2r](C) | GUU | |
| | [Ssp].m(A)[Ssp].[fl2r](G)[Ssp].m(C)[Ssp].[fl2r](A) | | |
| | [n001S].m(C)[Ssp].[fl2r](A)[Ssp].m(G)[Ssp].m(U)[Ss | | |
| | p].m(U)}$$$$V2.0 | | |
| SSR-0106225 | RNA1{p.[Rm5d5m](U)[Ssp].[fl2r](C)[Ssp].m(U)[n001S] | UCUACUUGUG | |
| | .[fl2r](A)p.m(C)p.[fl2r](U)p.m(U)[n001S].[fl2r](G) | UUACAGCACA | |
| | p.m(U)p.[fl2r](G)p.m(U)p.m(U)p.m(A)[Ssp].[fl2r](C) | GUU | |
| | [Ssp].m(A)[Ssp].[fl2r](G)[Ssp].m(C)[Ssp].[fl2r](A) | | |
| | [Ssp].m(C)[Ssp].[fl2r](A)[Ssp].m(G)[Ssp].m(U)[Ssp] | | |
| | .m(U)}$$$$V2.0 | | |
| SSR-0106266 | RNA1{m(U)[Ssp].[fl2r](U)[Rsp].m(A)[n001S].[fl2r](U | UUAUAGAGCA | |
| | )p.m(A)p.[fl2r](G)p.m(A)p.m(G)p.m(C)p.m(A)[n001S]. | AGAACACUGU | |
| | [fl2r](A)p.m(G)[n001S].m(A)[n001S].[fl2r](A)p.m(C) | UUU | |
| | p.[fl2r](A)p.m(C)p.m(U)p.m(G)p.m(U)p.m(U)[Ssp].m(U | | |
| | )[Ssp].m(U)}$$$$V2.0 | | |
| SSR-0106267 | RNA1{m(U)[Ssp].[fl2r](U)[Rsp].m(A)[n001S].[fl2r](U | UUAUAGAGCA | |
| | )p.m(A)p.[fl2r](G)p.m(A)p.m(G)p.m(C)p.m(A)[n001S]. | AGAACACUGU | |
| | [fl2r](A)p.m(G)p.m(A)[n001S].[fl2r](A)[n001S].m(C) | UUU | |
| | p.[fl2r](A)p.m(C)p.m(U)p.m(G)p.m(U)p.m(U)[Ssp].m(U | | |
| | )[Ssp].m(U)}$$$$V2.0 | | |
| SSR-0106268 | RNA1{m(U)[Ssp].[fl2r](U)[Rsp].m(A)[n001S].[fl2r](U | UUAUAGAGCA | |
| | )p.m(A)p.[fl2r](G)p.m(A)p.m(G)p.m(C)p.m(A)[n001S]. | AGAACACUGU | |
| | [fl2r](A)p.m(G)p.m(A)p.[fl2r](A)[n001S].m(C)[n001S | UUU | |
| | ].[fl2r](A)p.m(C)p.m(U)p.m(G)p.m(U)p.m(U)[Ssp].m(U | | |
| | )[Ssp].m(U)}$$$$V2.0 | | |
| SSR-0106269 | RNA1{m(U)[Ssp].[fl2r](U)[Rsp].m(A)[n001S].[fl2r](U | UUAUAGAGCA | |
| | )p.m(A)p.[fl2r](G)p.m(A)p.m(G)p.m(C)p.m(A)[n001S]. | AGAACACUGU | |
| | [fl2r](A)p.m(G)p.m(A)p.[fl2r](A)p.m(C)[n001S].[fl2 | UUU | |
| | r](A)[n001S].m(C)p.m(U)p.m(G)p.m(U)p.m(U)[Ssp].m(U | | |
| | )[Ssp].m(U)}$$$$V2.0 | | |
| SSR-0106270 | RNA1{m(U)[Ssp].[fl2r](U)[Rsp].m(A)[n001S].[fl2r](U | UUAUAGAGCA | |
| | )p.m(A)p.[fl2r](G)p.m(A)p.m(G)p.m(C)p.m(A)[n001S]. | AGAACACUGU | |
| | [fl2r](A)p.m(G)p.m(A)p.[fl2r](A)p.m(C)p.[fl2r](A)[ | UUU | |
| | n001S].m(C)[n001S].m(U)p.m(G)p.m(U)p.m(U)[Ssp].m(U | | |
| | )[Ssp].m(U)}$$$$V2.0 | | |
| SSR-0106271 | RNA1{m(U)[Ssp].[fl2r](U)[Rsp].m(A)[n001S].[fl2r](U | UUAUAGAGCA | |
| | )p.m(A)p.[fl2r](G)p.m(A)p.m(G)p.m(C)p.m(A)[n001S]. | AGAACACUGU | |
| | [fl2r](A)p.m(G)p.m(A)p.[fl2r](A)p.m(C)p.[fl2r](A)p | UUU | |
| | .m(C)[n001S].m(U)[n001S].m(G)p.m(U)p.m(U)[Ssp].m(U | | |
| | )[Ssp].m(U)}$$$$V2.0 | | |
| SSR-0106272 | RNA1{m(U)[Ssp].[fl2r](U)[Rsp].m(A)[n001S].[fl2r](U | UUAUAGAGCA | |
| | )p.m(A)p.[fl2r](G)p.m(A)p.m(G)p.m(C)p.m(A)[n001S]. | AGAACACUGU | |
| | [fl2r](A)p.m(G)p.m(A)p.[fl2r](A)p.m(C)p.[fl2r](A)p | UUU | |
| | .m(C)p.m(U)[n001S].m(G)[n001S].m(U)p.m(U)[Ssp].m(U | | |
| | )[Ssp].m(U)}$$$$V2.0 | | |
| SSR-0106273 | RNA1{m(U)[Ssp].[fl2r](U)[Rsp].m(A)[n001S].[fl2r](U | UUAUAGAGCA | |
| | )p.m(A)p.[fl2r](G)p.m(A)p.m(G)p.m(C)p.m(A)[n001S]. | AGAACACUGU | |
| | [fl2r](A)p.m(G)p.m(A)p.[fl2r](A)p.m(C)p.[fl2r](A)p | UUU | |
| | .m(C)p.m(U)p.m(G)[n001S].m(U)[n001S].m(U)[Ssp].m(U | | |
| | )[Ssp].m(U)}$$$$V2.0 | | |
| SSR-0106274 | RNA1{m(U)[Ssp].[fl2r](U)[Rsp].m(A)[n001S].[fl2r](U | UUAUAGAGCA | |
| | )p.m(A)p.[fl2r](G)p.m(A)p.m(G)p.m(C)p.m(A)[n001S]. | AGAACACUGU | |
| | [fl2r](A)p.m(G)[n001S].m(A)[n001S].[fl2r](A)[n001S | UUU | |
| | ].m(C)p.[fl2r](A)p.m(C)p.m(U)p.m(G)p.m(U)p.m(U)[Ss | | |
| | p].m(U)[Ssp].m(U)}$$$$V2.0 | | |
| SSR-0106275 | RNA1{m(U)[Ssp].[fl2r](U)[Rsp].m(A)[n001S].[fl2r](U | UUAUAGAGCA | |
| | )p.m(A)p.[fl2r](G)p.m(A)p.m(G)p.m(C)p.m(A)[n001S]. | AGAACACUGU | |
| | [fl2r](A)p.m(G)p.m(A)[n001S].[fl2r](A)[n001S].m(C) | UUU | |
| | [n001S].[fl2r](A)p.m(C)p.m(U)p.m(G)p.m(U)p.m(U)[Ss | | |
| | p].m(U)[Ssp].m(U)}$$$$V2.0 | | |
| SSR-0106276 | RNA1{m(U)[Ssp].[fl2r](U)[Rsp].m(A)[n001S].[fl2r](U | UUAUAGAGCA | |
| | )p.m(A)p.[fl2r](G)p.m(A)p.m(G)p.m(C)p.m(A)[n001S]. | AGAACACUGU | |
| | [fl2r](A)p.m(G)p.m(A)p.[fl2r](A)[n001S].m(C)[n001S | UUU | |
| | ].[fl2r](A)[n001S].m(C)p.m(U)p.m(G)p.m(U)p.m(U)[Ss | | |
| | p].m(U)[Ssp].m(U)}$$$$V2.0 | | |
| SSR-0106277 | RNA1{m(U)[Ssp].[fl2r](U)[Rsp].m(A)[n001S].[fl2r](U | UUAUAGAGCA | |
| | )p.m(A)p.[fl2r](G)p.m(A)p.m(G)p.m(C)p.m(A)[n001S]. | AGAACACUGU | |
| | [fl2r](A)p.m(G)p.m(A)p.[fl2r](A)p.m(C)[n001S].[fl2 | UUU | |
| | r](A)[n001S].m(C)[n001S].m(U)p.m(G)p.m(U)p.m(U)[Ss | | |
| | p].m(U)[Ssp].m(U)}$$$$V2.0 | | |
| SSR-0106278 | RNA1{m(U)[Ssp].[fl2r](U)[Rsp].m(A)[n001S].[fl2r](U | UUAUAGAGCA | |
| | )p.m(A)p.[fl2r](G)p.m(A)p.m(G)p.m(C)p.m(A)[n001S]. | AGAACACUGU | |
| | [fl2r](A)p.m(G)p.m(A)p.[fl2r](A)p.m(C)p.[fl2r](A)[ | UUU | |
| | n001S].m(C)[n001S].m(U)[n001S].m(G)p.m(U)p.m(U)[Ss | | |
| | p].m(U)[Ssp].m(U)}$$$$V2.0 | | |
| SSR-0106279 | RNA1{m(U)[Ssp].[fl2r](U)[Rsp].m(A)[n001S].[fl2r](U | UUAUAGAGCA | |
| | )p.m(A)p.[fl2r](G)p.m(A)p.m(G)p.m(C)p.m(A)[n001S]. | AGAACACUGU | |
| | [fl2r](A)p.m(G)p.m(A)p.[fl2r](A)p.m(C)p.[fl2r](A)p | UUU | |
| | .m(C)[n001S].m(U)[n001S].m(G)[n001S].m(U)p.m(U)[Ss | | |
| | p].m(U)[Ssp].m(U)}$$$$V2.0 | | |
| SSR-0106280 | RNA1{m(U)[Ssp].[fl2r](U)[Rsp].m(A)[n001S].[fl2r](U | UUAUAGAGCA | |
| | )p.m(A)p.[fl2r](G)p.m(A)p.m(G)p.m(C)p.m(A)[n001S]. | AGAACACUGU | |
| | [fl2r](A)p.m(G)p.m(A)p.[fl2r](A)p.m(C)p.[fl2r](A)p | UUU | |
| | .m(C)p.m(U)[n001S].m(G)[n001S].m(U)[n001S].m(U)[Ss | | |
| | p].m(U)[Ssp].m(U)}$$$$V2.0 | | |
| SSR-0106281 | RNA1{m(U)[Ssp].[fl2r](U)[Rsp].m(A)[n001S].[fl2r](U | UUAUAGAGCA | |
| | )p.m(A)p.[fl2r](G)p.m(A)p.m(G)p.m(C)p.m(A)[n001S]. | AGAACACUGU | |
| | [fl2r](A)p.m(G)[n001S].m(A)[n001S].[fl2r](A)[n001S | UUU | |
| | ].m(C)[n001S].[fl2r](A)p.m(C)p.m(U)p.m(G)p.m(U)p.m | | |
| | (U)[Ssp].m(U)[Ssp].m(U)}$$$$V2.0 | | |
| SSR-0106282 | RNA1{m(U)[Ssp].[fl2r](U)[Rsp].m(A)[n001S].[fl2r](U | UUAUAGAGCA | |
| | )p.m(A)p.[fl2r](G)p.m(A)p.m(G)p.m(C)p.m(A)[n001S]. | AGAACACUGU | |
| | [fl2r](A)p.m(G)p.m(A)[n001S].[fl2r](A)[n001S].m(C) | UUU | |
| | [n001S].[fl2r](A)[n001S].m(C)p.m(U)p.m(G)p.m(U)p.m | | |
| | (U)[Ssp].m(U)[Ssp].m(U)}$$$$V2.0 | | |
| SSR-0106283 | RNA1{m(U)[Ssp].[fl2r](U)[Rsp].m(A)[n001S].[fl2r](U | UUAUAGAGCA | |
| | )p.m(A)p.[fl2r](G)p.m(A)p.m(G)p.m(C)p.m(A)[n001S]. | AGAACACUGU | |
| | [fl2r](A)p.m(G)p.m(A)p.[fl2r](A)[n001S].m(C)[n001S | UUU | |
| | ].[fl2r](A)[n001S].m(C)[n001S].m(U)p.m(G)p.m(U)p.m | | |
| | (U)[Ssp].m(U)[Ssp].m(U)}$$$$V2.0 | | |
| SSR-0106284 | RNA1{m(U)[Ssp].[fl2r](U)[Rsp].m(A)[n001S].[fl2r](U | UUAUAGAGCA | |
| | )p.m(A)p.[fl2r](G)p.m(A)p.m(G)p.m(C)p.m(A)[n001S]. | AGAACACUGU | |
| | [fl2r](A)p.m(G)p.m(A)p.[fl2r](A)p.m(C)[n001S].[fl2 | UUU | |
| | r](A)[n001S].m(C)[n001S].m(U)[n001S].m(G)p.m(U)p.m | | |
| | (U)[Ssp].m(U)[Ssp].m(U)}$$$$V2.0 | | |
| SSR-0106285 | RNA1{m(U)[Ssp].[fl2r](U)[Rsp].m(A)[n001S].[fl2r](U | UUAUAGAGCA | |
| | )p.m(A)p.[fl2r](G)p.m(A)p.m(G)p.m(C)p.m(A)[n001S]. | AGAACACUGU | |
| | [fl2r](A)p.m(G)p.m(A)p.[fl2r](A)p.m(C)p.[fl2r](A)[ | UUU | |
| | n001S].m(C)[n001S].m(U)[n001S].m(G)[n001S].m(U)p.m | | |
| | (U)[Ssp].m(U)[Ssp].m(U)}$$$$V2.0 | | |
| SSR-0106286 | RNA1{m(U)[Ssp].[fl2r](U)[Rsp].m(A)[n001S].[fl2r](U | UUAUAGAGCA | |
| | )p.m(A)p.[fl2r](G)p.m(A)p.m(G)p.m(C)p.m(A)[n001S]. | AGAACACUGU | |
| | [fl2r](A)p.m(G)p.m(A)p.[fl2r](A)p.m(C)p.[fl2r](A)p | UUU | |
| | .m(C)[n001S].m(U)[n001S].m(G)[n001S].m(U)[n001S].m | | |
| | (U)[Ssp].m(U)[Ssp].m(U)}$$$$V2.0 | | |
| SSR-0106287 | RNA1{m(U)[Ssp].[fl2r](U)[Rsp].m(A)[n001S].[fl2r](U | UUAUAGAGCA | |
| | )p.m(A)p.[fl2r](G)p.m(A)p.m(G)p.m(C)p.m(A)[n001S]. | AGAACACUGU | |
| | [fl2r](A)p.m(G)[n001S].m(A)p.[fl2r](A)[n001S].m(C) | UUU | |
| | p.[fl2r](A)[n001S].m(C)p.m(U)[n001S].m(G)p.m(U)[n0 | | |
| | 01S].m(U)[Ssp].m(U)[Ssp].m(U)}$$$$V2.0 | | |
| SSR-0106288 | RNA1{m(U)[Ssp].[fl2r](U)[Rsp].m(A)[n001S].[fl2r](U | UUAUAGAGCA | |
| | )p.m(A)p.[fl2r](G)p.m(A)p.m(G)p.m(C)p.m(A)[n001S]. | AGAACACUGU | |
| | [fl2r](A)p.m(G)p.m(A)[n001S].[fl2r](A)p.m(C)[n001S | UUU | |
| | ].[fl2r](A)p.m(C)[n001S].m(U)p.m(G)[n001S].m(U)p.m | | |
| | (U)[Ssp].m(U)[Ssp].m(U)}$$$$V2.0 | | |
| SSR-0106289 | RNA1{m(U)[Ssp].[fl2r](U)[Rsp].m(A)[n001S].[fl2r](U | UUAUAGAGCA | |
| | )p.m(A)p.[fl2r](G)p.m(A)p.m(G)p.m(C)p.m(A)[n001S]. | AGAACACUGU | |
| | [fl2r](A)p.m(G)[n001S].[fl2r](A)p.[fl2r](A)[n001S] | UUU | |
| | .[fl2r](C)p.[fl2r](A)[n001S].[fl2r](C)p.m(U)[n001S | | |
| | ].[fl2r](G)p.m(U)[n001S].[fl2r](U)[Ssp].m(U)[Ssp]. | | |
| | m(U)}$$$$V2.0 | | |
| SSR-0106290 | RNA1{m(U)[Ssp].[fl2r](U)[Rsp].m(A)[n001S].[fl2r](U | UUAUAGAGCA | |
| | )p.m(A)p.[fl2r](G)p.m(A)p.m(G)p.m(C)p.m(A)[n001S]. | AGAACACUGU | |
| | [fl2r](A)p.m(G)p.m(A)[n001S].[fl2r](A)p.m(C)[n001S | UUU | |
| | ].[fl2r](A)p.m(C)[n001S].[fl2r](U)p.m(G)[n001S].[f | | |
| | l2r](U)p.m(U)[Ssp].m(U)[Ssp].m(U)}$$$$V2.0 | | |
| SSR-0106291 | RNA1{m(U)[Ssp].[fl2r](U)[Rsp].m(A)[n001S].[fl2r](U | UUAUAGAGCA | |
| | )p.m(A)p.[fl2r](G)p.m(A)p.m(G)p.m(C)p.m(A)[n001S]. | AGAACACUGU | |
| | [fl2r](A)p.m(G)p.m(A)[n001S].[fl2r](A)[n001S].m(C) | UUU | |
| | p.[fl2r](A)p.m(C)[n001S].m(U)[n001S].m(G)p.m(U)p.m | | |
| | (U)[Ssp].m(U)[Ssp].m(U)}$$$$V2.0 | | |
| SSR-0106292 | RNA1{m(U)[Ssp].[fl2r](U)[Rsp].m(A)[n001S].[fl2r](U | UUAUAGAGCA | |
| | )p.m(A)p.[fl2r](G)p.m(A)p.m(G)p.m(C)p.m(A)[n001S]. | AGAACACUGU | |
| | [fl2r](A)p.m(G)p.m(A)p.[fl2r](A)[n001S].m(C)[n001S | UUU | |
| | ].[fl2r](A)p.m(C)p.m(U)[n001S].m(G)[n001S].m(U)p.m | | |
| | (U)[Ssp].m(U)[Ssp].m(U)}$$$$V2.0 | | |
| SSR-0106293 | RNA1{m(U)[Ssp].[fl2r](U)[Rsp].m(A)[n001S].[fl2r](U | UUAUAGAGCA | |
| | )p.m(A)p.[fl2r](G)p.m(A)p.m(G)p.m(C)p.m(A)[n001S]. | AGAACACUGU | |
| | [fl2r](A)p.m(G)[n001S].m(A)p.[fl2r](A)p.m(C)p.[fl2 | UUU | |
| | r](A)p.m(C)p.m(U)p.m(G)p.m(U)p.m(U)[Ssp].m(U)[Ssp] | | |
| | .m(U)}$$$$V2.0 | | |
| SSR-0106294 | RNA1{m(U)[Ssp].[fl2r](U)[Rsp].m(A)[n001S].[fl2r](U | UUAUAGAGCA | |
| | )p.m(A)p.[fl2r](G)p.m(A)p.m(G)p.m(C)p.m(A)[n001S]. | AGAACACUGU | |
| | [fl2r](A)p.m(G)p.m(A)[n001S].[fl2r](A)p.m(C)p.[fl2 | UUU | |
| | r](A)p.m(C)p.m(U)p.m(G)p.m(U)p.m(U)[Ssp].m(U)[Ssp] | | |
| | .m(U)}$$$$V2.0 | | |
| SSR-0106295 | RNA1{m(U)[Ssp].[fl2r](U)[Rsp].m(A)[n001S].[fl2r](U | UUAUAGAGCA | |
| | )p.m(A)p.[fl2r](G)p.m(A)p.m(G)p.m(C)p.m(A)[n001S]. | AGAACACUGU | |
| | [fl2r](A)p.m(G)p.m(A)p.[fl2r](A)[n001S].m(C)p.[fl2 | UUU | |
| | r](A)p.m(C)p.m(U)p.m(G)p.m(U)p.m(U)[Ssp].m(U)[Ssp] | | |
| | .m(U)}$$$$V2.0 | | |
| SSR-0106296 | RNA1{m(U)[Ssp].[fl2r](U)[Rsp].m(A)[n001S].[fl2r](U | UUAUAGAGCA | |
| | )p.m(A)p.[fl2r](G)p.m(A)p.m(G)p.m(C)p.m(A)[n001S]. | AGAACACUGU | |
| | [fl2r](A)p.m(G)p.m(A)p.[fl2r](A)p.m(C)[n001S].[fl2 | UUU | |
| | r](A)p.m(C)p.m(U)p.m(G)p.m(U)p.m(U)[Ssp].m(U)[Ssp] | | |
| | .m(U)}$$$$V2.0 | | |
| SSR-0106297 | RNA1{m(U)[Ssp].[fl2r](U)[Rsp].m(A)[n001S].[fl2r](U | UUAUAGAGCA | |
| | )p.m(A)p.[fl2r](G)p.m(A)p.m(G)p.m(C)p.m(A)[n001S]. | AGAACACUGU | |
| | [fl2r](A)p.m(G)p.m(A)p.[fl2r](A)p.m(C)p.[fl2r](A)[ | UUU | |
| | n001S].m(C)p.m(U)p.m(G)p.m(U)p.m(U)[Ssp].m(U)[Ssp] | | |
| | .m(U)}$$$$V2.0 | | |
| SSR-0106298 | RNA1{m(U)[Ssp].[fl2r](U)[Rsp].m(A)[n001S].[fl2r](U | UUAUAGAGCA | |
| | )p.m(A)p.[fl2r](G)p.m(A)p.m(G)p.m(C)p.m(A)[n001S]. | AGAACACUGU | |
| | [fl2r](A)p.m(G)p.m(A)p.[fl2r](A)p.m(C)p.[fl2r](A)p | UUU | |
| | .m(C)[n001S].m(U)p.m(G)p.m(U)p.m(U)[Ssp].m(U)[Ssp] | | |
| | .m(U)}$$$$V2.0 | | |
| SSR-0106299 | RNA1{m(U)[Ssp].[fl2r](U)[Rsp].m(A)[n001S].[fl2r](U | UUAUAGAGCA | |
| | )p.m(A)p.[fl2r](G)p.m(A)p.m(G)p.m(C)p.m(A)[n001S]. | AGAACACUGU | |
| | [fl2r](A)p.m(G)p.m(A)p.[fl2r](A)p.m(C)p.[fl2r](A)p | UUU | |
| | .m(C)p.m(U)[n001S].m(G)p.m(U)p.m(U)[Ssp].m(U)[Ssp] | | |
| | .m(U)}$$$$V2.0 | | |
| SSR-0106300 | RNA1{m(U)[Ssp].[fl2r](U)[Rsp].m(A)[n001S].[fl2r](U | UUAUAGAGCA | |
| | )p.m(A)p.[fl2r](G)p.m(A)p.m(G)p.m(C)p.m(A)[n001S]. | AGAACACUGU | |
| | [fl2r](A)p.m(G)p.m(A)p.[fl2r](A)p.m(C)p.[fl2r](A)p | UUU | |
| | .m(C)p.m(U)p.m(G)[n001S].m(U)p.m(U)[Ssp].m(U)[Ssp] | | |
| | .m(U)}$$$$V2.0 | | |
| SSR-0106301 | RNA1{m(U)[Ssp].[fl2r](U)[Rsp].m(A)[n001S].[fl2r](U | UUAUAGAGCA | |
| | )p.m(A)p.[fl2r](G)p.m(A)p.m(G)p.m(C)p.m(A)[n001S]. | AGAACACUGU | |
| | [fl2r](A)p.m(G)p.m(A)p.[fl2r](A)p.m(C)p.[fl2r](A)p | UUU | |
| | .m(C)p.m(U)p.m(G)p.m(U)[n001S].m(U)[Ssp].m(U)[Ssp] | | |
| | .m(U)}$$$$V2.0 | | |
| SSR-0106302 | RNA1{m(U)[Ssp].[fl2r](U)[Rsp].m(A)[n001S].[fl2r](U | UUAUAGAGCA | |
| | )p.m(A)p.[fl2r](G)p.m(A)p.m(G)p.m(C)p.m(A)[n001S]. | AGAACACUGU | |
| | [fl2r](A)p.m(G)[n001S].[fl2r](A)p.[fl2r](A)p.m(C)p | UUU | |
| | .[fl2r](A)p.m(C)p.m(U)p.m(G)p.m(U)p.m(U)[Ssp].m(U) | | |
| | [Ssp].m(U)}$$$$V2.0 | | |
| SSR-0106303 | RNA1{m(U)[Ssp].[fl2r](U)[Rsp].m(A)[n001S].[fl2r](U | UUAUAGAGCA | |
| | )p.m(A)p.[fl2r](G)p.m(A)p.m(G)p.m(C)p.m(A)[n001S]. | AGAACACUGU | |
| | [fl2r](A)p.m(G)p.m(A)p.[fl2r](A)[n001S].[fl2r](C)p | UUU | |
| | .[fl2r](A)p.m(C)p.m(U)p.m(G)p.m(U)p.m(U)[Ssp].m(U) | | |
| | [Ssp].m(U)}$$$$V2.0 | | |
| SSR-0106304 | RNA1{m(U)[Ssp].[fl2r](U)[Rsp].m(A)[n001S].[fl2r](U | UUAUAGAGCA | |
| | )p.m(A)p.[fl2r](G)p.m(A)p.m(G)p.m(C)p.m(A)[n001S]. | AGAACACUGU | |
| | [fl2r](A)p.m(G)p.m(A)p.[fl2r](A)p.m(C)p.[fl2r](A)[ | UUU | |
| | n001S].[fl2r](C)p.m(U)p.m(G)p.m(U)p.m(U)[Ssp].m(U) | | |
| | [Ssp].m(U)}$$$$V2.0 | | |
| SSR-0106305 | RNA1{m(U)[Ssp].[fl2r](U)[Rsp].m(A)[n001S].[fl2r](U | UUAUAGAGCA | |
| | )p.m(A)p.[fl2r](G)p.m(A)p.m(G)p.m(C)p.m(A)[n001S]. | AGAACACUGU | |
| | [fl2r](A)p.m(G)p.m(A)p.[fl2r](A)p.m(C)p.[fl2r](A)p | UUU | |
| | .m(C)[n001S].[fl2r](U)p.m(G)p.m(U)p.m(U)[Ssp].m(U) | | |
| | [Ssp].m(U)}$$$$V2.0 | | |
| SSR-0106306 | RNA1{m(U)[Ssp].[fl2r](U)[Rsp].m(A)[n001S].[fl2r](U | UUAUAGAGCA | |
| | )p.m(A)p.[fl2r](G)p.m(A)p.m(G)p.m(C)p.m(A)[n001S]. | AGAACACUGU | |
| | [fl2r](A)p.m(G)p.m(A)p.[fl2r](A)p.m(C)p.[fl2r](A)p | UUU | |
| | .m(C)p.m(U)[n001S].[fl2r](G)p.m(U)p.m(U)[Ssp].m(U) | | |
| | [Ssp].m(U)}$$$$V2.0 | | |
| SSR-0106307 | RNA1{m(U)[Ssp].[fl2r](U)[Rsp].m(A)[n001S].[fl2r](U | UUAUAGAGCA | |
| | )p.m(A)p.[fl2r](G)p.m(A)p.m(G)p.m(C)p.m(A)[n001S]. | AGAACACUGU | |
| | [fl2r](A)p.m(G)p.m(A)p.[fl2r](A)p.m(C)p.[fl2r](A)p | UUU | |
| | .m(C)p.m(U)p.m(G)p.m(U)[n001S].[fl2r](U)[Ssp].m(U) | | |
| | [Ssp].m(U)}$$$$V2.0 | | |
| SSR-0106445 | RNA1{m(C)[sp].m(U)p.[fl2r](G)p.m(U)p.[fl2r](G)p.m( | CUGUGCUGUA | |
| | C)p.[fl2r](U)[n009R].m(G)p.[fl2r](U)p.[fl2r](A)p.[ | ACACAAGUAG | |
| | fl2r](A)p.m(C)p.[fl2r](A)p.m(C)p.[fl2r](A)p.m(A)p. | A | |
| | [fl2r](G)p.m(U)p.[fl2r](A)p.m(G)[sp].[fl2r](A)}$$$ | | |
| | $V2.0 | | |
| SSR-0106446 | RNA1{m(C)[sp].m(U)p.[fl2r](G)p.m(U)p.[fl2r](G)p.m( | CUGUGCUGUA | |
| | C)p.[fl2r](U)[n033R].m(G)p.[fl2r](U)p.[fl2r](A)p.[ | ACACAAGUAG | |
| | fl2r](A)p.m(C)p.[fl2r](A)p.m(C)p.[fl2r](A)p.m(A)p. | A | |
| | [fl2r](G)p.m(U)p.[fl2r](A)p.m(G)[sp].[fl2r](A)}$$$ | | |
| | $V2.0 | | |
| SSR-0106447 | RNA1{m(C)[Ssp].m(U)p.[fl2r](G)p.m(U)p.[fl2r](G)p.m | CUGUGCUGUA | |
| | (C)p.[fl2r](U)[n009R].m(G)p.[fl2r](U)p.[fl2r](A)p. | ACACAAGUAG | |
| | [fl2r](A)p.m(C)p.[fl2r](A)p.m(C)p.[fl2r](A)p.m(A)p | A | |
| | .[fl2r](G)p.m(U)p.[fl2r](A)p.m(G)[Ssp].[fl2r](A)}$ | | |
| | $$$V2.0 | | |
| SSR-0106448 | RNA1{m(C)[Ssp].m(U)p.[fl2r](G)p.m(U)p.[fl2r](G)p.m | CUGUGCUGUA | |
| | (C)p.[fl2r](U)[n033R].m(G)p.[fl2r](U)p.[fl2r](A)p. | ACACAAGUAG | |
| | [fl2r](A)p.m(C)p.[fl2r](A)p.m(C)p.[fl2r](A)p.m(A)p | A | |
| | .[fl2r](G)p.m(U)p.[fl2r](A)p.m(G)[Ssp].[fl2r](A)}$ | | |
| | $$$V2.0 | | |
| SSR-0106449 | RNA1{m(C)[Ssp].m(U)p.[fl2r](G)p.m(U)p.[fl2r](G)p.m | CUGUGCUGUA | |
| | (C)p.[fl2r](U)[n009R].m(G)p.[fl2r](U)p.[fl2r](A)p. | ACACAAGUAG | |
| | [fl2r](A)p.m(C)p.[fl2r](A)p.m(C)p.[fl2r](A)[n001R] | A | |
| | .m(A)p.[fl2r](G)p.m(U)p.[fl2r](A)p.m(G)[Ssp].[fl2r | | |
| | ](A)}$$$$V2.0 | | |
| SSR-0106450 | RNA1{m(C)[Ssp].m(U)p.[fl2r](G)p.m(U)p.[fl2r](G)p.m | CUGUGCUGUA | |
| | (C)p.[fl2r](U)[n033R].m(G)p.[fl2r](U)p.[fl2r](A)p. | ACACAAGUAG | |
| | [fl2r](A)p.m(C)p.[fl2r](A)p.m(C)p.[fl2r](A)[n001R] | A | |
| | .m(A)p.[fl2r](G)p.m(U)p.[fl2r](A)p.m(G)[Ssp].[fl2r | | |
| | ](A)}$$$$V2.0 | | |
| SSR-0106451 | RNA1{m(C)[Ssp].m(U)[Ssp].[fl2r](G)[Ssp].m(U)[Ssp]. | CUGUGCUGUA | |
| | [fl2r](G)[Ssp].m(C)[Ssp].[fl2r](U)[n009R].m(G)p.[f | ACACAAGUAG | |
| | l2r](U)p.[fl2r](A)p.[fl2r](A)p.m(C)p.[fl2r](A)p.m( | A | |
| | C)p.[fl2r](A)[n001R].m(A)[Ssp].[fl2r](G)[Ssp].m(U) | | |
| | [Ssp].[fl2r](A)[Ssp].m(G)[Ssp].m(A)}$$$$V2.0 | | |
| SSR-0106452 | RNA1{m(C)[Ssp].m(U)[Ssp].[fl2r](G)[Ssp].m(U)[Ssp]. | CUGUGCUGUA | |
| | [fl2r](G)[Ssp].m(C)[Ssp].[fl2r](U)[n033R].m(G)p.[f | ACACAAGUAG | |
| | l2r](U)p.[fl2r](A)p.[fl2r](A)p.m(C)p.[fl2r](A)p.m( | A | |
| | C)p.[fl2r](A)[n001R].m(A)[Ssp].[fl2r](G)[Ssp].m(U) | | |
| | [Ssp].[fl2r](A)[Ssp].m(G)[Ssp].m(A)}$$$$V2.0 | | |
| SSR-0106479 | RNA1{p.[Rm5d5m](U)[Rsp].[fl2r](C)[Ssp].m(U)[n065S] | UCUACUUGUG | |
| | .[fl2r](A)p.m(C)p.[fl2r](U)p.m(U)[n065S].[fl2r](G) | UUACAGCACA | |
| | p.m(U)p.[fl2r](G)p.m(U)p.m(U)p.m(A)[Ssp].[fl2r](C) | GUU | |
| | [Ssp].m(A)[Ssp].[fl2r](G)[Ssp].m(C)[Ssp].[fl2r](A) | | |
| | [n065S].m(C)[Ssp].[fl2r](A)[Ssp].m(G)[Ssp].m(U)[Ss | | |
| | p].m(U)}$$$$V2.0 | | |
| SSR-0106480 | RNA1{p.[Rm5d5m](U)[Rsp].[fl2r](C)[Ssp].m(U)[n070S] | UCUACUUGUG | |
| | .[fl2r](A)p.m(C)p.[fl2r](U)p.m(U)[n070S].[fl2r](G) | UUACAGCACA | |
| | p.m(U)p.[fl2r](G)p.m(U)p.m(U)p.m(A)[Ssp].[fl2r](C) | GUU | |
| | [Ssp].m(A)[Ssp].[fl2r](G)[Ssp].m(C)[Ssp].[fl2r](A) | | |
| | [n070S].m(C)[Ssp].[fl2r](A)[Ssp].m(G)[Ssp].m(U)[Ss | | |
| | p].m(U)}$$$$V2.0 | | |
| SSR-0106481 | RNA1{p.[Rm5d5m](U)[Rsp].[fl2r](C)[Ssp].m(U)[n071S] | UCUACUUGUG | |
| | .[fl2r](A)p.m(C)p.[fl2r](U)p.m(U)[n071S].[fl2r](G) | UUACAGCACA | |
| | p.m(U)p.[fl2r](G)p.m(U)p.m(U)p.m(A)[Ssp].[fl2r](C) | GUU | |
| | [Ssp].m(A)[Ssp].[fl2r](G)[Ssp].m(C)[Ssp].[fl2r](A) | | |
| | [n071S].m(C)[Ssp].[fl2r](A)[Ssp].m(G)[Ssp].m(U)[Ss | | |
| | p].m(U)}$$$$V2.0 | | |
| SSR-0106482 | RNA1{m(U)[Rsp].[fl2r](C)[Ssp].m(U)[n065S].[fl2r](A | UCUACUUGUG | |
| | )p.m(C)p.[fl2r](U)p.m(U)[n065S].[fl2r](G)p.m(U)p.[ | UUACAGCACA | |
| | fl2r](G)p.m(U)p.m(U)p.m(A)[Ssp].[fl2r](C)[Ssp].m(A | GUU | |
| | )[Ssp].[fl2r](G)[Ssp].m(C)[Ssp].[fl2r](A)[n065S].m | | |
| | (C)[Ssp].[fl2r](A)[Ssp].m(G)[Ssp].m(U)[Ssp].m(U)}$ | | |
| | $$$V2.0 | | |
| SSR-0106483 | RNA1{m(U)[Rsp].[fl2r](C)[Ssp].m(U)[n070S].[fl2r](A | UCUACUUGUG | |
| | )p.m(C)p.[fl2r](U)p.m(U)[n070S].[fl2r](G)p.m(U)p.[ | UUACAGCACA | |
| | fl2r](G)p.m(U)p.m(U)p.m(A)[Ssp].[fl2r](C)[Ssp].m(A | GUU | |
| | )[Ssp].[fl2r](G)[Ssp].m(C)[Ssp].[fl2r](A)[n070S].m | | |
| | (C)[Ssp].[fl2r](A)[Ssp].m(G)[Ssp].m(U)[Ssp].m(U)}$ | | |
| | $$$V2.0 | | |
| SSR-0106484 | RNA1{m(U)[Rsp].[fl2r](C)[Ssp].m(U)[n071S].[fl2r](A | UCUACUUGUG | |
| | )p.m(C)p.[fl2r](U)p.m(U)[n071S].[fl2r](G)p.m(U)p.[ | UUACAGCACA | |
| | fl2r](G)p.m(U)p.m(U)p.m(A)[Ssp].[fl2r](C)[Ssp].m(A | GUU | |
| | )[Ssp].[fl2r](G)[Ssp].m(C)[Ssp].[fl2r](A)[n071S].m | | |
| | (C)[Ssp].[fl2r](A)[Ssp].m(G)[Ssp].m(U)[Ssp].m(U)}$ | | |
| | $$$V2.0 | | |
| SSR-0106487 | RNA1{m(C)[Ssp].m(U)p.[fl2r](G)p.m(U)p.[fl2r](G)p.m | CUGUGCUGUA | |
| | (C)p.[fl2r](U)[n069R].m(G)p.[fl2r](U)p.[fl2r](A)p. | ACACAAGUAG | |
| | [fl2r](A)p.m(C)p.[fl2r](A)p.m(C)p.[fl2r](A)[n069R] | A | |
| | .m(A)p.[fl2r](G)p.m(U)p.[fl2r](A)p.m(G)[Ssp].[fl2r | | |
| | ](A)}$$$$V2.0 | | |
| SSR-0106517 | RNA1{[vped5m](U)[Ssp].[fl2r](C)[Ssp].m(U)[n001S].[ | UCUACUUGUG | |
| | fl2r](A)p.m(C)p.[fl2r](U)p.m(U)[n001S].[fl2r](G)p. | UUACAGCACA | |
| | m(U)p.[fl2r](G)p.m(U)p.m(U)p.m(A)[Ssp].[fl2r](C)[S | GUU | |
| | sp].m(A)[Ssp].[fl2r](G)[Ssp].m(C)[Ssp].[fl2r](A)[n | | |
| | 001S].m(C)[Ssp].[fl2r](A)[Ssp].m(G)[Ssp].m(U)[Ssp] | | |
| | .m(U)}$$$$V2.0 | | |
| SSR-0106564 | RNA1{p.m(C)[Ssp].m(U)p.[fl2r](G)p.m(U)p.[f]2r](G)p | CUGUGCUGUA | |
| | .m(C)p.[fl2r](U)[n001R].m(G)p.[fl2r](U)p.[fl2r](A) | ACACAAGUAG | |
| | p.[fl2r](A)p.m(C)p.[fl2r](A)p.m(C)p.[fl2r](A)[n001 | A | |
| | R].m(A)p.[f]2r](G)p.m(U)p.[fl2r](A)p.m(G)[Ssp].[fl | | |
| | 2r](A)}\|CHEM1{[nC6o]$CHEM1,RNA1,1:R1-1:R1$$$V2.0 | | |
| SSR-0106565 | A)p.[fl2r](A)p.m(C)p.[fl2r](A)p.m(C)p.[f]2r](A)[n0 | CUGUGCUGUA | |
| | 01R].m(A)p.[fl2r](G)p.m(U)p.[fl2r](A)p.m(G)[Ssp].[ | ACACAAGUAG | |
| | fl2r](A)}\|CHEM1{[nC6o]}\|CHEM2{[C16oyl]}$CHEM1,RNA1 | A | |
| | ,1:R1-1:R1\|CHEM2,CHEM1,1:R1-1:R2$$$V2.0 | | |
| SSR-0106566 | RNA1{p.m(C)[Ssp].m(U)p.[fl2r](G)p.m(U)p.[f]2r](G)p | CUGUGCUGUA | |
| | .m(C)p.[f12r](U)[n001R].m(G)p.[fl2r](U)p.[f12r](A) | ACACAAGUAG | |
| | p.[fl2r](A)p.m(C)p.[f12r](A)p.m(C)p.[f]2r](A)[n001 | A | |
| | R].m(A)p.[f]2r](G)p.m(U)p.[fl2r](A)p.m(G)[Ssp].[fl | | |
| | 2r](A)}\|CHEM1{[nC6o]}\|CHEM2{[C18oyl]}$CHEM1,RNA1,1 | | |
| | :R1-1:R1\|CHEM2,CHEM1,1:R1-1:R2$$$V2.0 | | |
| SSR-0106568 | RNA1{p.m(C)[Ssp].m(U)p.[fl2r](G)p.m(U)p.[f]2r](G)p | CUGUGCUGUA | |
| | .m(C)p.[f12r](U)[n001R].m(G)p.[fl2r](U)p.[f12r](A) | ACACAAGUAG | |
| | p.[fl2r](A)p.m(C)p.[fl2r](A)p.m(C)p.[f]2r](A)[n001 | A | |
| | R].m(A)p.[f]2r](G)p.m(U)p.[fl2r](A)p.m(G)[Ssp].[fl | | |
| | 2r](A)}\|CHEM1{[nC6o]}\|CHEM2{[lin]}$CHEM1,RNA1,1:R1 | | |
| | -1:R1\|CHEM2,CHEM1,1:R1-1:R2$$$V2.0 | | |
| SSR-0106569 | RNA1{p.m(C)[Ssp].m(U)p.[fl2r](G)p.m(U)p.[fl2r](G)p | CUGUGCUGUA | |
| | .m(C)p.[f12r](U)[n001R].m(G)p.[f12r](U)p.[f]2r](A) | ACACAAGUAG | |
| | p.[fl2r](A)p.m(C)p.[fl2r](A)p.m(C)p.[f]2r](A)[n001 | A | |
| | R].m(A)p.[f]2r](G)p.m(U)p.[fl2r](A)p.m(G)[Ssp].[fl | | |
| | 2r](A)}\|CHEM1{[nC6o]}\|CHEM2{[Srl1C11oyl]}$CHEM1,RN | | |
| | A1,1:R1-1:R1\|CHEM2,CHEM1,1:R1-1:R2$$$V2.0 | | |
| SSR-0106580 | RNA1{p.m(C)[Ssp].m(U)p.[fl2r](G)p.m(U)p.[fl2r](G)p | CUGUGCUGUA | |
| | .m(C)p.[fl2r](U)[n001R].m(G)p.[fl2r](U)p.[fl2r](A) | ACACAAGUAG | |
| | p.[fl2r](A)p.m(C)p.[fl2r](A)p.m(C)p.[fl2r](A)[n001 | A | |
| | R].m(A)p.[fl2r](G)p.m(U)p.[fl2r](A)p.m(G)[Ssp].[fl | | |
| | 2r](A)}\|CHEM1{[nC6o]}\|CHEM2{[Citr]}$CHEM1,RNA1,1:R | | |
| | 1-1:R1\|CHEM2,CHEM1,1:R1-1:R2$$$V2.0 | | |
| SSR-0106652 | RNA1{p.m(C)[Ssp].m(U)p.[fl2r](G)p.m(U)p.[fl2r](G)p | CUGUGCUGUA | |
| | .m(C)p.[fl2r](U)[n001R].m(G)p.[fl2r](U)p.[fl2r](A) | ACACAAGUAG | |
| | p.[fl2r](A)p.m(C)p.[fl2r](A)p.m(C)p.[fl2r](A)[n001 | A | |
| | R].m(A)p.[fl2r](G)p.m(U)p.[fl2r](A)p.m(G)[Ssp].[fl | | |
| | 2r](A)}\|CHEM1{[nC6o]}\|CHEM2{[Phodec]}$CHEM1,RNA1,1 | | |
| | :R1-1:R1\|CHEM2,CHEM1,1:R1-1:R2$$$V2.0 | | |
| SSR-0106653 | RNA1{p.m(C)[Ssp].m(U)p.[fl2r](G)p.m(U)p.[fl2r](G)p | CUGUGCUGUA | |
| | .m(C)p.[fl2r](U)[n001R].m(G)p.[fl2r](U)p.[fl2r](A) | ACACAAGUAG | |
| | p.[fl2r](A)p.m(C)p.[fl2r](A)p.m(C)p.[fl2r](A)[n001 | A | |
| | R].m(A)p.[fl2r](G)p.m(U)p.[fl2r](A)p.m(G)[Ssp].[fl | | |
| | 2r](A)}\|CHEM1{[nC6o]}\|CHEM2{[EPhodec]}$CHEM1,RNA1, | | |
| | 1:R1-1:R1\|CHEM2,CHEM1,1:R1-1:R2$$$V2.0 | | |
| SSR-0106660 | RNA1{p.m(C)[Ssp].m(U)p.[fl2r](G)p.m(U)p.[fl2r](G)p | CUGUGCUGUA | |
| | .m(C)p.[fl2r](U)[n001R].m(G)p.[fl2r](U)p.[fl2r](A) | ACACAAGUAG | |
| | p.[fl2r](A)p.m(C)p.[fl2r](A)p.m(C)p.[fl2r](A)[n001 | A | |
| | R].m(A)p.[fl2r](G)p.m(U)p.[fl2r](A)p.m(G)[Ssp].[fl | | |
| | 2r](A)}\|CHEM1{[nC6o]}\|CHEM2{[Bardoyl]}$CHEM1,RNA1, | | |
| | 1:R1-1:R1\|CHEM2,CHEM1,1:R1-1:R2$$$V2.0 | | |
| SSR-0106679 | RNA1{p.m(C)[Ssp].m(U)p.[fl2r](G)p.m(U)p.[fl2r](G)p | CUGUGCUGUA | |
| | .m(C)p.[fl2r](U)[n001R].m(G)p.[fl2r](U)p.[fl2r](A) | ACACAAGUAG | |
| | p.[fl2r](A)p.m(C)p.[fl2r](A)p.m(C)p.[fl2r](A)[n001 | A | |
| | R].m(A)p.[fl2r](G)p.m(U)p.[fl2r](A)p.m(G)[Ssp].[fl | | |
| | 2r](A)}\|CHEM1{[nC6o]}\|CHEM2{[anis3C5oyl]}$CHEM1,RN | | |
| | A1,1:R1-1:R1\|CHEM2,CHEM1,1:R1-1:R2$$$V2.0 | | |
| SSR-0107358 | RNA1{m(U)[Ssp].[fl2r](U)[Rsp].m(A)p.[fl2r](U)p.m(A | UUAUAGAGCA | |
| | )p.[fl2r](G)p.m(A)p.m(G)p.m(C)p.m(A)[n001S].[fl2r] | AGAACACUGU | |
| | (A)p.m(G)p.m(A)p.[fl2r](A)p.m(C)p.[fl2r](A)p.m(C)p | UUU | |
| | .m(U)p.m(G)p.m(U)p.m(U)[Ssp].m(U)[Ssp].m(U)}$$$$V2 | | |
| | .0 | | |
| SSR-0107359 | RNA1{m(U)[Ssp].[fl2r](U)[Rsp].[Rm5m](A)p.[Rm5fl2r] | UUAUAGAGCA | |
| | (U)p.m(A)p.[fl2r](G)p.m(A)p.m(G)p.m(C)p.m(A)[n001S | AGAACACUGU | |
| | ].[fl2r](A)p.m(G)p.m(A)p.[fl2r](A)p.m(C)p.[fl2r](A | UUU | |
| | )p.m(C)p.m(U)p.m(G)p.m(U)p.m(U)[Ssp].m(U)[Ssp].m(U | | |
| | )}$$$$V2.0 | | |
| SSR-0107360 | RNA1{m(U)[Ssp].[fl2r](U)[Rsp].[Sm5m](A)p.[Sm5fl2r] | UUAUAGAGCA | |
| | (U)p.m(A)p.[fl2r](G)p.m(A)p.m(G)p.m(C)p.m(A)[n001S | AGAACACUGU | |
| | ].[fl2r](A)p.m(G)p.m(A)p.[fl2r](A)p.m(C)p.[fl2r](A | UUU | |
| | )p.m(C)p.m(U)p.m(G)p.m(U)p.m(U)[Ssp].m(U)[Ssp].m(U | | |
| | )}$$$$V2.0 | | |
| SSR-0106644 | RNA1{m(U)[Ssp].[fl2r](U)[Rsp].m(A)[n001S].[Rm5fl2r | UUAUAGAGCA | |
| | ](U)p.m(A)p.[fl2r](G)p.m(A)p.m(G)p.m(C)p.m(A)[n001 | AGAACACUGU | |
| | S].[fl2r](A)p.m(G)p.m(A)p.[fl2r](A)p.m(C)p.[fl2r]( | UUU | |
| | A)p.m(C)p.m(U)p.m(G)p.m(U)p.m(U)[Ssp].m(U)[Ssp].m( | | |
| | U)}$$$$V2.0 | | |
| SSR-0106645 | RNA1{m(U)[Ssp].[fl2r](U)[Rsp].m(A)[n001S].[Sm5fl2r | UUAUAGAGCA | |
| | ](U)p.m(A)p.[fl2r](G)p.m(A)p.m(G)p.m(C)p.m(A)[n001 | AGAACACUGU | |
| | S].[fl2r](A)p.m(G)p.m(A)p.[fl2r](A)p.m(C)p.[fl2r]( | UUU | |
| | A)p.m(C)p.m(U)p.m(G)p.m(U)p.m(U)[Ssp].m(U)[Ssp].m( | | |
| | U)}$$$$V2.0 | | |
| SSR-0106646 | RNA1{m(U)[Ssp].[fl2r](U)[Rsp].[Rm5m](A)[n001S].[fl | UUAUAGAGCA | |
| | 2r](U)p.m(A)p.[fl2r](G)p.m(A)p.m(G)p.m(C)p.m(A)[n0 | AGAACACUGU | |
| | 01S].[fl2r](A)p.m(G)p.m(A)p.[fl2r](A)p.m(C)p.[fl2r | UUU | |
| | ](A)p.m(C)p.m(U)p.m(G)p.m(U)p.m(U)[Ssp].m(U)[Ssp]. | | |
| | m(U)}$$$$V2.0 | | |
| SSR-0106648 | RNA1{m(U)[Ssp].[fl2r](U)[Ssp].[Rm5m](A)[n001S].[Rm | UUAUAGAGCA | |
| | 5fl2r](U)p.m(A)p.[fl2r](G)p.m(A)p.m(G)p.m(C)p.m(A) | AGAACACUGU | |
| | [n001S].[fl2r](A)p.m(G)p.m(A)p.[fl2r](A)p.m(C)p.[f | UUU | |
| | l2r](A)p.m(C)p.m(U)p.m(G)p.m(U)p.m(U)[Ssp].m(U)[Ss | | |
| | p].m(U)}$$$$V2.0 | | |
| SSR-0106649 | RNA1{m(U)[Ssp].[fl2r](U)[Ssp].[Sm5m](A)[n001S].[Sm | UUAUAGAGCA | |
| | 5fl2r](U)p.m(A)p.[fl2r](G)p.m(A)p.m(G)p.m(C)p.m(A) | AGAACACUGU | |
| | [n001S].[fl2r](A)p.m(G)p.m(A)p.[fl2r](A)p.m(C)p.[f | UUU | |
| | l2r](A)p.m(C)p.m(U)p.m(G)p.m(U)p.m(U)[Ssp].m(U)[Ss | | |
| | p].m(U)}$$$$V2.0 | | |
| SSR-0106650 | RNA1{m(U)[Ssp].[fl2r](U)[Ssp].m(A)[n001S].[Sgna](U | UUAUAGAGCA | |
| | )p.m(A)p.[fl2r](G)p.m(A)p.m(G)p.m(C)p.m(A)[n001S]. | AGAACACUGU | |
| | [fl2r](A)p.m(G)p.m(A)p.[fl2r](A)p.m(C)p.[fl2r](A)p | UUU | |
| | .m(C)p.m(U)p.m(G)p.m(U)p.m(U)[Ssp].m(U)[Ssp].m(U)} | | |
| | $$$$V2.0 | | |
| SSR-0107361 | RNA1{m(U)[Ssp].[fl2r](U)[Rsp].m(A)[n001S].[fl2r](U | UUAUAGAGCA | |
| | )p.m(A)p.[fl2r](G)p.m(A)p.[Sgna](G)p.m(C)p.m(A)[n0 | AGAACACUGU | |
| | 01S].[fl2r](A)p.m(G)p.m(A)p.[fl2r](A)p.m(C)p.[fl2r | UUU | |
| | ](A)p.m(C)p.m(U)p.m(G)p.m(U)p.m(U)[Ssp].m(U)[Ssp]. | | |
| | m(U)}$$$$V2.0 | | |
| SSR-0107362 | RNA1{m(U)[Ssp].[fl2r](U)[Rsp].m(A)[n001S].[fl2r](U | UUAUAGAGCA | |
| | )p.m(A)p.[fl2r](G)p.[Sgna](A)p.m(G)p.m(C)p.m(A)[n0 | AGAACACUGU | |
| | 01S].[fl2r](A)p.m(G)p.m(A)p.[fl2r](A)p.m(C)p.[fl2r | UUU | |
| | ](A)p.m(C)p.m(U)p.m(G)p.m(U)p.m(U)[Ssp].m(U)[Ssp]. | | |
| | m(U)}$$$$V2.0 | | |
| SSR-0107363 | RNA1{m(U)[Ssp].[fl2r](U)[Rsp].m(A)[n001S].[fl2r](U | UUAUAGAGCA | |
| | )p.m(A)p.[Sgna](G)p.m(A)p.m(G)p.m(C)p.m(A)[n001S]. | AGAACACUGU | |
| | [fl2r](A)p.m(G)p.m(A)p.[fl2r](A)p.m(C)p.[fl2r](A)p | UUU | |
| | .m(C)p.m(U)p.m(G)p.m(U)p.m(U)[Ssp].m(U)[Ssp].m(U)} | | |
| | $$$$V2.0 | | |
| SSR-0107364 | RNA1{m(U)[Ssp].[fl2r](U)[Rsp].m(A)[n001S].[fl2r](U | UUAUAGAGCA | |
| | )p.[Sgna](A)p.[fl2r](G)p.m(A)p.m(G)p.m(C)p.m(A)[n0 | AGAACACUGU | |
| | 01S].[fl2r](A)p.m(G)p.m(A)p.[fl2r](A)p.m(C)p.[fl2r | UUU | |
| | ](A)p.m(C)p.m(U)p.m(G)p.m(U)p.m(U)[Ssp].m(U)[Ssp]. | | |
| | m(U)}$$$$V2.0 | | |
| SSR-0107416 | RNA1{m(U)[Ssp].[fl2r](U)[Rsp].m(A)[n001S].[Sgna](T | UUATAGAGCA | |
| | )p.m(A)p.[fl2r](G)p.m(A)p.m(G)p.m(C)p.m(A)[n001S]. | AGAACACUGU | |
| | [fl2r](A)p.m(G)p.m(A)p.[fl2r](A)p.m(C)p.[fl2r](A)p | UUU | |
| | .m(C)p.m(U)p.m(G)p.m(U)p.m(U)[Ssp].m(U)[Ssp].m(U)} | | |
| | $$$$V2.0 | | |
| SSR-0107366 | RNA1{m(U)[Ssp].[fl2r](U)[Rsp].[Sgna](A)[n001S].[fl | UUAUAGAGCA | |
| | 2r](U)p.m(A)p.[fl2r](G)p.m(A)p.m(G)p.m(C)p.m(A)[n0 | AGAACACUGU | |
| | 01S].[fl2r](A)p.m(G)p.m(A)p.[fl2r](A)p.m(C)p.[fl2r | UUU | |
| | ](A)p.m(C)p.m(U)p.m(G)p.m(U)p.m(U)[Ssp].m(U)[Ssp]. | | |
| | m(U)}$$$$V2.0 | | |
| SSR-0107417 | RNA1{m(U)[Ssp].[Sgna](T)[Rsp].m(A)[n001S].[fl2r](U | UTAUAGAGCA | |
| | )p.m(A)p.[fl2r](G)p.m(A)p.m(G)p.m(C)p.m(A)[n001S]. | AGAACACUGU | |
| | [fl2r](A)p.m(G)p.m(A)p.[fl2r](A)p.m(C)p.[fl2r](A)p | UUU | |
| | .m(C)p.m(U)p.m(G)p.m(U)p.m(U)[Ssp].m(U)[Ssp].m(U)} | | |
| | $$$$V2.0 | | |
| SSR-0107418 | RNA1{[Sgna](T)[Ssp].[fl2r](U)[Rsp].m(A)[n001S].[fl | TUAUAGAGCA | |
| | 2r](U)p.m(A)p.[fl2r](G)p.m(A)p.m(G)p.m(C)p.m(A)[n0 | AGAACACUGU | |
| | 01S].[fl2r](A)p.m(G)p.m(A)p.[fl2r](A)p.m(C)p.[fl2r | UUU | |
| | ](A)p.m(C)p.m(U)p.m(G)p.m(U)p.m(U)[Ssp].m(U)[Ssp]. | | |
| | m(U)}$$$$V2.0 | | |
| SSR-0107369 | RNA1{m(U)[Ssp].[fl2r](U)[Rsp].m(A)[n001S].[fl2r](U | UUAUAGAGCA | |
| | )p.m(A)p.[fl2r](G)p.m(A)p.d(G)p.m(C)p.m(A)[n001S]. | AGAACACUGU | |
| | [fl2r](A)p.m(G)p.m(A)p.[fl2r](A)p.m(C)p.[fl2r](A)p | UUU | |
| | .m(C)p.m(U)p.m(G)p.m(U)p.m(U)[Ssp].m(U)[Ssp].m(U)} | | |
| | $$$$V2.0 | | |
| SSR-0107370 | RNA1{m(U)[Ssp].[fl2r](U)[Rsp].m(A)[n001S].[fl2r](U | UUAUAGAGCA | |
| | )p.m(A)p.[fl2r](G)p.d(A)p.m(G)p.m(C)p.m(A)[n001S]. | AGAACACUGU | |
| | [fl2r](A)p.m(G)p.m(A)p.[fl2r](A)p.m(C)p.[fl2r](A)p | UUU | |
| | .m(C)p.m(U)p.m(G)p.m(U)p.m(U)[Ssp].m(U)[Ssp].m(U)} | | |
| | $$$$V2.0 | | |
| SSR-0107371 | RNA1{m(U)[Ssp].[fl2r](U)[Rsp].m(A)[n001S].[fl2r](U | UUAUAGAGCA | |
| | )p.m(A)p.d(G)p.m(A)p.m(G)p.m(C)p.m(A)[n001S].[fl2r | AGAACACUGU | |
| | ](A)p.m(G)p.m(A)p.[fl2r](A)p.m(C)p.[fl2r](A)p.m(C) | UUU | |
| | p.m(U)p.m(G)p.m(U)p.m(U)[Ssp].m(U)[Ssp].m(U)}$$$$V | | |
| | 2.0 | | |
| SSR-0107372 | RNA1{m(U)[Ssp].[fl2r](U)[Rsp].m(A)[n001S].[fl2r](U | UUAUAGAGCA | |
| | )p.d(A)p.[fl2r](G)p.m(A)p.m(G)p.m(C)p.m(A)[n001S]. | AGAACACUGU | |
| | [fl2r](A)p.m(G)p.m(A)p.[fl2r](A)p.m(C)p.[fl2r](A)p | UUU | |
| | .m(C)p.m(U)p.m(G)p.m(U)p.m(U)[Ssp].m(U)[Ssp].m(U)} | | |
| | $$$$V2.0 | | |
| SSR-0107373 | RNA1{m(U)[Ssp].[fl2r](U)[Rsp].m(A)[n001S].d(T)p.m( | UUATAGAGCA | |
| | A)p.[fl2r](G)p.m(A)p.m(G)p.m(C)p.m(A)[n001S].[fl2r | AGAACACUGU | |
| | ](A)p.m(G)p.m(A)p.[fl2r](A)p.m(C)p.[fl2r](A)p.m(C) | UUU | |
| | p.m(U)p.m(G)p.m(U)p.m(U)[Ssp].m(U)[Ssp].m(U)}$$$$V | | |
| | 2.0 | | |
| SSR-0107374 | RNA1{m(U)[Ssp].[fl2r](U)[Rsp].d(A)[n001S].[fl2r](U | UUAUAGAGCA | |
| | )p.m(A)p.[fl2r](G)p.m(A)p.m(G)p.m(C)p.m(A)[n001S]. | AGAACACUGU | |
| | [fl2r](A)p.m(G)p.m(A)p.[fl2r](A)p.m(C)p.[fl2r](A)p | UUU | |
| | .m(C)p.m(U)p.m(G)p.m(U)p.m(U)[Ssp].m(U)[Ssp].m(U)} | | |
| | $$$$V2.0 | | |
| SSR-0107375 | RNA1{m(U)[Ssp].d(T)[Rsp].m(A)[n001S].[fl2r](U)p.m( | UTAUAGAGCA | |
| | A)p.[fl2r](G)p.m(A)p.m(G)p.m(C)p.m(A)[n001S].[fl2r | AGAACACUGU | |
| | ](A)p.m(G)p.m(A)p.[fl2r](A)p.m(C)p.[fl2r](A)p.m(C) | UUU | |
| | p.m(U)p.m(G)p.m(U)p.m(U)[Ssp].m(U)[Ssp].m(U)}$$$$V | | |
| | 2.0 | | |
| SSR-0107376 | RNA1{d(T)[Ssp].[fl2r](U)[Rsp].m(A)[n001S].[fl2r](U | TUAUAGAGCA | |
| | )p.m(A)p.[fl2r](G)p.m(A)p.m(G)p.m(C)p.m(A)[n001S]. | AGAACACUGU | |
| | [fl2r](A)p.m(G)p.m(A)p.[fl2r](A)p.m(C)p.[fl2r](A)p | UUU | |
| | .m(C)p.m(U)p.m(G)p.m(U)p.m(U)[Ssp].m(U)[Ssp].m(U)} | | |
| | $$$$V2.0 | | |
| SSR-0107377 | RNA1{m(U)[Ssp].[fl2r](U)[Rsp].m(A)[n001S].[fl2r](U | UUAUAGAGCA | |
| | )p.m(A)p.[fl2r](G)p.m(A)p.[moe](G)p.m(C)p.m(A)[n00 | AGAACACUGU | |
| | 1S].[fl2r](A)p.m(G)p.m(A)p.[fl2r](A)p.m(C)p.[fl2r] | UUU | |
| | (A)p.m(C)p.m(U)p.m(G)p.m(U)p.m(U)[Ssp].m(U)[Ssp].m | | |
| | (U)}$$$$V2.0 | | |
| SSR-0107378 | RNA1{m(U)[Ssp].[fl2r](U)[Rsp].m(A)[n001S].[fl2r](U | UUAUAGAGCA | |
| | )p.m(A)p.[fl2r](G)p.[moe](A)p.m(G)p.m(C)p.m(A)[n00 | AGAACACUGU | |
| | 1S].[fl2r](A)p.m(G)p.m(A)p.[fl2r](A)p.m(C)p.[fl2r] | UUU | |
| | (A)p.m(C)p.m(U)p.m(G)p.m(U)p.m(U)[Ssp].m(U)[Ssp].m | | |
| | (U)}$$$$V2.0 | | |
| SSR-0107379 | RNA1{m(U)[Ssp].[fl2r](U)[Rsp].m(A)[n001S].[fl2r](U | UUAUAGAGCA | |
| | )p.m(A)p.[moe](G)p.m(A)p.m(G)p.m(C)p.m(A)[n001S].[ | AGAACACUGU | |
| | fl2r](A)p.m(G)p.m(A)p.[fl2r](A)p.m(C)p.[fl2r](A)p. | UUU | |
| | m(C)p.m(U)p.m(G)p.m(U)p.m(U)[Ssp].m(U)[Ssp].m(U)}$ | | |
| | $$$V2.0 | | |
| SSR-0107380 | RNA1{m(U)[Ssp].[fl2r](U)[Rsp].m(A)[n001S].[fl2r](U | UUAUAGAGCA | |
| | )p.[moe](A)p.[fl2r](G)p.m(A)p.m(G)p.m(C)p.m(A)[n00 | AGAACACUGU | |
| | 1S].[fl2r](A)p.m(G)p.m(A)p.[fl2r](A)p.m(C)p.[fl2r] | UUU | |
| | (A)p.m(C)p.m(U)p.m(G)p.m(U)p.m(U)[Ssp].m(U)[Ssp].m | | |
| | (U)}$$$$V2.0 | | |
| SSR-0107381 | RNA1{m(U)[Ssp].[fl2r](U)[Rsp].m(A)[n001S].[moe](T) | UUATAGAGCA | |
| | p.m(A)p.[fl2r](G)p.m(A)p.m(G)p.m(C)p.m(A)[n001S].[ | AGAACACUGU | |
| | fl2r](A)p.m(G)p.m(A)p.[fl2r](A)p.m(C)p.[fl2r](A)p. | UUU | |
| | m(C)p.m(U)p.m(G)p.m(U)p.m(U)[Ssp].m(U)[Ssp].m(U)}$ | | |
| | $$$V2.0 | | |
| SSR-0107382 | RNA1{m(U)[Ssp].[fl2r](U)[Rsp].[moe](A)[n001S].[fl2 | UUAUAGAGCA | |
| | r](U)p.m(A)p.[fl2r](G)p.m(A)p.m(G)p.m(C)p.m(A)[n00 | AGAACACUGU | |
| | 1S].[fl2r](A)p.m(G)p.m(A)p.[fl2r](A)p.m(C)p.[fl2r] | UUU | |
| | (A)p.m(C)p.m(U)p.m(G)p.m(U)p.m(U)[Ssp].m(U)[Ssp].m | | |
| | (U)}$$$$V2.0 | | |
| SSR-0107383 | RNA1{m(U)[Ssp].[moe](T)[Rsp].m(A)[n001S].[fl2r](U) | UTAUAGAGCA | |
| | p.m(A)p.[fl2r](G)p.m(A)p.m(G)p.m(C)p.m(A)[n001S].[ | AGAACACUGU | |
| | fl2r](A)p.m(G)p.m(A)p.[fl2r](A)p.m(C)p.[fl2r](A)p. | UUU | |
| | m(C)p.m(U)p.m(G)p.m(U)p.m(U)[Ssp].m(U)[Ssp].m(U)}$ | | |
| | $$$V2.0 | | |
| SSR-0107384 | RNA1{[moe](T)[Ssp].[fl2r](U)[Rsp].m(A)[n001S].[fl2 | TUAUAGAGCA | |
| | r](U)p.m(A)p.[fl2r](G)p.m(A)p.m(G)p.m(C)p.m(A)[n00 | AGAACACUGU | |
| | 1S].[fl2r](A)p.m(G)p.m(A)p.[fl2r](A)p.m(C)p.[fl2r] | UUU | |
| | (A)p.m(C)p.m(U)p.m(G)p.m(U)p.m(U)[Ssp].m(U)[Ssp].m | | |
| | (U)}$$$$V2.0 | | |
| SSR-0107385 | RNA1{m(U)[Ssp].[fl2r](U)[Rsp].m(A)[n001S].[fl2r](U | UUAUAGAGCA | |
| | )p.m(A)p.[fl2r](G)p.m(A)p.[Ir](G)p.m(C)p.m(A)[n001 | AGAACACUGU | |
| | S].[fl2r](A)p.m(G)p.m(A)p.[fl2r](A)p.m(C)p.[fl2r]( | UUU | |
| | A)p.m(C)p.m(U)p.m(G)p.m(U)p.m(U)[Ssp].m(U)[Ssp].m( | | |
| | U)}$$$$V2.0 | | |
| SSR-0107386 | RNA1{m(U)[Ssp].[fl2r](U)[Rsp].m(A)[n001S].[fl2r](U | UUAUAGAGCA | |
| | )p.m(A)p.[fl2r](G)p.[Ir](A)p.m(G)p.m(C)p.m(A)[n001 | AGAACACUGU | |
| | S].[fl2r](A)p.m(G)p.m(A)p.[fl2r](A)p.m(C)p.[fl2r]( | UUU | |
| | A)p.m(C)p.m(U)p.m(G)p.m(U)p.m(U)[Ssp].m(U)[Ssp].m( | | |
| | U)}$$$$V2.0 | | |
| SSR-0107387 | RNA1{m(U)[Ssp].[fl2r](U)[Rsp].m(A)[n001S].[fl2r](U | UUAUAGAGCA | |
| | )p.m(A)p.[Ir](G)p.m(A)p.m(G)p.m(C)p.m(A)[n001S].[f | AGAACACUGU | |
| | l2r](A)p.m(G)p.m(A)p.[fl2r](A)p.m(C)p.[fl2r](A)p.m | UUU | |
| | (C)p.m(U)p.m(G)p.m(U)p.m(U)[Ssp].m(U)[Ssp].m(U)}$$ | | |
| | $$V2.0 | | |
| SSR-0107388 | RNA1{m(U)[Ssp].[fl2r](U)[Rsp].m(A)[n001S].[fl2r](U | UUAUAGAGCA | |
| | )p.[Ir](A)p.[fl2r](G)p.m(A)p.m(G)p.m(C)p.m(A)[n001 | AGAACACUGU | |
| | S].[fl2r](A)p.m(G)p.m(A)p.[fl2r](A)p.m(C)p.[fl2r]( | UUU | |
| | A)p.m(C)p.m(U)p.m(G)p.m(U)p.m(U)[Ssp].m(U)[Ssp].m( | | |
| | U)}$$$$V2.0 | | |
| SSR-0107389 | RNA1{m(U)[Ssp].[fl2r](U)[Rsp].m(A)[n001S].[Ir](T)p | UUATAGAGCA | |
| | .m(A)p.[fl2r](G)p.m(A)p.m(G)p.m(C)p.m(A)[n001S].[f | AGAACACUGU | |
| | l2r](A)p.m(G)p.m(A)p.[fl2r](A)p.m(C)p.[fl2r](A)p.m | UUU | |
| | (C)p.m(U)p.m(G)p.m(U)p.m(U)[Ssp].m(U)[Ssp].m(U)}$$ | | |
| | $$V2.0 | | |
| SSR-0107390 | RNA1{m(U)[Ssp].[fl2r](U)[Rsp].[Ir](A)[n001S].[fl2r | UUAUAGAGCA | |
| | ](U)p.m(A)p.[fl2r](G)p.m(A)p.m(G)p.m(C)p.m(A)[n001 | AGAACACUGU | |
| | S].[fl2r](A)p.m(G)p.m(A)p.[fl2r](A)p.m(C)p.[fl2r]( | UUU | |
| | A)p.m(C)p.m(U)p.m(G)p.m(U)p.m(U)[Ssp].m(U)[Ssp].m( | | |
| | U)}$$$$V2.0 | | |
| SSR-0107391 | RNA1{m(U)[Ssp].[Ir](T)[Rsp].m(A)[n001S].[fl2r](U)p | UTAUAGAGCA | |
| | .m(A)p.[fl2r](G)p.m(A)p.m(G)p.m(C)p.m(A)[n001S].[f | AGAACACUGU | |
| | l2r](A)p.m(G)p.m(A)p.[fl2r](A)p.m(C)p.[fl2r](A)p.m | UUU | |
| | (C)p.m(U)p.m(G)p.m(U)p.m(U)[Ssp].m(U)[Ssp].m(U)}$$ | | |
| | $$V2.0 | | |
| SSR-0107392 | RNA1{[Ir](T)[Ssp].[fl2r](U)[Rsp].m(A)[n001S].[fl2r | TUAUAGAGCA | |
| | ](U)p.m(A)p.[fl2r](G)p.m(A)p.m(G)p.m(C)p.m(A)[n001 | AGAACACUGU | |
| | S].[fl2r](A)p.m(G)p.m(A)p.[fl2r](A)p.m(C)p.[fl2r]( | UUU | |
| | A)p.m(C)p.m(U)p.m(G)p.m(U)p.m(U)[Ssp].m(U)[Ssp].m( | | |
| | U)}$$$$V2.0 | | |
| SSR-0106661 | RNA1{[oC60][n009].m(C)[Ssp].m(U)p.[fl2r](G)p.m(U)p | CUGUGCUGUA | |
| | .[fl2r](G)p.m(C)p.[fl2r](U)[n001R].m(G)p.[fl2r](U) | ACACAAGUAG | |
| | p.[fl2r](A)p.[fl2r](A)p.m(C)p.[fl2r](A)p.m(C)p.[fl | A | |
| | 2r](A)[n001R].m(A)p.[fl2r](G)p.m(U)p.[fl2r](A)p.m( | | |
| | G)[Ssp].[fl2r](A)}$$$$V2.0 | | |
| SSR-0106662 | RNA1{[oC60][n033].m(C)[Ssp].m(U)p.[fl2r](G)p.m(U)p | CUGUGCUGUA | |
| | .[fl2r](G)p.m(C)p.[fl2r](U)[n001R].m(G)p.[fl2r](U) | ACACAAGUAG | |
| | p.[fl2r](A)p.[fl2r](A)p.m(C)p.[fl2r](A)p.m(C)p.[fl | A | |
| | 2r](A)[n001R].m(A)p.[fl2r](G)p.m(U)p.[fl2r](A)p.m( | | |
| | G)[Ssp].[fl2r](A)}$$$$V2.0 | | |
| SSR-0106663 | RNA1{[oC60][n039].m(C)[Ssp].m(U)p.[fl2r](G)p.m(U)p | CUGUGCUGUA | |
| | .[fl2r](G)p.m(C)p.[fl2r](U)[n001R].m(G)p.[fl2r](U) | ACACAAGUAG | |
| | p.[fl2r](A)p.[fl2r](A)p.m(C)p.[fl2r](A)p.m(C)p.[fl | A | |
| | 2r](A)[n001R].m(A)p.[fl2r](G)p.m(U)p.[fl2r](A)p.m( | | |
| | G)[Ssp].[fl2r](A)}$$$$V2.0 | | |
| SSR-0106664 | RNA1{[oC60][n040].m(C)[Ssp].m(U)p.[fl2r](G)p.m(U)p | CUGUGCUGUA | |
| | .[fl2r](G)p.m(C)p.[fl2r](U)[n001R].m(G)p.[fl2r](U) | ACACAAGUAG | |
| | p.[fl2r](A)p.[fl2r](A)p.m(C)p.[fl2r](A)p.m(C)p.[fl | A | |
| | 2r](A)[n001R].m(A)p.[fl2r](G)p.m(U)p.[fl2r](A)p.m( | | |
| | G)[Ssp].[fl2r](A)}$$$$V2.0 | | |
| SSR-0106665 | RNA1{m(C)[Ssp].m(U)p.[fl2r](G)p.m(U)p.[fl2r](G)p.m | CUGUGCUGUA | |
| | (C)p.[fl2r](U)[n039R].m(G)p.[fl2r](U)p.[fl2r](A)p. | ACACAAGUAG | |
| | [fl2r](A)p.m(C)p.[fl2r](A)p.m(C)p.[fl2r](A)p.m(A)p | A | |
| | .[fl2r](G)p.m(U)p.[fl2r](A)p.m(G)[Ssp].[fl2r](A)}$ | | |
| | $$$V2.0 | | |
| SSR-0106666 | RNA1{m(C)[Ssp].m(U)p.[fl2r](G)p.m(U)p.[fl2r](G)p.m | CUGUGCUGUA | |
| | (C)p.[fl2r](U)[n040R].m(G)p.[fl2r](U)p.[fl2r](A)p. | ACACAAGUAG | |
| | [fl2r](A)p.m(C)p.[fl2r](A)p.m(C)p.[fl2r](A)p.m(A)p | A | |
| | .[fl2r](G)p.m(U)p.[fl2r](A)p.m(G)[Ssp].[fl2r](A)}$ | | |
| | $$$V2.0 | | |
| SSR-0106601 | RNA1{m(C)[Ssp].m(U)p.[fl2r](G)p.m(U)p.[fl2r](G)p.m | CUGUGCUGUA | |
| | (C)p.[hexdec2r](U)[n009R].m(G)p.[fl2r](U)p.[fl2r]( | ACACAAGUAG | |
| | A)p.[fl2r](A)p.m(C)p.[fl2r](A)p.m(C)p.[fl2r](A)p.m | A | |
| | (A)p.[fl2r](G)p.m(U)p.[fl2r](A)p.m(G)[Ssp].[fl2r]( | | |
| | A)}$$$$V2.0 | | |
| SSR-0106602 | RNA1{m(C)[Ssp].m(U)p.[fl2r](G)p.m(U)p.[fl2r](G)p.m | CUGUGCUGUA | |
| | (C)p.[hexdec2r](U)[n033R].m(G)p.[fl2r](U)p.[fl2r]( | ACACAAGUAG | |
| | A)p.[fl2r](A)p.m(C)p.[fl2r](A)p.m(C)p.[fl2r](A)p.m | A | |
| | (A)p.[fl2r](G)p.m(U)p.[fl2r](A)p.m(G)[Ssp].[fl2r]( | | |
| | A)}$$$$V2.0 | | |

TABLE 1d
Example Guide Strand Compositions.

| ID | HELM | BASE SEQUENCE | NAME |
|---|---|---|---|
| SSR-0104100 | RNA1{m(U)[sp].[fl2r](C)[sp].m(U)p.[fl2r](A)p.m(C)p.[fl2r](U)p.m(U)p.[fl2r](G)p.m(U)p.[fl2r](G)p.m(U)p. | UCUACUUGUGUUA | WV-50670 |
| | m(U)p.m(A)p.[fl2r](C)p.m(A)p.[fl2r](G)p.m(C)p.[fl2r](A)p.m(C)p.[fl2r](A)p.m(G)[sp].m(U)[sp].m(U)}$$$$ | CAGCACAGUU | |
| | V2.0 | | |
| SSR-0104186 | RNA1{p.[Rm5d5m](U)[Rsp].[fl2r](U)[Ssp].m(A)[n001S].[fl2r](U)p.m(A)p.[fl2r](G)p.m(A)p.m(G)p.m(C)p. | UUAUAGAGCAAGA | WV-50105 |
| | m(A)[n001R].[fl2r](A)p.m(G)p.m(A)p.[fl2r](A)p.m(C)p.[fl2r](A)p.m(C)p.m(U)p.m(G)p.m(U)p.m(U)[Ssp].m | ACACUGUUUU | |
| | (U)[Ssp].m(U)}$$$$V2.0 | | |
| SSR-0104189 | RNA1{p.[Rm5d5m](U)[Ssp].[fl2r](U)[Rsp].m(A)[n001S].[fl2r](U)p.m(A)p.[fl2r](G)p.m(A)p.m(G)p.m(C)p. | UUAUAGAGCAAGA | WV-50106 |
| | m(A)[n001R].[fl2r](A)p.m(G)p.m(A)p.[fl2r](A)p.m(C)p.[fl2r](A)p.m(C)p.m(U)p.m(G)p.m(U)p.m(U)[Ssp].m | ACACUGUUUU | |
| | (U)[Ssp].m(U)}$$$$V2.0 | | |
| SSR-0104473 | RNA1{m(U)[Ssp].[fl2r](U)[Rsp].m(A)[n001S].[fl2r](U)p.m(A)p.[fl2r](G)p.m(A)p.m(G)p.m(C)p.m(A)[n001R | UUAUAGAGCAAGA | WV-48528 |
| | ].[fl2r](A)p.m(G)p.m(A)p.[fl2r](A)p.m(C)p.[fl2r](A)p.m(C)p.m(U)p.m(G)p.m(U)p.m(U)[Ssp].m(U)[Ssp].m( | ACACUGUUUU | |
| | U)}$$$$V2.0 | | |
| SSR-0104475 | RNA1{m(U)[Ssp].[fl2r](U)[Rsp].m(A)[n001S].[fl2r](U)p.m(A)p.[fl2r](G)p.m(A)p.m(G)p.m(C)p.m(A)[n001S | UUAUAGAGCAAGA | WV-47145 |
| | ].[fl2r](A)p.m(G)p.m(A)p.[fl2r](A)p.m(C)p.[fl2r](A)p.m(C)p.m(U)p.m(G)p.m(U)p.m(U)[Ssp].m(U)[Ssp].m( | ACACUGUUUU | |
| | U)}$$$$V2.0 | | |
| SSR-0104717 | RNA1{m(U)[sp].[fl2r](U)[sp].m(A)p.[fl2r](U)p.m(A)p.[fl2r](G)p.m(A)p.m(G)p.m(C)p.m(A)p.[fl2r](A)p.m(G | UUAUAGAGCAAGA | WV-49611 |
| | )p.m(A)p.[fl2r](A)p.m(C)p.[fl2r](A)p.m(C)p.m(U)p.m(G)p.m(U)p.m(U)[sp].m(U)[sp].m(U)}$$$$V2.0 | ACACUGUUUU | |
| SSR-0105217 | RNA1{m(U)[Ssp].[fl2r](C)[Rsp].m(C)[n001S].[fl2r](U)p.m(U)p.[fl2r](C)p.m(C)p.m(C)p.m(U)p.m(G)[n001R] | UCCUUCCCUGAAG | WV-49614 |
| | .[fl2r](A)p.m(A)p.m(G)p.[fl2r](G)p.m(U)p.[fl2r](U)p.m(C)p.m(C)p.m(U)p.m(C)p.m(C)[Ssp].m(U)[Ssp].m(U | GUUCCUCCUU | |
| | )}$$$$V2.0 | | |
| SSR-0105245 | RNA1{m(U)[Ssp].[fl2r](U)[Rsp].m(A)p.[fl2r](U)p.m(A)p.[fl2r](G)p.m(A)p.m(G)p.m(C)p.m(A)p.[fl2r](A)p.m | UUAUAGAGCAAGA | WV-51122 |
| | (G)p.m(A)p.[fl2r](A)p.m(C)p.[fl2r](A)p.m(C)p.m(U)p.m(G)p.m(U)p.m(U)[Ssp].m(U)[Ssp].m(U)}$$$$V2.0 | ACACUGUUUU | |
| SSR-0106183 | RNA1{p.[Rm5d5m](U)[Rsp].[fl2r](C)[Ssp].m(U)[n001S].[fl2r](A)p.m(C)p.[fl2r](U)p.m(U)[n001S].[fl2r](G)p | UCUACUUGUGUUA | |
| | .m(U)p.[fl2r](G)p.m(U)p.m(U)p.m(A)[Ssp].[fl2r](C)[Ssp].m(A)[Ssp].[fl2r](G)[Ssp].m(C)[Ssp].[fl2r](A) | CAGCACAGUU | |
| | [n001S].m(C)[Ssp].[fl2r](A)[Ssp].m(G)[Ssp].m(U)[Ssp].m(U)}$$$$V2.0 | | |
| SSR-0106224 | RNA1{p.[Rm5d5m](U)[Ssp].[fl2r](C)[Ssp].m(U)[n001S].[fl2r](A)p.m(C)p.[fl2r](U)p.m(U)[n001S].[fl2r](G)p | UCUACUUGUGUUA | |
| | .m(U)p.[fl2r](G)p.m(U)p.m(U)p.m(A)[Ssp].[fl2r](C)[Ssp].m(A)[Ssp].[fl2r](G)[Ssp].m(C)[Ssp].[fl2r](A) | CAGCACAGUU | |
| | [n001S].m(C)[Ssp].[fl2r](A)[Ssp].m(G)[Ssp].m(U)[Ssp].m(U)}$$$$V2.0 | | |
| SSR-0106453 | RNA1{m(U)[Ssp].[fl2r](U)[Rsp].[thpyr](A)[n001S].[fl2r](U)p.m(A)p.[fl2r](G)p.m(A)p.m(G)p.m(C)p.m(A)[n | UUAUAGAGCAAGA | |
| | 001S].[fl2r](A)p.m(G)p.m(A)p.[fl2r](A)p.m(C)p.[fl2r](A)p.m(C)p.m(U)p.m(G)p.m(U)p.m(U)[Ssp].m(U)[Ssp | ACACUGUUUU | |
| | ].m(U)}$$$$V2.0 | | |
| SSR-0106454 | RNA1{m(U)[Ssp].[fl2r](U)[Rsp].m(A)[n001S].[fl2r](U)p.[thpyr](A)p.[fl2r](G)p.m(A)p.m(G)p.m(C)p.m(A)[n | UUAUAGAGCAAGA | |
| | 001S].[fl2r](A)p.m(G)p.m(A)p.[fl2r](A)p.m(C)p.[fl2r](A)p.m(C)p.m(U)p.m(G)p.m(U)p.m(U)[Ssp].m(U)[Ssp | ACACUGUUUU | |
| | ].m(U)}$$$$V2.0 | | |
| SSR-0106455 | RNA1{m(U)[Ssp].[fl2r](U)[Rsp].m(A)[n001S].[fl2r](U)p.m(A)p.[fl2r](G)p.[thpyr](A)p.m(G)p.m(C)p.m(A)[n | UUAUAGAGCAAGA | |
| | 001S].[fl2r](A)p.m(G)p.m(A)p.[fl2r](A)p.m(C)p.[fl2r](A)p.m(C)p.m(U)p.m(G)p.m(U)p.m(U)[Ssp].m(U)[Ssp | ACACUGUUUU | |
| | ].m(U)}$$$$V2.0 | | |
| SSR-0106456 | RNA1{m(U)[Ssp].[fl2r](U)[Rsp].m(A)[n001S].[fl2r](U)p.m(A)p.[fl2r](G)p.m(A)p.m(G)p.m(C)p.[thpyr](A)[n | UUAUAGAGCAAGA | |
| | 001S].[fl2r](A)p.m(G)p.m(A)p.[fl2r](A)p.m(C)p.[fl2r](A)p.m(C)p.m(U)p.m(G)p.m(U)p.m(U)[Ssp].m(U)[Ssp | ACACUGUUUU | |
| | ].m(U)}$$$$V2.0 | | |
| SSR-0106457 | RNA1{d([3nU])[Ssp].[fl2r](U)[Rsp].m(A)[n001S].[fl2r](U)p.m(A)p.[fl2r](G)p.m(A)p.m(G)p.m(C)p.m(A)[n0 | UUAUAGAGCAAGA | |
| | 01S].[fl2r](A)p.m(G)p.m(A)p.[fl2r](A)p.m(C)p.[fl2r](A)p.m(C)p.m(U)p.m(G)p.m(U)p.m(U)[Ssp].m(U)[Ssp] | ACACUGUUUU | |
| | .m(U)}$$$$V2.0 | | |
| SSR-0106512 | RNA1{m(U)[Rsp].[fl2r](C)[Ssp].m(U)[n029S].[fl2r](A)p.m(C)p.[fl2r](U)p.m(U)[n029S].[fl2r](G)p.m(U)p. | UCUACUUGUGUUA | |
| | [fl2r](G)p.m(U)p.m(U)p.m(A)[Ssp].[fl2r](C)[Ssp].m(A)[Ssp].[fl2r](G)[Ssp].m(C)[Ssp].[fl2r](A)[n029S]. | CAGCACAGUU | |
| | m(C)[Ssp].[fl2r](A)[Ssp].m(G)[Ssp].m(U)[Ssp].m(U)}$$$$V2.0 | | |
| SSR-0106514 | RNA1{[d5m](U)[Rsp].[fl2r](C)[Ssp].m(U)[n001S].[fl2r](A)p.m(C)p.[fl2r](U)p.m(U)[n001S].[fl2r](G)p.m(U) | UCUACUUGUGUUA | |
| | p.[fl2r](G)p.m(U)p.m(U)p.m(A)[Ssp].[fl2r](C)[Ssp].m(A)[Ssp].[fl2r](G)[Ssp].m(C)[Ssp].[fl2r](A)[n001S]. | CAGCACAGUU | |
| | m(C)[Ssp].[fl2r](A)[Ssp].m(G)[Ssp].m(U)[Ssp].m(U)}\|CHEM1{[ptz]}$CHEM1, RNA1,1: R1-1: R1$$$V2.0 | | |
| SSR-0106515 | RNA1{[d5m](U)[Ssp].[fl2r](C)[Ssp].m(U)[n001S].[fl2r](A)p.m(C)p.[fl2r](U)p.m(U)[n001S].[fl2r](G)p.m(U) | UCUACUUGUGUUA | |
| | p.[fl2r](G)p.m(U)p.m(U)p.m(A)[Ssp].[fl2r](C)[Ssp].m(A)[Ssp].[fl2r](G)[Ssp].m(C)[Ssp].[fl2r](A)[n001S]. | CAGCACAGUU | |
| | m(C)[Ssp].[fl2r](A)[Ssp].m(G)[Ssp].m(U)[Ssp].m(U)}\|CHEM1{[ptz]}$CHEM1,RNA1,1:R1-1: R1$$$V2.0 | | |
| SSR-0106516 | RNA1{[vped5m](U)[Rsp].[fl2r](C)[Ssp].m(U)[n001S].[fl2r](A)p.m(C)p.[fl2r](U)p.m(U)[n001S].[fl2r](G)p.m | UCUACUUGUGUUA | |
| | (U)p.[fl2r](G)p.m(U)p.m(U)p.m(A)[Ssp].[fl2r](C)[Ssp].m(A)[Ssp].[fl2r](G)[Ssp].m(C)[Ssp].[fl2r](A) | CAGCACAGUU | |
| | [n001S].m(C)[Ssp].[fl2r](A)[Ssp].m(G)[Ssp].m(U)[Ssp].m(U)}$$$$V2.0 | | |
| SSR-0106517 | RNA1{[vped5m](U)[Ssp].[fl2r](C)[Ssp].m(U)[n001S].[fl2r](A)p.m(C)p.[fl2r](U)p.m(U)[n001S].[fl2r](G)p. | UCUACUUGUGUUA | |
| | m(U)p.[fl2r](G)p.m(U)p.m(U)p.m(A)[Ssp].[fl2r](C)[Ssp].m(A)[Ssp].[fl2r](G)[Ssp].m(C)[Ssp].[fl2r](A) | CAGCACAGUU | |
| | [n001S].m(C)[Ssp].[fl2r](A)[Ssp].m(G)[Ssp].m(U)[Ssp].m(U)}$$$$V2.0 | | |
| SSR-0106518 | RNA1{[d25r](T)[Ssp].[fl2r](C)[Ssp].m(U)[n001S].[fl2r](A)p.m(C)p.[fl2r](U)p.m(U)[n001S].[fl2r](G)p. | TCUACUUGUGUUA | |
| | m(U)p.[fl2r](G)p.m(U)p.m(U)p.m(A)[Ssp].[fl2r](C)[Ssp].m(A)[Ssp].[fl2r](G)[Ssp].m(C)[Ssp].[fl2r](A) | CAGCACAGUU | |
| | [n001S].m(C)[Ssp].[fl2r](A)[Ssp].m(G)[Ssp].m(U)[Ssp].m(U)}\|CHEM1{[ptz]}$CHEM1, RNA1,1:R1-1:R1$$$V2.0 | | |
| SSR-0106519 | RNA1{p.[Rm5d5m](U)[Rsp].[fl2r](C)[Ssp].m(U)[n029S].[fl2r](A)p.m(C)p.[fl2r](U)p.m(U)[n029S].[fl2r](G)p | UCUACUUGUGUUA | |
| | .m(U)p.[fl2r](G)p.m(U)p.m(U)p.m(A)[Ssp].[fl2r](C)[Ssp].m(A)[Ssp].[fl2r](G)[Ssp].m(C)[Ssp].[fl2r](A) | CAGCACAGUU | |
| | [n029S].m(C)[Ssp].[fl2r](A)[Ssp].m(G)[Ssp].m(U)[Ssp].m(U)}$$$$V2.0 | | |
| SSR-0106520 | RNA1{m(U)[sp].[fl2r](U)[sp].m(A)p.[fl2r](U)p.m(A)p.[fl2r](G)p.[thpyr](A)p.m(G)p.m(C)p.m(A)p.[fl2r](A)p | UUAUAGAGCAAGA | |
| | .m(G)p.m(A)p.[fl2r](A)p.m(C)p.[fl2r](A)p.m(C)p.m(U)p.m(G)p.m(U)p.m(U)[sp].m(U)[sp].m(U)}$$$$V2.0 | ACACUGUUUU | |
| SSR-0106521 | RNA1{[thpyr](T)[Ssp].[fl2r](U)[Rsp].m(A)[n001S].[fl2r](U)p.m(A)p.[fl2r](G)p.m(A)p.m(G)p.m(C)p.m(A)[n | TUAUAGAGCAAGA | |
| | 001S].[fl2r](A)p.m(G)p.m(A)p.[fl2r](A)p.m(C)p.[fl2r](A)p.m(C)p.m(U)p.m(G)p.m(U)p.m(U)[Ssp].m(U)[Ssp | ACACUGUUUU | |
| | ].m(U)}$$$$V2.0 | | |
| SSR-0106522 | RNA1{m(U)[Ssp].[thpyr](T)[Rsp].m(A)[n001S].[fl2r](U)p.m(A)p.[fl2r](G)p.m(A)p.m(G)p.m(C)p.m(A)[n001 | UTAUAGAGCAAGA | |
| | S].[fl2r](A)p.m(G)p.m(A)p.[fl2r](A)p.m(C)p.[fl2r](A)p.m(C)p.m(U)p.m(G)p.m(U)p.m(U)[Ssp].m(U)[Ssp].m | ACACUGUUUU | |
| | (U)}$$$$V2.0 | | |
| SSR-0106523 | RNA1{m(U)[Ssp].[fl2r](U)[Rsp].m(A)[n001S].[thpyr](T)p.m(A)p.[fl2r](G)p.m(A)p.m(G)p.m(C)p.m(A)[n001 | UUATAGAGCAAGA | |
| | S].[fl2r](A)p.m(G)p.m(A)p.[fl2r](A)p.m(C)p.[fl2r](A)p.m(C)p.m(U)p.m(G)p.m(U)p.m(U)[Ssp].m(U)[Ssp].m | ACACUGUUUU | |
| | (U)}$$$$V2.0 | | |
| SSR-0106524 | RNA1{m(U)[Ssp].[fl2r](U)[Rsp].m(A)[n001S].[fl2r](U)p.m(A)p.[thpyr](G)p.m(A)p.m(G)p.m(C)p.m(A)[n00 | UUAUAGAGCAAGA | |
| | 1S].[fl2r](A)p.m(G)p.m(A)p.[fl2r](A)p.m(C)p.[fl2r](A)p.m(C)p.m(U)p.m(G)p.m(U)p.m(U)[Ssp].m(U)[Ssp]. | ACACUGUUUU | |
| | m(U)}$$$$V2.0 | | |
| SSR-0106525 | RNA1{m(U)[Ssp].[fl2r](U)[Rsp].m(A)[n001S].[fl2r](U)p.m(A)p.[fl2r](G)p.m(A)p.[thpyr](G)p.m(C)p.m(A)[n | UUAUAGAGCAAGA | |
| | 001S].[fl2r](A)p.m(G)p.m(A)p.[fl2r](A)p.m(C)p.[fl2r](A)p.m(C)p.m(U)p.m(G)p.m(U)p.m(U)[Ssp].m(U)[Ssp | ACACUGUUUU | |
| | ].m(U)}$$$$V2.0 | | |
| SSR-0106526 | RNA1{m(U)[Ssp].[fl2r](U)[Rsp].m(A)[n001S].[fl2r](U)p.m(A)p.[fl2r](G)p.m(A)p.m(G)p.[thpyr](C)p.m(A)[n | UUAUAGAGCAAGA | |
| | 001S].[fl2r](A)p.m(G)p.m(A)p.[fl2r](A)p.m(C)p.[fl2r](A)p.m(C)p.m(U)p.m(G)p.m(U)p.m(U)[Ssp].m(U)[Ssp | ACACUGUUUU | |
| | ].m(U)}$$$$V2.0 | | |
| SSR-0106527 | RNA1{m(U)[Ssp].[fl2r](U)[Rsp].m(A)[n001S].[fl2r](U)p.m(A)p.[fl2r](G)p.m(A)p.m(G)p.m(C)p.m(A)[n001S | UUAUAGAGCAAGA | |
| | ].[thpyr](A)p.m(G)p.m(A)p.[fl2r](A)p.m(C)p.[fl2r](A)p.m(C)p.m(U)p.m(G)p.m(U)p.m(U)[Ssp].m(U)[Ssp]. | ACACUGUUUU | |
| | m(U)}$$$$V2.0 | | |
| SSR-0106528 | RNA1{m(U)[Ssp].[fl2r](U)[Rsp].m(A)[n001S].[fl2r](U)p.m(A)p.[fl2r](G)p.m(A)p.m(G)p.m(C)p.m(A)[n001S | UUAUAGAGCAAGA | |
| | ].[fl2r](A)p.[thpyr](G)p.m(A)p.[fl2r](A)p.m(C)p.[fl2r](A)p.m(C)p.m(U)p.m(G)p.m(U)p.m(U)[Ssp].m(U) | ACACUGUUUU | |
| | [Ssp].m(U)}$$$$V2.0 | | |
| SSR-0106529 | RNA1{m(U)[Ssp].[fl2r](U)[Rsp].m(A)[n001S].[fl2r](U)p.m(A)p.[fl2r](G)p.m(A)p.m(G)p.m(C)p.m(A)[n001S | UUAUAGAGCAAGA | |
| | ].[fl2r](A)p.m(G)p.[thpyr](A)p.[fl2r](A)p.m(C)p.[fl2r](A)p.m(C)p.m(U)p.m(G)p.m(U)p.m(U)[Ssp].m(U) | ACACUGUUUU | |
| | [Ssp].m(U)}$$$$V2.0 | | |
| SSR-0106530 | RNA1{m(U)[Ssp].[fl2r](U)[Rsp].m(A)[n001S].[fl2r](U)p.m(A)p.[fl2r](G)p.m(A)p.m(G)p.m(C)p.m(A)[n001S | UUAUAGAGCAAGA | |
| | ].[fl2r](A)p.m(G)p.m(A)p.[thpyr](A)p.m(C)p.[fl2r](A)p.m(C)p.m(U)p.m(G)p.m(U)p.m(U)[Ssp].m(U)[Ssp]. | ACACUGUUUU | |
| | m(U)}$$$$V2.0 | | |
| SSR-0106531 | RNA1{m(U)[Ssp].[fl2r](U)[Rsp].m(A)[n001S].[fl2r](U)p.m(A)p.[fl2r](G)p.m(A)p.m(G)p.m(C)p.m(A)[n001S | UUAUAGAGCAAGA | |
| | ].[fl2r](A)p.m(G)p.m(A)p.[fl2r](A)p.[thpyr](C)p.[fl2r](A)p.m(C)p.m(U)p.m(G)p.m(U)p.m(U)[Ssp].m(U) | ACACUGUUUU | |
| | [Ssp].m(U)}$$$$V2.0 | | |
| SSR-0106532 | RNA1{m(U)[Ssp].[fl2r](U)[Rsp].m(A)[n001S].[fl2r](U)p.m(A)p.[fl2r](G)p.m(A)p.m(G)p.m(C)p.m(A)[n001S | UUAUAGAGCAAGA | |
| | ].[fl2r](A)p.m(G)p.m(A)p.[fl2r](A)p.m(C)p.[thpyr](A)p.m(C)p.m(U)p.m(G)p.m(U)p.m(U)[Ssp].m(U)[Ssp]. | ACACUGUUUU | |
| | m(U)}$$$$V2.0 | | |
| SSR-0106533 | RNA1{m(U)[Ssp].[fl2r](U)[Rsp].m(A)[n001S].[fl2r](U)p.m(A)p.[fl2r](G)p.m(A)p.m(G)p.m(C)p.m(A)[n001S | UUAUAGAGCAAGA | |
| | ].[fl2r](A)p.m(G)p.m(A)p.[fl2r](A)p.m(C)p.[fl2r](A)p.[thpyr](C)p.m(U)p.m(G)p.m(U)p.m(U)[Ssp].m(U) | ACACUGUUUU | |
| | [Ssp].m(U)}$$$$V2.0 | | |
| SSR-0106534 | RNA1{m(U)[Ssp].[fl2r](U)[Rsp].m(A)[n001S].[fl2r](U)p.m(A)p.[fl2r](G)p.m(A)p.m(G)p.m(C)p.m(A)[n001S | UUAUAGAGCAAGA | |
| | ].[fl2r](A)p.m(G)p.m(A)p.[fl2r](A)p.m(C)p.[fl2r](A)p.m(C)p.[thpyr](T)p.m(G)p.m(U)p.m(U)[Ssp].m(U) | ACACTGUUUU | |
| | [Ssp].m(U)}$$$$V2.0 | | |
| SSR-0106535 | RNA1{m(U)[Ssp].[fl2r](U)[Rsp].m(A)[n001S].[fl2r](U)p.m(A)p.[fl2r](G)p.m(A)p.m(G)p.m(C)p.m(A)[n001S | UUAUAGAGCAAGA | |
| | ].[fl2r](A)p.m(G)p.m(A)p.[fl2r](A)p.m(C)p.[fl2r](A)p.m(C)p.m(U)p.[thpyr](G)p.m(U)p.m(U)[Ssp].m(U) | ACACUGUUUU | |
| | [Ssp].m(U)}$$$$V2.0 | | |
| SSR-0106536 | RNA1{m(U)[Ssp].[fl2r](U)[Rsp].m(A)[n001S].[fl2r](U)p.m(A)p.[fl2r](G)p.m(A)p.m(G)p.m(C)p.m(A)[n001S | UUAUAGAGCAAGA | |
| | ].[fl2r](A)p.m(G)p.m(A)p.[fl2r](A)p.m(C)p.[fl2r](A)p.m(C)p.m(U)p.m(G)p.[thpyr](T)p.m(U)[Ssp].m(U) | ACACUGTUUU | |
| | [Ssp].m(U)}$$$$V2.0 | | |
| SSR-0106537 | RNA1{m(U)[Ssp].[fl2r](U)[Rsp].m(A)[n001S].[fl2r](U)p.m(A)p.[fl2r](G)p.m(A)p.m(G)p.m(C)p.m(A)[n001S | UUAUAGAGCAAGA | |
| | ].[fl2r](A)p.m(G)p.m(A)p.[fl2r](A)p.m(C)p.[fl2r](A)p.m(C)p.m(U)p.m(G)p.m(U)p.[thpyr](T)[Ssp].m(U) | ACACUGUTUU | |
| | [Ssp].m(U)}$$$$V2.0 | | |
| SSR-0106538 | RNA1{m(U)[Ssp].[fl2r](U)[Rsp].m(A)[n001S].[fl2r](U)p.m(A)p.[fl2r](G)p.m(A)p.m(G)p.m(C)p.m(A)[n001S | UUAUAGAGCAAGA | |
| | ].[fl2r](A)p.m(G)p.m(A)p.[fl2r](A)p.m(C)p.[fl2r](A)p.m(C)p.m(U)p.m(G)p.m(U)p.m(U)[Ssp].[thpyr](T) | ACACUGUUTU | |
| | [Ssp].m(U)}$$$$V2.0 | | |
| SSR-0106539 | RNA1{m(U)[Ssp].[fl2r](U)[Rsp].m(A)[n001S].[fl2r](U)p.m(A)p.[fl2r](G)p.m(A)p.m(G)p.m(C)p.m(A)[n001S | UUAUAGAGCAAGA | |
| | ].[fl2r](A)p.m(G)p.m(A)p.[fl2r](A)p.m(C)p.[fl2r](A)p.m(C)p.m(U)p.m(G)p.m(U)p.m(U)[Ssp].m(U)[Ssp]. | ACACUGUUUT | |
| | [thpyr](T)}$$$$V2.0 | | |
| SSR-0106584 | RNA1{m(U)[sp].[fl2r](C)[sp].m(U)[n001].[fl2r](A)p.m(C)p.[fl2r](U)p.m(U)[n001].[fl2r](G)p.m(U)p. | UCUACUUGUGUUA | |
| | [fl2r](G)p.m(U)p.m(U)p.m(A)[sp].[fl2r](C)[sp].m(A)[sp].[fl2r](G)[sp].m(C)[sp].[fl2r](A)[n001]. | CAGCACAGUU | |
| | m(C)[sp].[fl2r](A)[sp].m(G)[sp].m(U)[sp].m(U)}$$$$V2.0 | | |
| SSR-0106587 | RNA1{p.[Rm5d5m](U)[Rsp].[fl2r](C)[Rsp].m(C)[n001S].[fl2r](U)p.m(U)p.[fl2r](C)p.m(C)[n001S].[fl2r] | UCCUUCCCUGAAG | |
| | (C)p.m(U)p.[fl2r](G)p.m(A)p.m(A)p.m(G)[Ssp].[fl2r](G)[Ssp].m(U)[Ssp].[fl2r](U)[Ssp].m(C)[Ssp].[fl2r] | GUUCCUCCUU | |
| | (C)[n001S].m(U)[Ssp].[fl2r](C)[Ssp].m(C)[Ssp].m(U)[Ssp].m(U)}$$$$V2.0 | | |
| SSR-0106620 | RNA1{p.[Rm5d5m](U)[Rsp].[fl2r](U)[Rsp].m(A)[n001S].[fl2r](U)p.m(A)p.[fl2r](G)p.m(A)p.m(G)p.m(C)p. | UUAUAGAGCAAGA | |
| | m(A)[n001R].[fl2r](A)p.m(G)p.m(A)p.[fl2r](A)p.m(C)p.[fl2r](A)p.m(C)p.m(U)p.m(G)p.m(U)p.m(U)[Ssp].m | ACACUGUUUU | |
| | (U)[Ssp].m(U)}$$$$V2.0 | | |
| SSR-0106621 | RNA1{p.[Rm5d5m](U)[Ssp].[fl2r](U)[Ssp].m(A)[n001S].[fl2r](U)p.m(A)p.[fl2r](G)p.m(A)p.m(G)p.m(C)p.m | UUAUAGAGCAAGA | |
| | (A)[n001R].[fl2r](A)p.m(G)p.m(A)p.[fl2r](A)p.m(C)p.[fl2r](A)p.m(C)p.m(U)p.m(G)p.m(U)p.m(U)[Ssp].m( | ACACUGUUUU | |
| | U)[Ssp].m(U)}$$$$V2.0 | | |
| SSR-0106625 | RNA1{m(U)[Ssp].[fl2r](U)[Rsp].[thpyr](A)p.[fl2r](U)p.m(A)p.[fl2r](G)p.m(A)p.m(G)p.m(C)p.m(A)p.[fl2r] | UUAUAGAGCAAGA | |
| | (A)p.m(G)p.m(A)p.[fl2r](A)p.m(C)p.[fl2r](A)p.m(C)p.m(U)p.m(G)p.m(U)p.m(U)[Ssp].m(U)[Ssp].m(U)}$$$$ | ACACUGUUUU | |
| | V2.0 | | |
| SSR-0106626 | RNA1{m(U)[Ssp].[fl2r](U)[Rsp].m(A)p.[thpyr](T)p.m(A)p.[fl2r](G)p.m(A)p.m(G)p.m(C)p.m(A)p.[fl2r](A)p. | UUATAGAGCAAGA | |
| | m(G)p.m(A)p.[fl2r](A)p.m(C)p.[fl2r](A)p.m(C)p.m(U)p.m(G)p.m(U)p.m(U)[Ssp].m(U)[Ssp].m(U)}$$$$V2.0 | ACACUGUUUU | |
| SSR-0106627 | RNA1{m(U)[Ssp].[fl2r](U)[Rsp].m(A)p.[fl2r](U)p.m(A)p.[fl2r](G)p.m(A)p.m(G)p.m(C)p.[thpyr](A)p.[fl2r] | UUAUAGAGCAAGA | |
| | (A)p.m(G)p.m(A)p.[fl2r](A)p.m(C)p.[fl2r](A)p.m(C)p.m(U)p.m(G)p.m(U)p.m(U)[Ssp].m(U)[Ssp].m(U)}$$$$ | ACACUGUUUU | |
| | V2.0 | | |
| SSR-0106628 | RNA1{m(U)[Ssp].[fl2r](U)[Rsp].m(A)p.[fl2r](U)p.m(A)p.[fl2r](G)p.m(A)p.m(G)p.m(C)p.m(A)p.[thpyr](A)p. | UUAUAGAGCAAGA | |
| | m(G)p.m(A)p.[fl2r](A)p.m(C)p.[fl2r](A)p.m(C)p.m(U)p.m(G)p.m(U)p.m(U)[Ssp].m(U)[Ssp].m(U)}$$$$V2.0 | ACACUGUUUU | |
| SSR-0107427 | RNA1{p.[Rm5d5m](U)[Rsp].[fl2r](U)[Ssp].m(U)[n001S].[fl2r](A)p.m(G)p.[fl2r](A)p.m(G)[n001S].[fl2r](U) | UUUAGAGUGAGG | |
| | p.[fl2r](G)p.m(A)p.m(G)p.m(G)p.m(A)[Ssp].[fl2r](U)[Ssp].m(U)[Ssp].[fl2r](A)[Ssp].m(A)[Ssp].m(A)[n001S] | AUUAAAAUGUU | |
| | .m(A)[Ssp].m(U)[Ssp].m(G)[Ssp].m(U)[Ssp].m(U)}$$$$V2.0 | | |
| SSR-0107428 | RNA1{p.[Rm5d5m](U)[Rsp].[fl2r](U)[Ssp].m(U)[n001S].[fl2r](A)p.m(G)p.[fl2r](A)p.m(G)[n001S].[fl2r](U) | UUUAGAGUGAGG | |
| | p.[fl2r](G)p.m(A)p.m(G)p.m(G)p.m(A)p.[fl2r](U)p.m(U)p.[fl2r](A)p.m(A)p.m(A)[n001S].m(A)p.m(U)p.m( | AUUAAAAUGUU | |
| | G}[Ssp].m(U)[Ssp].m(U)}$$$$V2.0 | | |
| SSR-0108082 | RNA1{p.[Rm5d5m](U)[Rsp].[fl2r](A)[Ssp].m(G)[n001S].[fl2r](A)p.m(C)p.[fl2r](A)p.m(A)[n001S].[fl2r](U)p | UAGACAAUAAAUA | |
| | .[fl2r](A)p.m(A)p.m(A)p.m(U)p.m(A)[Ssp].[fl2r](C)[Ssp].m(C)[Ssp].[fl2r](G)[Ssp].m(A)[Ssp].m(G)[n001S]. | CCGAGGAAUU | |
| | m(G)[Ssp].m(A)[Ssp].m(A)[Ssp].m(U)[Ssp].m(U)}$$$$V2.0 | | |
| SSR-0108084 | RNA1{p.[Rm5d5m](U)[Rsp].[fl2r](A)[Ssp].m(G)[n001S].[fl2r](A)p.m(C)p.[fl2r](A)p.m(A)[n001S].[fl2r](U)p | UAGACAAUAAAUA | |
| | .[fl2r](A)p.m(A)p.m(A)p.m(U)p.m(A)p.[fl2r](C)p.m(C)p.[fl2r](G)p.m(A)p.m(G)[n001S].m(G)p.m(A)p.m(A) | CCGAGGAAUU | |
| | [Ssp].m(U)[Ssp].m(U)}$$$$V2.0 | | |
| SSR-0108085 | RNA1{p.[Rm5d5m](U)[Rsp].[fl2r](A)[Ssp].m(G)[n001S].[fl2r](A)p.m(C)p.[fl2r](A)p.m(A)[n001S].[fl2r] | UAGACAAUAAAUA | |
| | (U)p.[fl2r](A)p.m(A)p.m(A)p.m(U)p.m(A)p.[fl2r](C)p.m(C)p.[fl2r](G)p.m(A)p.m(G)p.m(G)p.m(A)p.m(A) | CCGAGGAAUU | |
| | [Ssp].m(U)[Ssp].m(U)}$$$$V2.0 | | |

TABLE le
Example Passenger Strand Compositions.

| ID | HELM | BASE_SEQUENCE | NAME |
|---|---|---|---|
| SSR-0101596 | RNA1{p.m(A)[sp].m(A)p.m(C)p.m(A)p.m(G)p.m(U)p.[fl2r](G)p.m(U)p.[fl2r](U)p.[fl2r](C)p.[fl2r](U)p. | AACAGUGUUCU | WV-41828 |
| | m(U)p.m(G)p.m(C)p.m(U)p.m(C)p.m(U)p.m(A)p.m(U)p.m(A)[sp].m(A)}\|CHEM1{[GalNAc3C12oyl]}\| | UGCUCUAUAA | |
| | CHEM2{[nC6o]}$CHEM2,RNA1,1:R1-1:R1\|CHEM2,CHEM1,1:R2-1:R1$$$V2.0 | | |
| SSR-0101599 | RNA1{p.m(A)[Ssp].m(A)p.m(C)p.m(A)p.m(G)p.m(U)p.[fl2r](G)p.m(U)p.[fl2r](U)p.[fl2r](C)p.[fl2r](U) | AACAGUGUUCU | WV-42080 |
| | p.m(U)p.m(G)p.m(C)p.m(U)p.m(C)p.m(U)p.m(A)p.m(U)p.m(A)[Ssp].m(A)}\|CHEM1{[GalNAc3C12oy | UGCUCUAUAA | |
| | l]]}\|CHEM2{[nC6o]}$CHEM2,RNA1,1:R1-1:R1\|CHEM2,CHEM1,1:R2-1:R1$$$V2.0 | | |
| SSR-0105234 | RNA1{p.m(G)[Ssp].m(G)p.m(A)p.m(G)p.m(G)p.m(A)p.[fl2r](A)p.m(C)p.[fl2r](C)p.[fl2r](U)p.[fl2r](U) | GGAGGAACCUUC | WV-49615 |
| | p.m(C)p.m(A)p.m(G)p.m(G)p.m(G)p.m(A)p.m(A)p.m(G)p.m(G)[Ssp].m(A)}\|CHEM1{[GalNAc3C12oy | AGGGAAGGA | |
| | l]]}\|CHEM2{[nC6o]}$CHEM2,RNA1,1:R1-1:R1\|CHEM2,CHEM1,1:R2-1:R1$$$V2.0 | | |
| SSR-0106206 | RNA1{m(C)[Ssp].m(U)p.[fl2r](G)p.m(U)p.[fl2r](G)p.m(C)p.[fl2r](U)[n001R].m(G)p.[fl2r](U)p.[fl2r](A) | CUGUGCUGUAA | |
| | p.[fl2r](A)p.m(C)p.[fl2r](A)p.m(C)p.[fl2r](A)[n001R].m(A)p.[fl2r](G)p.m(U)p.[fl2r](A)p.m(G)[Ssp]. | CACAAGUAGA | |
| | m(A)}$$$$V2.0 | | |
| SSR-0106503 | RNA1{m(C)[Ssp].m(U)p.[fl2r](G)p.m(U)p.[fl2r](G)p.m(C)p.[fl2r](U)[n001R].m(G)p.[fl2r](U)p.[fl2r](A) | CUGUGCUGUAA | |
| | p.[fl2r](A)p.m(C)p.[fl2r](A)p.m(C)p.[fl2r](A)p.m(A)p.[fl2r](G)p.m(U)p.[fl2r](A)p.m(G)[Ssp].[fl2r] | CACAAGUAGA | |
| | (A)}$$$$V2.0 | | |
| SSR-0106506 | RNA1{m(C)[Ssp].m(U)p.[fl2r](G)p.m(U)p.[fl2r](G)p.m(C)p.[hexdec2r](U)p.m(G)p.[fl2r](U)p.[fl2r](A) | CUGUGCUGUAA | |
| | p.[fl2r](A)p.m(C)p.[fl2r](A)p.m(C)p.[fl2r](A)p.m(A)p.[fl2r](G)p.m(U)p.[fl2r](A)p.m(G)[Ssp].[fl2r] | CACAAGUAGA | |
| | (A)}$$$$V2.0 | | |
| SSR-0106507 | RNA1{m(C)[Ssp].m(U)p.[fl2r](G)p.m(U)p.[fl2r](G)p.m(C)p.[hexdec2r](U)[n001R].m(G)p.[fl2r](U)p.[f | CUGUGCUGUAA | |
| | 12r](A)p.[fl2r](A)p.m(C)p.[fl2r](A)p.m(C)p.[fl2r](A)p.m(A)p.[fl2r](G)p.m(U)p.[fl2r](A)p.m(G)[Ssp]. | CACAAGUAGA | |
| | [fl2r](A)}$$$$V2.0 | | |
| SSR-0106508 | RNA1{m(C)[Ssp].m(U)p.[fl2r](G)p.m(U)p.[fl2r](G)p.m(C)p.[hexdec2r](U)p.m(G)p.[fl2r](U)p.[fl2r](A) | CUGUGCUGUAA | |
| | p.[fl2r](A)p.m(C)p.[fl2r](A)p.m(C)p.[fl2r](A)[n001R].m(A)p.[fl2r](G)p.m(U)p.[fl2r](A)p.m(G)[Ssp]. | CACAAGUAGA | |
| | [fl2r](A)}$$$$V2.0 | | |
| SSR-0106509 | RNA1{m(C)[Ssp].m(U)p.[fl2r](G)p.m(U)p.[fl2r](G)p.m(C)p.[hexdec2r](U)[n001R].m(G)p.[fl2r](U)p.[f | CUGUGCUGUAA | |
| | 12r](A)p.[fl2r](A)p.m(C)p.[fl2r](A)p.m(C)p.[fl2r](A)[n001R].m(A)p.[fl2r](G)p.m(U)p.[fl2r](A)p.m(G) | CACAAGUAGA | |
| | [Ssp].[fl2r](A)}$$$$V2.0 | | |
| SSR-0106510 | RNA1{m(C)[Ssp].m(U)[Ssp].[fl2r](G)[Ssp].m(U)[Ssp].[fl2r](G)[Ssp].m(C)[Ssp].[hexdec2r](U)[n001R]. | CUGUGCUGUAA | |
| | m(G)p.[fl2r](U)p.[fl2r](A)p.[fl2r](A)p.m(C)p.[fl2r](A)p.m(C)p.[fl2r](A)[n001R].m(A)[Ssp].[fl2r](G) | CACAAGUAGA | |
| | [Ssp].m(U)[Ssp].[fl2r](A)[Ssp].m(G)[Ssp].m(A)}$$$$V2.0 | | |
| SSR-0106511 | RNA1{m(C)[Ssp].m(U)p.[fl2r](G)p.m(U)p.[fl2r](G)p.m(C)p.[fl2r](U)[n029R].m(G)p.[fl2r](U)p.[fl2r](A) | CUGUGCUGUAA | |
| | p.[fl2r](A)p.m(C)p.[fl2r](A)p.m(C)p.[fl2r](A)[n029R].m(A)p.[fl2r](G)p.m(U)p.[fl2r](A)p.m(G)[Ssp]. | CACAAGUAGA | |
| | [fl2r](A)}$$$$V2.0 | | |
| SSR-0106513 | RNA1{m(C)[Ssp].m(U)[Ssp].[fl2r](G)[Ssp].m(U)[Ssp].[fl2r](G)[Ssp].m(C)[Ssp].[fl2r](U)[n029R].m(G)p | CUGUGCUGUAA | |
| | .[fl2r](U)p.[fl2r](A)p.[fl2r](A)p.m(C)p.[fl2r](A)p.m(C)p.[fl2r](A)[n029R].m(A)[Ssp].[fl2r](G)[Ssp]. | CACAAGUAGA | |
| | m(U)[Ssp].[fl2r](A)[Ssp].m(G)[Ssp].m(A)}$$$$V2.0 | | |
| SSR-0106563 | RNA1{m(C)[sp].m(U)p.[fl2r](G)p.m(U)p.[fl2r](G)p.m(C)p.[fl2r](U)[n001].m(G)p.[fl2r](U)p.[fl2r](A)p. | CUGUGCUGUAA | |
| | [fl2r](A)p.m(C)p.[fl2r](A)p.m(C)p.[fl2r](A)[n001].m(A)p.[fl2r](G)p.m(U)p.[fl2r](A)p.m(G)[sp].m(A)} | CACAAGUAGA | |
| | $$$$V2.0 | | |
| SSR-0106589 | RNA1{m(G)[Ssp].m(G)p.[fl2r](A)p.m(G)p.[fl2r](G)p.m(A)p.[fl2r](A)[n001R].m(C)p.[fl2r](C)p.[fl2r](U) | GGAGGAACCUUC | |
| | p.[fl2r](U)p.m(C)p.[fl2r](A)p.m(G)p.[fl2r](G)[n001R].m(G)p.[fl2r](A)p.m(A)p.[fl2r](G)p.m(G)[Ssp].m | AGGGAAGGA | |
| | (A)}$$$$V2.0 | | |
| SSR-0106597 | RNA1{m(C)[sp].m(U)p.[fl2r](G)p.m(U)p.[fl2r](G)p.m(C)p.[hexdec2r](U)p.m(G)p.[fl2r](U)p.[fl2r](A)p. | CUGUGCUGUAA | |
| | [fl2r](A)p.m(C)p.[fl2r](A)p.m(C)p.[fl2r](A)p.m(A)p.[fl2r](G)p.m(U)p.[fl2r](A)p.m(G)[sp].[fl2r](A)}$$$ | CACAAGUAGA | |
| | $V2.0 | | |
| SSR-0106598 | RNA1{m(C)[sp].m(U)p.[fl2r](G)p.m(U)p.[fl2r](G)p.m(C)p.[hexdec2r](U)[n001R].m(G)p.[fl2r](U)p.[fl | CUGUGCUGUAA | |
| | 2r](A)p.[fl2r](A)p.m(C)p.[fl2r](A)p.m(C)p.[fl2r](A)p.m(A)p.[fl2r](G)p.m(U)p.[fl2r](A)p.m(G)[sp].[fl2r] | CACAAGUAGA | |
| | (A)}$$$$V2.0 | | |
| SSR-0106599 | RNA1{m(C)[sp].m(U)p.[fl2r](G)p.m(U)p.[fl2r](G)p.m(C)p.[hexdec2r](U)[n009R].m(G)p.[fl2r](U)p.[fl | CUGUGCUGUAA | |
| | 2r](A)p.[fl2r](A)p.m(C)p.[fl2r](A)p.m(C)p.[fl2r](A)p.m(A)p.[fl2r](G)p.m(U)p.[fl2r](A)p.m(G)[sp].[fl2r] | CACAAGUAGA | |
| | (A)}$$$$V2.0 | | |
| SSR-0106600 | RNA1{m(C)[sp].m(U)p.[fl2r](G)p.m(U)p.[fl2r](G)p.m(C)p.[hexdec2r](U)[n033R].m(G)p.[fl2r](U)p.[fl | CUGUGCUGUAA | |
| | 2r](A)p.[fl2r](A)p.m(C)p.[fl2r](A)p.m(C)p.[fl2r](A)p.m(A)p.[fl2r](G)p.m(U)p.[fl2r](A)p.m(G)[sp].[fl2r] | CACAAGUAGA | |
| | (A)}$$$$V2.0 | | |
| SSR-0106601 | RNA1{m(C)[Ssp].m(U)p.[fl2r](G)p.m(U)p.[fl2r](G)p.m(C)p.[hexdec2r](U)[n009R].m(G)p.[fl2r](U)p.[f | CUGUGCUGUAA | |
| | 12r](A)p.[fl2r](A)p.m(C)p.[fl2r](A)p.m(C)p.[fl2r](A)p.m(A)p.[fl2r](G)p.m(U)p.[fl2r](A)p.m(G)[Ssp].[fl2 | CACAAGUAGA | |
| | r](A)}$$$$V2.0 | | |
| SSR-0106602 | RNA1{m(C)[Ssp].m(U)p.[fl2r](G)p.m(U)p.[fl2r](G)p.m(C)p.[hexdec2r](U)[n033R].m(G)p.[fl2r](U)p.[f | CUGUGCUGUAA | |
| | 12r](A)p.[fl2r](A)p.m(C)p.[fl2r](A)p.m(C)p.[fl2r](A)p.m(A)p.[fl2r](G)p.m(U)p.[fl2r](A)p.m(G)[Ssp].[fl2 | CACAAGUAGA | |
| | r](A)}$$$$V2.0 | | |
| SSR-0106603 | RNA1{m(C)[Ssp].m(U)p.[fl2r](G)p.m(U)p.[fl2r](G)p.m(C)p.[fl2r](U)[n031R].m(G)p.[fl2r](U)p.[fl2r](A) | CUGUGCUGUAA | |
| | p.[fl2r](A)p.m(C)p.[fl2r](A)p.m(C)p.[fl2r](A)p.m(A)p.[fl2r](G)p.m(U)p.[fl2r](A)p.m(G)[Ssp].[fl2r](A)} | CACAAGUAGA | |
| | $$$$V2.0 | | |
| SSR-0106604 | RNA1{m(C)[Ssp].m(U)p.[fl2r](G)p.m(U)p.[fl2r](G)p.m(C)p.[fl2r](U)[n037R].m(G)p.[fl2r](U)p.[fl2r](A) | CUGUGCUGUAA | |
| | p.[fl2r](A)p.m(C)p.[fl2r](A)p.m(C)p.[fl2r](A)p.m(A)p.[fl2r](G)p.m(U)p.[fl2r](A)p.m(G)[Ssp].[fl2r](A)} | CACAAGUAGA | |
| | $$$$V2.0 | | |
| SSR-0106605 | RNA1{m(C)[Ssp].m(U)p.[fl2r](G)p.m(U)p.[fl2r](G)p.m(C)p.[fl2r](U)[n046R].m(G)p.[fl2r](U)p.[fl2r](A) | CUGUGCUGUAA | |
| | p.[fl2r](A)p.m(C)p.[fl2r](A)p.m(C)p.[fl2r](A)p.m(A)p.[fl2r](G)p.m(U)p.[fl2r](A)p.m(G)[Ssp].[fl2r](A)} | CACAAGUAGA | |
| | $$$$V2.0 | | |
| SSR-0106606 | RNA1{m(C)[Ssp].m(U)p.[fl2r](G)p.m(U)p.[fl2r](G)p.m(C)p.[fl2r](U)[n047R].m(G)p.[fl2r](U)p.[fl2r](A) | CUGUGCUGUAA | |
| | p.[fl2r](A)p.m(C)p.[fl2r](A)p.m(C)p.[fl2r](A)p.m(A)p.[fl2r](G)p.m(U)p.[fl2r](A)p.m(G)[Ssp].[fl2r](A)} | CACAAGUAGA | |
| | $$$$V2.0 | | |
| SSR-0106607 | RNA1{m(C)[Ssp].m(U)p.[fl2r](G)p.m(U)p.[fl2r](G)p.m(C)p.[fl2r](U)[n043R].m(G)p.[fl2r](U)p.[fl2r](A) | CUGUGCUGUAA | |
| | p.[fl2r](A)p.m(C)p.[fl2r](A)p.m(C)p.[fl2r](A)p.m(A)p.[fl2r](G)p.m(U)p.[fl2r](A)p.m(G)[Ssp].[fl2r](A)} | CACAAGUAGA | |
| | $$$$V2.0 | | |
| SSR-0106629 | RNA1{p.m(A)[Ssp].m(A)p.m(C)p.m(A)p.m(G)p.m(U)p.[fl2r](G)p.m(U)p.[fl2r](U)p.[fl2r](C)p.[fl2r](U) | AACAGUGUUCU | |
| | p.m(U)p.m(G)p.m(C)p.m(U)p.m(C)p.m(U)p.m(A)p.m(U)p.m(A)[Ssp].[thpyr](A)}\|CHEM1{[nC6o]}\|C | UGCUCUAUAA | |
| | HEM2{[GalNAc3C12oyl]}$CHEM1,RNA1,1:R1-1:R1\|CHEM1,CHEM2,1:R2-1:R1$$$V2.0 | | |
| SSR-0106630 | RNA1{p.m(A)[Ssp].m(A)p.m(C)p.m(A)p.m(G)p.m(U)p.[fl2r](G)p.m(U)p.[fl2r](U)p.[fl2r](C)p.[fl2r](U) | AACAGUGUUCU | |
| | p.m(U)p.m(G)p.m(C)p.m(U)p.m(C)p.m(U)p.[thpyr](A)p.m(U)p.m(A)[Ssp].m(A)}\|CHEM1{[nC6o]}\|C | UGCUCUAUAA | |
| | HEM2{[GalNAc3C12oyl]}$CHEM1,RNA1,1:R1-1:R1\|CHEM1,CHEM2,1:R2-1:R1$$$V2.0 | | |
| SSR-0106631 | RNA1{p.m(A)[Ssp].m(A)p.m(C)p.m(A)p.m(G)p.m(U)p.[fl2r](G)p.m(U)p.[fl2r](U)p.[fl2r](C)p.[fl2r](U) | AACAGUGUUCU | |
| | p.m(U)p.m(G)p.m(C)p.m(U)p.m(C)p.m(U)p.m(A)p.[thpyr](T)p.m(A)[Ssp].m(A)}\|CHEM1{[nC6o]}\|CH | UGCUCUATAA | |
| | EM2{[GalNAc3C12oyl]}$CHEM1,RNA1,1:R1-1:R1\|CHEM1,CHEM2,1:R2-1:R1$$$V2.0 | | |
| SSR-0106632 | RNA1{p.m(A)[Ssp].m(A)p.m(C)p.m(A)p.m(G)p.m(U)p.[fl2r](G)p.m(U)p.[fl2r](U)p.[fl2r](C)p.[fl2r](U) | AACAGUGUUCU | |
| | p.m(U)p.m(G)p.m(C)p.m(U)p.m(C)p.m(U)p.m(A)p.m(U)p.[thpyr](A)[Ssp].m(A)}\|CHEM1{[nC6o]}\|C | UGCUCUAUAA | |
| | HEM2{[GalNAc3C12oyl]}$CHEM1,RNA1,1:R1-1:R1\|CHEM1,CHEM2,1:R2-1:R1$$$V2.0 | | |
| SSR-0106633 | RNA1{p.m(A)[Ssp].m(A)p.m(C)p.m(A)p.m(G)p.m(U)p.[fl2r](G)p.m(U)p.[fl2r](U)p.[fl2r](C)p.[fl2r](U) | AACAGUGUUCU | |
| | p.m(U)p.m(G)p.m(C)p.m(U)p.m(C)p.[thpyr](T)p.m(A)p.m(U)p.m(A)[Ssp].m(A)}\|CHEM1{[nC6o]}\|CH | UGCUCTAUAA | |
| | EM2{[GalNAc3C12oyl]}$CHEM1,RNA1,1:R1-1:R1\|CHEM1,CHEM2,1:R2-1:R1$$$V2.0 | | |
| SSR-0106634 | RNA1{p.m(A)[Ssp].m(A)p.m(C)p.m(A)p.m(G)p.m(U)p.[fl2r](G)p.m(U)p.[fl2r](U)p.[fl2r](C)p.[fl2r](U) | AACAGUGUUCU | |
| | p.m(U)p.m(G)p.[thpyr](C)p.m(U)p.m(C)p.m(U)p.m(A)p.m(U)p.m(A)[Ssp].m(A)}\|CHEM1{[nC6o]}\|C | UGCUCUAUAA | |
| | HEM2{[GalNAc3C12oyl]}$CHEM1,RNA1,1:R1-1:R1\|CHEM1,CHEM2,1:R2-1:R1$$$V2.0 | | |
| SSR-0106635 | RNA1{p.m(A)[Ssp].m(A)p.m(C)p.m(A)p.m(G)p.m(U)p.[fl2r](G)p.m(U)p.[fl2r](U)p.[fl2r](C)p.[fl2r](U) | AACAGUGUUCU | |
| | p.m(U)p.m(G)p.m(C)p.[thpyr](T)p.m(C)p.m(U)p.m(A)p.m(U)p.m(A)[Ssp].m(A)}\|CHEM1{[nC6o]}\|CH | UGCTCUAUAA | |
| | EM2{[GalNAc3C12oyl]}$CHEM1,RNA1,1:R1-1:R1\|CHEM1,CHEM2,1:R2-1:R1$$$V2.0 | | |
| SSR-0106637 | RNA1{p.m(A)[Ssp].m(A)p.m(C)p.m(A)p.m(G)p.m(U)p.[fl2r](G)p.m(U)p.[fl2r](U)p.[fl2r](C)p.[fl2r](U) | AACAGUGUUCU | |
| | p.m(U)p.[thpyr](G)p.m(C)p.m(U)p.m(C)p.m(U)p.m(A)p.m(U)p.m(A)[Ssp].m(A)}\|CHEM1{[nC6o]}\|C | UGCUCUAUAA | |
| | HEM2{[GalNAc3C12oyl]}$CHEM1,RNA1,1:R1-1:R1\|CHEM1,CHEM2,1:R2-1:R1$$$V2.0 | | |
| SSR-0106638 | RNA1{p.m(A)[Ssp].m(A)p.m(C)p.m(A)p.m(G)p.m(U)p.[fl2r](G)p.m(U)p.[fl2r](U)p.[fl2r](C)p.[fl2r](U) | AACAGUGUUCUT | |
| | p.[thpyr](T)p.m(G)p.m(C)p.m(U)p.m(C)p.m(U)p.m(A)p.m(U)p.m(A)[Ssp].m(A)}\|CHEM1{[nC6o]}\|CH | GCUCUAUAA | |
| | EM2{[GalNAc3C12oyl]}$CHEM1,RNA1,1:R1-1:R1\|CHEM1,CHEM2,1:R2-1:R1$$$V2.0 | | |
| SSR-0106640 | RNA1{p.m(A)[Ssp].m(A)p.m(C)p.m(A)p.m(G)p.m(U)p.[fl2r](G)p.m(U)p.[fl2r](U)p.[fl2r](C)p.[fl2r](U) | AACAGUGUUCU | |
| | p.m(U)p.m(G)p.m(C)p.m(U)p.[thpyr](C)p.m(U)p.m(A)p.m(U)p.m(A)[Ssp].m(A)}\|CHEM1{[nC6o]}\|C | UGCUCUAUAA | |
| | HEM2{[GalNAc3C12oyl]}$CHEM1,RNA1,1:R1-1:R1\|CHEM1,CHEM2,1:R2-1:R1$$$V2.0 | | |
| SSR-0106643 | RNA1{p.m(A)[sp].m(A)p.m(C)p.m(A)p.m(G)p.m(U)p.[fl2r](G)p.m(U)p.[fl2r](U)p.[fl2r](C)p.[fl2r](U)p. | AACAGUGUUCU | |
| | m(U)p.m(G)p.m(C)p.m(U)p.m(C)p.m(U)p.m(A)p.m(U)p.[thpyr](A)[sp].m(A)}\|CHEM1{[nC6o]}\|CHE | UGCUCUAUAA | |
| | M2{[GalNAc3C12oyl]}$CHEM1,RNA1,1:R1-1:R1\|CHEM1,CHEM2,1:R2-1:R1$$$V2.0 | | |
| SSR-0107400 | RNA1{m(C)[Ssp].m(A)p.m(U)p.m(U)p.m(U)p.m(U)p.[fl2r](A)[n001R].m(A)p.[fl2r](U)p.[fl2r](C)p.[fl2r | CAUUUUAAUCCU | |
| | ](C)p.m(U)p.m(C)p.m(A)p.m(C)[n001R].m(U)p.m(C)p.m(U)p.m(A)p.m(A)[Ssp].m(A)}$$$$V2.0 | CACUCUAAA | |
| SSR-0107412 | RNA1{m(C)[Ssp].m(A)p.m(U)p.m(U)p.m(U)p.m(U)p.[fl2r](A)[n009R].m(A)p.[fl2r](U)p.[fl2r](C)p.[fl2r | CAUUUUAAUCCU | |
| | ](C)p.m(U)p.m(C)p.m(A)p.m(C)[n009R].m(U)p.m(C)p.m(U)p.m(A)p.m(A)[Ssp].m(A)}$$$$V2.0 | CACUCUAAA | |
| SSR-0107413 | RNA1{m(C)[Ssp].m(A)p.m(U)p.m(U)p.m(U)p.m(U)p.[fl2r](A)[n001R].m(A)p.[fl2r](U)p.[fl2r](C)p.[fl2r | CAUUUUAAUCCU | |
| | (C)p.m(U)p.m(C)p.m(A)p.m(C)p.m(U)p.m(C)p.m(U)p.m(A)p.m(A)[Ssp].m(A)}$$$$V2.0 | CACUCUAAA | |
| SSR-0107414 | RNA1{m(C)[Ssp].m(A)p.m(U)p.m(U)p.m(U)p.m(U)p.[fl2r](A)[n009R].m(A)p.[fl2r](U)p.[fl2r](C)p.[fl2r | CAUUUUAAUCCU | |
| | ](C)p.m(U)p.m(C)p.m(A)p.m(C)p.m(U)p.m(C)p.m(U)p.m(A)p.m(A)[Ssp].m(A)}$$$$V2.0 | CACUCUAAA | |
| SSR-0107415 | RNA1{m(C)[Ssp].m(A)p.m(U)p.m(U)p.m(U)p.m(U)p.[fl2r](A)[n039R].m(A)p.[fl2r](U)p.[fl2r](C)p.[fl2r | CACUCUAAA | |
| | ](C)p.m(U)p.m(C)p.m(A)p.m(C)p.m(U)p.m(C)p.m(U)p.m(A)p.m(A)[Ssp].m(A)}$$$$V2.0 | CAUUUUAAUCCU | |
| SSR-0107419 | RNA1{m(C)[Ssp].m(A)p.m(U)p.m(U)p.m(U)p.m(U)p.[fl2r](A)[n009R].m(A)p.[fl2r](U)p.[fl2r](C)p.[fl2r | CAUUUUAAUCCU | |
| | ](C)p.m(U)p.m(C)p.m(A)p.m(C)[n001R].m(U)p.m(C)p.m(U)p.m(A)p.m(A)[Ssp].m(A)}$$$$V2.0 | CACUCUAAA | |
| SSR-0107420 | RNA1{m(C)[Ssp].m(A)p.m(U)p.m(U)p.m(U)p.m(U)p.[fl2r](A)[n033R].m(A)p.[fl2r](U)p.[fl2r](C)p.[fl2r | CAUUUUAAUCCU | |
| | ](C)p.m(U)p.m(C)p.m(A)p.m(C)[n001R].m(U)p.m(C)p.m(U)p.m(A)p.m(A)[Ssp].m(A)}$$$$V2.0 | CACUCUAAA | |
| SSR-0107421 | RNA1{m(C)[Ssp].m(A)p.m(U)p.m(U)p.m(U)p.m(U)p.[fl2r](A)[n033R].m(A)p.[fl2r](U)p.[fl2r](C)p.[fl2r | CAUUUUAAUCCU | |
| | ](C)p.m(U)p.m(C)p.m(A)p.m(C)p.m(U)p.m(C)p.m(U)p.m(A)p.m(A)[Ssp].m(A)}$$$$V2.0 | CACUCUAAA | |
| SSR-0108086 | RNA1{m(U)[Ssp].m(U)p.m(C)p.m(C)p.m(U)p.m(C)p.[fl2r](G)[n009R].m(G)p.[fl2r](U)p.[fl2r](A)p.[fl2r | UUCCUCGGUAU | |
| | ](U)p.m(U)p.m(U)p.m(A)p.m(U)[n009R].m(U)p.m(G)p.m(U)p.m(C)p.m(U)[Ssp].m(A)}$$$$V2.0 | UUAUUGUCUA | |

TABLE 1f
Example Oligonucleotides/Compositions

| Duplex | Guide | Passenger |
|---|---|---|
| DSR-0101651 | SSR-0104720 | SSR-0101596 |
| DSR-0102161 | SSR-0104474 | SSR-0101599 |
| DSR-0102524 | SSR-0104475 | SSR-0101599 |
| DSR-0102630 | SSR-0104036 | SSR-0104097 |
| DSR-0102631 | SSR-0104066 | SSR-0104097 |
| DSR-0102632 | SSR-0104052 | SSR-0104021 |
| DSR-0102633 | SSR-0104082 | SSR-0104021 |
| DSR-0102634 | SSR-0104031 | SSR-0104099 |
| DSR-0102635 | SSR-0104061 | SSR-0104099 |
| DSR-0102636 | SSR-0104037 | SSR-0104026 |
| DSR-0102637 | SSR-0104067 | SSR-0104026 |
| DSR-0102638 | SSR-0104035 | SSR-0104030 |
| DSR-0102639 | SSR-0104065 | SSR-0104030 |
| DSR-0102640 | SSR-0104043 | SSR-0104092 |
| DSR-0102641 | SSR-0104073 | SSR-0104092 |
| DSR-0102661 | SSR-0104054 | SSR-0104022 |
| DSR-0102662 | SSR-0104084 | SSR-0104022 |
| DSR-0102663 | SSR-0104053 | SSR-0104022 |
| DSR-0102664 | SSR-0104083 | SSR-0104022 |
| DSR-0102665 | SSR-0104039 | SSR-0104027 |
| DSR-0102666 | SSR-0104069 | SSR-0104027 |
| DSR-0102667 | SSR-0104038 | SSR-0104027 |
| DSR-0102668 | SSR-0104068 | SSR-0104027 |
| DSR-0102669 | SSR-0104045 | SSR-0104094 |
| DSR-0102670 | SSR-0104075 | SSR-0104094 |
| DSR-0102671 | SSR-0104044 | SSR-0104094 |
| DSR-0102672 | SSR-0104074 | SSR-0104094 |
| DSR-0103133 | SSR-0106188 | SSR-0104027 |
| DSR-0103134 | SSR-0106190 | SSR-0104027 |
| DSR-0103135 | SSR-0106180 | SSR-0104027 |
| DSR-0103136 | SSR-0106181 | SSR-0104027 |
| DSR-0103137 | SSR-0104101 | SSR-0104029 |
| DSR-0103138 | SSR-0106185 | SSR-0104026 |
| DSR-0103139 | SSR-0106189 | SSR-0104026 |
| DSR-0103140 | SSR-0106195 | SSR-0104026 |
| DSR-0103141 | SSR-0106172 | SSR-0104026 |
| DSR-0103142 | SSR-0106184 | SSR-0104026 |
| DSR-0103143 | SSR-0106189 | SSR-0104027 |
| DSR-0103144 | SSR-0106170 | SSR-0104027 |
| DSR-0103145 | SSR-0106172 | SSR-0104027 |
| DSR-0103146 | SSR-0106178 | SSR-0104027 |
| DSR-0103147 | SSR-0106194 | SSR-0104026 |
| DSR-0103148 | SSR-0106178 | SSR-0104026 |
| DSR-0103149 | SSR-0106181 | SSR-0104026 |
| DSR-0103150 | SSR-0106187 | SSR-0104027 |
| DSR-0103151 | SSR-0106197 | SSR-0104027 |
| DSR-0103152 | SSR-0106174 | SSR-0104027 |
| DSR-0103153 | SSR-0106191 | SSR-0104026 |
| DSR-0103154 | SSR-0106179 | SSR-0104026 |
| DSR-0103155 | SSR-0106182 | SSR-0104026 |
| DSR-0103156 | SSR-0106186 | SSR-0104027 |
| DSR-0103157 | SSR-0106173 | SSR-0104027 |
| DSR-0103158 | SSR-0106176 | SSR-0104027 |
| DSR-0103159 | SSR-0106184 | SSR-0104027 |
| DSR-0103160 | SSR-0106187 | SSR-0104026 |
| DSR-0103161 | SSR-0106188 | SSR-0104026 |
| DSR-0103162 | SSR-0106176 | SSR-0104026 |
| DSR-0103163 | SSR-0106177 | SSR-0104026 |
| DSR-0103164 | SSR-0106183 | SSR-0104026 |
| DSR-0103165 | SSR-0106185 | SSR-0104027 |
| DSR-0103166 | SSR-0106193 | SSR-0104027 |
| DSR-0103167 | SSR-0106175 | SSR-0104027 |
| DSR-0103168 | SSR-0106186 | SSR-0104026 |
| DSR-0103169 | SSR-0106190 | SSR-0104026 |
| DSR-0103170 | SSR-0106192 | SSR-0104026 |
| DSR-0103171 | SSR-0106175 | SSR-0104026 |
| DSR-0103172 | SSR-0104039 | SSR-0104026 |
| DSR-0103173 | SSR-0106180 | SSR-0104026 |
| DSR-0103174 | SSR-0106192 | SSR-0104027 |
| DSR-0103175 | SSR-0106195 | SSR-0104027 |
| DSR-0103176 | SSR-0106171 | SSR-0104027 |
| DSR-0103177 | SSR-0106179 | SSR-0104027 |
| DSR-0103178 | SSR-0106197 | SSR-0104026 |
| DSR-0103179 | SSR-0106171 | SSR-0104026 |
| DSR-0103180 | SSR-0106174 | SSR-0104026 |
| DSR-0103181 | SSR-0106194 | SSR-0104027 |
| DSR-0103182 | SSR-0106196 | SSR-0104027 |
| DSR-0103183 | SSR-0106182 | SSR-0104027 |
| DSR-0103184 | SSR-0106193 | SSR-0104026 |
| DSR-0103185 | SSR-0106170 | SSR-0104026 |
| DSR-0103186 | SSR-0106191 | SSR-0104027 |
| DSR-0103187 | SSR-0106177 | SSR-0104027 |
| DSR-0103188 | SSR-0106183 | SSR-0104027 |
| DSR-0103189 | SSR-0104037 | SSR-0104027 |
| DSR-0103190 | SSR-0104100 | SSR-0104028 |
| DSR-0103191 | SSR-0106196 | SSR-0104026 |
| DSR-0103192 | SSR-0106173 | SSR-0104026 |
| DSR-0103199 | SSR-0106222 | SSR-0104026 |
| DSR-0103200 | SSR-0106225 | SSR-0104026 |
| DSR-0103201 | SSR-0106188 | SSR-0106208 |
| DSR-0103202 | SSR-0106188 | SSR-0106210 |
| DSR-0103203 | SSR-0106188 | SSR-0106212 |
| DSR-0103204 | SSR-0106188 | SSR-0106218 |
| DSR-0103205 | SSR-0106224 | SSR-0104026 |
| DSR-0103206 | SSR-0106183 | SSR-0106447 |
| DSR-0103207 | SSR-0106188 | SSR-0106211 |
| DSR-0103208 | SSR-0106188 | SSR-0106215 |
| DSR-0103209 | SSR-0106188 | SSR-0106217 |
| DSR-0103210 | SSR-0104100 | SSR-0106445 |
| DSR-0103211 | SSR-0104100 | SSR-0106446 |
| DSR-0103212 | SSR-0106188 | SSR-0106207 |
| DSR-0103213 | SSR-0106188 | SSR-0106213 |
| DSR-0103214 | SSR-0106188 | SSR-0106214 |
| DSR-0103215 | SSR-0106188 | SSR-0106219 |
| DSR-0103216 | SSR-0106223 | SSR-0104026 |
| DSR-0103217 | SSR-0106183 | SSR-0106448 |
| DSR-0103218 | SSR-0106183 | SSR-0106452 |
| DSR-0103219 | SSR-0106188 | SSR-0106206 |
| DSR-0103220 | SSR-0106188 | SSR-0106216 |
| DSR-0103221 | SSR-0106220 | SSR-0104026 |
| DSR-0103222 | SSR-0106221 | SSR-0104026 |
| DSR-0103223 | SSR-0106183 | SSR-0106449 |
| DSR-0103224 | SSR-0106183 | SSR-0106450 |
| DSR-0103225 | SSR-0106183 | SSR-0106451 |
| DSR-0103226 | SSR-0106188 | SSR-0106209 |
| DSR-0103227 | SSR-0106266 | SSR-0101599 |
| DSR-0103228 | SSR-0106267 | SSR-0101599 |
| DSR-0103229 | SSR-0106268 | SSR-0101599 |
| DSR-0103230 | SSR-0106269 | SSR-0101599 |
| DSR-0103231 | SSR-0106270 | SSR-0101599 |
| DSR-0103232 | SSR-0106271 | SSR-0101599 |
| DSR-0103233 | SSR-0106272 | SSR-0101599 |
| DSR-0103234 | SSR-0106273 | SSR-0101599 |
| DSR-0103235 | SSR-0106274 | SSR-0101599 |
| DSR-0103236 | SSR-0106275 | SSR-0101599 |
| DSR-0103237 | SSR-0106276 | SSR-0101599 |
| DSR-0103238 | SSR-0106277 | SSR-0101599 |
| DSR-0103239 | SSR-0106278 | SSR-0101599 |
| DSR-0103240 | SSR-0106279 | SSR-0101599 |
| DSR-0103241 | SSR-0106280 | SSR-0101599 |
| DSR-0103242 | SSR-0106281 | SSR-0101599 |
| DSR-0103243 | SSR-0106282 | SSR-0101599 |
| DSR-0103244 | SSR-0106283 | SSR-0101599 |
| DSR-0103245 | SSR-0106284 | SSR-0101599 |
| DSR-0103246 | SSR-0106285 | SSR-0101599 |
| DSR-0103247 | SSR-0106286 | SSR-0101599 |
| DSR-0103248 | SSR-0106287 | SSR-0101599 |
| DSR-0103249 | SSR-0106288 | SSR-0101599 |
| DSR-0103250 | SSR-0106289 | SSR-0101599 |
| DSR-0103251 | SSR-0106290 | SSR-0101599 |
| DSR-0103252 | SSR-0106291 | SSR-0101599 |
| DSR-0103253 | SSR-0106292 | SSR-0101599 |
| DSR-0103254 | SSR-0106293 | SSR-0101599 |
| DSR-0103255 | SSR-0106294 | SSR-0101599 |
| DSR-0103256 | SSR-0106295 | SSR-0101599 |
| DSR-0103257 | SSR-0106296 | SSR-0101599 |
| DSR-0103258 | SSR-0106297 | SSR-0101599 |
| DSR-0103259 | SSR-0106298 | SSR-0101599 |
| DSR-0103260 | SSR-0106299 | SSR-0101599 |
| DSR-0103261 | SSR-0106300 | SSR-0101599 |
| DSR-0103262 | SSR-0106301 | SSR-0101599 |
| DSR-0103263 | SSR-0106302 | SSR-0101599 |
| DSR-0103264 | SSR-0106303 | SSR-0101599 |
| DSR-0103265 | SSR-0106304 | SSR-0101599 |
| DSR-0103266 | SSR-0106305 | SSR-0101599 |
| DSR-0103267 | SSR-0106306 | SSR-0101599 |
| DSR-0103268 | SSR-0106307 | SSR-0101599 |
| DSR-0103275 | SSR-0106183 | SSR-0106206 |
| DSR-0103276 | SSR-0106183 | SSR-0106209 |
| DSR-0103299 | SSR-0106222 | SSR-0106206 |
| DSR-0103300 | SSR-0106222 | SSR-0106209 |
| DSR-0103301 | SSR-0106222 | SSR-0106447 |
| DSR-0103319 | SSR-0106480 | SSR-0106206 |
| DSR-0103320 | SSR-0106481 | SSR-0106206 |
| DSR-0103321 | SSR-0106482 | SSR-0106206 |
| DSR-0103322 | SSR-0106483 | SSR-0106206 |
| DSR-0103323 | SSR-0106484 | SSR-0106206 |
| DSR-0103324 | SSR-0106487 | SSR-0106206 |
| DSR-0103325 | SSR-0104037 | SSR-0106206 |
| DSR-0103326 | SSR-0106479 | SSR-0106206 |
| DSR-0103337 | SSR-0104103 | SSR-0104107 |
| DSR-0103338 | SSR-0104104 | SSR-0104024 |
| DSR-0103339 | SSR-0104102 | SSR-0104106 |
| DSR-0103340 | SSR-0104105 | SSR-0104025 |
| DSR-0102626 | SSR-0104473 | SSR-0101599 |
| DSR-0102657 | SSR-0105217 | SSR-0105234 |
| DSR-0103028 | SSR-0104717 | SSR-0101596 |
| DSR-0103099 | SSR-0105245 | SSR-0101599 |
| DSR-0103327 | SSR-0106453 | SSR-0101599 |
| DSR-0103328 | SSR-0106454 | SSR-0101599 |
| DSR-0103329 | SSR-0106455 | SSR-0101599 |
| DSR-0103330 | SSR-0106456 | SSR-0101599 |
| DSR-0103331 | SSR-0106457 | SSR-0101599 |
| DSR-0103342 | SSR-0106584 | SSR-0106563 |
| DSR-0103343 | SSR-0104100 | SSR-0106563 |
| DSR-0103359 | SSR-0104186 | SSR-0101599 |
| DSR-0103360 | SSR-0106620 | SSR-0101599 |
| DSR-0103361 | SSR-0104189 | SSR-0101599 |
| DSR-0103362 | SSR-0106621 | SSR-0101599 |
| DSR-0103363 | SSR-0106530 | SSR-0101599 |
| DSR-0103364 | SSR-0104475 | SSR-0106630 |
| DSR-0103365 | SSR-0106527 | SSR-0101599 |
| DSR-0103366 | SSR-0106528 | SSR-0101599 |
| DSR-0103367 | SSR-0106533 | SSR-0101599 |
| DSR-0103368 | SSR-0106536 | SSR-0101599 |
| DSR-0103369 | SSR-0106625 | SSR-0101599 |
| DSR-0103370 | SSR-0106520 | SSR-0101596 |
| DSR-0103371 | SSR-0104475 | SSR-0106629 |
| DSR-0103372 | SSR-0106532 | SSR-0101599 |
| DSR-0103373 | SSR-0104475 | SSR-0106640 |
| DSR-0103374 | SSR-0104475 | SSR-0106637 |
| DSR-0103375 | SSR-0104475 | SSR-0106638 |
| DSR-0103376 | SSR-0106522 | SSR-0101599 |
| DSR-0103377 | SSR-0106523 | SSR-0101599 |
| DSR-0103378 | SSR-0106524 | SSR-0101599 |
| DSR-0103379 | SSR-0106526 | SSR-0101599 |
| DSR-0103380 | SSR-0106534 | SSR-0101599 |
| DSR-0103381 | SSR-0106627 | SSR-0101599 |
| DSR-0103382 | SSR-0104475 | SSR-0106632 |
| DSR-0103383 | SSR-0104475 | SSR-0106633 |
| DSR-0103384 | SSR-0104475 | SSR-0106634 |
| DSR-0103385 | SSR-0104717 | SSR-0106643 |
| DSR-0103386 | SSR-0106626 | SSR-0101599 |
| DSR-0103387 | SSR-0106628 | SSR-0101599 |
| DSR-0103388 | SSR-0104475 | SSR-0106635 |
| DSR-0103389 | SSR-0106525 | SSR-0101599 |
| DSR-0103390 | SSR-0106535 | SSR-0101599 |
| DSR-0103391 | SSR-0106537 | SSR-0101599 |
| DSR-0103392 | SSR-0106538 | SSR-0101599 |
| DSR-0103393 | SSR-0106539 | SSR-0101599 |
| DSR-0103394 | SSR-0104475 | SSR-0106631 |
| DSR-0103395 | SSR-0106521 | SSR-0101599 |
| DSR-0103396 | SSR-0106529 | SSR-0101599 |
| DSR-0103397 | SSR-0106531 | SSR-0101599 |
| DSR-0103399 | SSR-0106180 | SSR-0106595 |
| DSR-0103404 | SSR-0106183 | SSR-0106603 |
| DSR-0103408 | SSR-0106183 | SSR-0106510 |
| DSR-0103409 | SSR-0106183 | SSR-0106604 |
| DSR-0103411 | SSR-0106183 | SSR-0106506 |
| DSR-0103412 | SSR-0106183 | SSR-0106511 |
| DSR-0103414 | SSR-0106183 | SSR-0106508 |
| DSR-0103415 | SSR-0106183 | SSR-0106513 |
| DSR-0103416 | SSR-0106183 | SSR-0106503 |
| DSR-0103418 | SSR-0106183 | SSR-0106598 |
| DSR-0103419 | SSR-0106183 | SSR-0106600 |
| DSR-0103420 | SSR-0106183 | SSR-0106602 |
| DSR-0103424 | SSR-0106183 | SSR-0106509 |
| DSR-0103425 | SSR-0106183 | SSR-0106601 |
| DSR-0103426 | SSR-0106183 | SSR-0106605 |
| DSR-0103427 | SSR-0106183 | SSR-0106606 |
| DSR-0103428 | SSR-0106183 | SSR-0106607 |
| DSR-0103429 | SSR-0106183 | SSR-0106507 |
| DSR-0103430 | SSR-0106183 | SSR-0106597 |
| DSR-0103431 | SSR-0106183 | SSR-0106599 |
| DSR-0103432 | SSR-0106587 | SSR-0106589 |
| DSR-0103712 | SSR-0106224 | SSR-0106206 |
| DSR-0103713 | SSR-0106516 | SSR-0106206 |
| DSR-0103714 | SSR-0106517 | SSR-0106206 |
| DSR-0103715 | SSR-0106514 | SSR-0106206 |
| DSR-0103716 | SSR-0106515 | SSR-0106206 |
| DSR-0103717 | SSR-0106518 | SSR-0106206 |
| DSR-0103718 | SSR-0106512 | SSR-0106206 |
| DSR-0103719 | SSR-0106519 | SSR-0106206 |
| DSR-0103966 | SSR-0107427 | SSR-0107400 |
| DSR-0103967 | SSR-0107427 | SSR-0107419 |
| DSR-0103968 | SSR-0107427 | SSR-0107420 |
| DSR-0103969 | SSR-0107427 | SSR-0107412 |
| DSR-0103970 | SSR-0107427 | SSR-0107413 |
| DSR-0103971 | SSR-0107427 | SSR-0107414 |
| DSR-0103972 | SSR-0107427 | SSR-0107421 |
| DSR-0103973 | SSR-0107427 | SSR-0107415 |
| DSR-0104104 | SSR-0107428 | SSR-0107412 |
| DSR-0104105 | SSR-0108082 | SSR-0108086 |
| DSR-0104106 | SSR-0108084 | SSR-0108086 |
| DSR-0104107 | SSR-0108085 | SSR-0108086 |
| DSR-0104213 | SSR-0106222 | SSR-0106485 |
| DSR-0104214 | SSR-0106222 | SSR-0106564 |
| DSR-0104215 | SSR-0106222 | SSR-0106565 |
| DSR-0104216 | SSR-0106222 | SSR-0106566 |
| DSR-0104217 | SSR-0106222 | SSR-0106568 |
| DSR-0104218 | SSR-0106222 | SSR-0106569 |
| DSR-0104219 | SSR-0106222 | SSR-0106570 |
| DSR-0104220 | SSR-0106222 | SSR-0106571 |
| DSR-0104221 | SSR-0106222 | SSR-0106576 |
| DSR-0104222 | SSR-0106222 | SSR-0106577 |
| DSR-0104223 | SSR-0106222 | SSR-0106578 |
| DSR-0104224 | SSR-0106222 | SSR-0106652 |
| DSR-0104225 | SSR-0106222 | SSR-0106653 |
| DSR-0104226 | SSR-0106222 | SSR-0106579 |
| DSR-0104227 | SSR-0106222 | SSR-0106573 |
| DSR-0104228 | SSR-0106222 | SSR-0106575 |
| DSR-0104229 | SSR-0106222 | SSR-0106679 |
| DSR-0104230 | SSR-0106222 | SSR-0106580 |
| DSR-0104231 | SSR-0106222 | SSR-0106660 |
| DSR-0104232 | SSR-0106222 | SSR-0106503 |
| DSR-0104233 | SSR-0106222 | SSR-0106507 |
| DSR-0104234 | SSR-0106222 | SSR-0106665 |
| DSR-0104235 | SSR-0106222 | SSR-0106666 |
| DSR-0104236 | SSR-0106222 | SSR-0106601 |
| DSR-0104237 | SSR-0106222 | SSR-0106602 |
| DSR-0104238 | SSR-0106222 | SSR-0106661 |
| DSR-0104239 | SSR-0106222 | SSR-0106662 |
| DSR-0104240 | SSR-0106222 | SSR-0106663 |
| DSR-0104241 | SSR-0106222 | SSR-0106664 |

TABLE 1g
Example Oligonucleotides/Compositions

| | | BASE | NAME |
|---|---|---|---|
| ID | HELM | SEQUENCE | |
| ASO-0104323 | RNA1{[moe](T)[sp].[moe]([m5C])[sp].[moe](A)[sp]. | TCACTTTC | WV- |
| | [moe]([m5C])[sp].[moe](T)[sp].[moe](T)[sp].[moe | ATAATGCT | 2782 |
| | ](T)[sp].[moe]([m5C])[sp].[moe](A)[sp].[moe](T) | GG | |
| | [sp].[moe](A)[sp].[moe](A)[sp].[moe](T)[sp]. | | |
| | [moe](G)[sp].[moe]([m5C])[sp].[moe](T)[sp]. | | |
| | [moe](G)[sp].[moe](G)}$$$$V2.0 | | |
| ASO-0109259 | RNA1{m(C)[Ssp].[moe]([m5C])p.[moe](T)p.[moe] | CCTCACTC | WV- |
| | ([m5C])p.m(A)[Ssp].d(C)[Ssp].d(T)[Ssp].d(C)[Rsp]. | ACCCACTC | 8012 |
| | d(A)[Ssp].d(C)[Ssp].d(C)[Rsp].d(C)[Ssp].d(A)[Ssp]. | GCCA | |
| | d(C)[Ssp].d(T)[Ssp].m(C)[Ssp].m(G)[Ssp].m(C)[Ssp]. | | |
| | m(C)[Ssp].m(A)}$$$$V2.0 | | |
| ASO-0100157 | RNA1{m(U)[sp].m(C)[sp].m(A)[sp].m(A)[sp].m(G)[sp]. | UCAAGGAA | WV- |
| or | m(G)[sp].m(A)[sp].m(A)[sp].m(G)[sp].m(A)[sp].m(U) | GAUGGCAU | 942 |
| ASO-0100157- | [sp].m(G)[sp].m(G)[sp].m(C)[sp].m(A)[sp].m(U)[sp]. | UUCU | |
| 004) | m(U)[sp].m(U)[sp].m(C)[sp].m(U)}$$$$V2.0 | | |
| ASO-0136356 | RNA1{d(T)[sp].d(C)[sp].d(G)[sp].d(T)[sp].d(C)[sp]. | TCGTCGTT | WV- |
| | d(G)[sp].d(T)[sp].d(T)[sp].d(T)[sp].d(T)[sp].d(G) | TTGTCGTT | 2021 |
| | [sp].d(T)[sp].d(C)[sp].d(G)[sp].d(T)[sp].d(T)[sp]. | TTGTCGTT | |
| | d(T)[sp].d(T)[sp].d(G)[sp].d(T)[sp].d(C)[sp].d(G) | | |
| | [sp].d(T)[sp].d(T)}$$$$V2.0 | | |

### Notes

[0871] Such notation language is described in Zhang, T. et. al. Chem. Inf Model. 2012, 52, 10, 2796-2806 and Milton, J. et al. J. Chem. Inf Model. 2017, 57, 6, 1233-1239. Description, Base Sequence and Stereochemistry/Linkage, due to their length, may be divided into multiple lines in Table 1. Unless otherwise specified, all oligonucleotides in Table 1 are single-stranded. As appreciated by those skilled in the art, nucleoside units are unmodified and contain unmodified nucleobases and 2′-deoxy sugars unless otherwise indicated (e.g., with r, m, etc.); linkages, unless otherwise indicated, are natural phosphate linkages; and acidic/basic groups may independently exist in their salt forms. If a sugar is not specified, the sugar is a natural DNA sugar; and if an internucleotidic linkage is not specified, the internucleotidic linkage is a natural phosphate linkage. Moieties and modifications:
[0872] m: 2′-OMe;
[0873] f or [fl2r]: 2′-F;
[0874] O, PO, p: phosphodiester (phosphate). It can a linkage or be an end group (or a component thereof), e.g., a linkage between a linker and an oligonucleotide chain, an internucleotidic linkage (a natural phosphate linkage), etc. Phosphodiesters are typically indicated with “O” in the Stereochemistry/Linkage column and are typically not marked in the Description column (if it is an end group, e.g., a 5′-end group, it is indicated in the Description and typically not in Stereochemistry/Linkage); if no linkage is indicated in the Description column, it is typically a phosphodiester unless otherwise indicated. Note that a phosphate linkage between a linker (e.g., L001) and an oligonucleotide chain may not be marked in the Description column, but may be indicated with “O” in the Stereochemistry/Linkage column;
[0875] *, PS, sp: Phosphorothioate. It can be an end group (if it is an end group, e.g., a 5′-end group, it is indicated in the Description and typically not in Stereochemistry/Linkage), or a linkage, e.g., a linkage between linker (e.g., L001) and an oligonucleotide chain, an internucleotidic linkage (a phosphorothioate internucleotidic linkage), etc.;
[0876] R, Rp, or [Rsp]: Phosphorothioate or phosophoryl guanidine in the Rp configuration. Note that *R in Description indicates a single phosphorothioate or phosphoryl guanidine linkage in the Rp configuration;
[0877] S, Sp, or [Ssp]: Phosphorothioate or phosphoryl guanidine in the Sp configuration. Note that *S in Description indicates a single phosphorothioate or phosphoryl guanidine linkage in the Sp configuration;
[0878] X: stereorandom phosphorothioate or phosphoryl guanidine;
[0879] CHEM1: ligand;
[0880] CHEM2: 5′-linker;

[chemical structure]

[0881] nX: stereorandom n001;
[0882] nR or n001R or [n001R]: n001 in Rp configuration;
[0883] nS or n001S or [n001S]: n001 in Sp configuration;

[chemical structure]

[0884] nX: stereorandom n002;
[0885] nR or n002R: n002 in Rp configuration;
[0886] nS or n002S: n002 in Sp configuration;

[chemical structure]

[0887] nX: stereorandom n003;
[0888] nR or n003R: n003 in Rp configuration;
[0889] nS or n003S: n003 in Sp configuration;

[chemical structure]

[0890] nX: stereorandom n004;
[0891] nR or n004R: n004 in Rp configuration;
[0892] nS or n004S: n004 in Sp configuration;

[chemical structure]

[0893] nX: stereorandom n006;
[0894] nR or n006R: n006 in Rp configuration;
[0895] nS or n006S: n006 in Sp configuration;

[chemical structure]

[0896] nX: stereorandom n008;
[0897] nR or n008R: n008 in Rp configuration;
[0898] nS or n008S: n008 in Sp configuration;

[chemical structure]

[0899] nX: stereorandom n009;
[0900] nR or n009R: n009 in Rp configuration;
[0901] nS or n009S: n009 in Sp configuration;

[chemical structure]

[0902] nX: stereorandom n012;
[0903] nR or n012R: n012 in Rp configuration;
[0904] nS or n012S: n012 in Sp configuration;

[chemical structure]

[0905] nX: stereorandom n020;
[0906] nR or n020R: n020 in Rp configuration;
[0907] nS or n020S: n020 in Sp configuration;

[chemical structure]

[0908] nX: stereorandom n021;
[0909] nR or n021R: n021 in Rp configuration;
[0910] nS or n021S: n021 in Sp configuration;

[chemical structure]

[0911] nX: stereorandom n025;
[0912] nR or n025R: n025 in Rp configuration;
[0913] nS or n025S: n025 in Sp configuration;

[chemical structure]

[0914] nX: stereorandom n026;
[0915] nR or n026R: n026 in Rp configuration;
[0916] nS or n026S: n026 in Sp configuration;

[chemical structure]

[0917] nX: stereorandom n029;
[0918] nR or n029R: n029 in Rp configuration;
[0919] nS or n029S: n029 in Sp configuration;

[chemical structure]

[0920] nX: stereorandom n030;
[0921] nR or n030R: n030 in Rp configuration;
[0922] nS or n030S: n030 in Sp configuration;

[chemical structure]

[0923] nX: stereorandom n031;
[0924] nR or n031R: n031 in Rp configuration;
[0925] nS or n031S: n031 in Sp configuration;

[chemical structure]

[0926] nX: stereorandom n033;
[0927] nR or n033R: n033 in Rp configuration;
[0928] nS or n033S: n033 in Sp configuration;

[chemical structure]

[0929] nX: stereorandom n034;
[0930] nR or n034R: n034 in Rp configuration;
[0931] nS or n034S: n034 in Sp configuration;

[chemical structure]

[0932] nX: stereorandom n035;
[0933] nR or n035R: n035 in Rp configuration;
[0934] nS or n035S: n035 in Sp configuration;

[chemical structure]

[0935] nX: stereorandom n036;
[0936] nR or n036R: n036 in Rp configuration;
[0937] nS or n036S: n036 in Sp configuration;

[chemical structure]

[0938] nX: stereorandom n037;
[0939] nR or n037R: n037 in Rp configuration;
[0940] nS or n037S: n037 in Sp configuration;

[chemical structure]

[0941] nX: stereorandom n039;
[0942] nR or n039R: n039 in Rp configuration;
[0943] nS or n039S: n039 in Sp configuration;

[chemical structure]

[0944] nX: stereorandom n040;
[0945] nR or n040R: n040 in Rp configuration;
[0946] nS or n040S: n040 in Sp configuration;

[chemical structure]

[0947] nX: stereorandom n041;
[0948] nR or n041R: n041 in Rp configuration;
[0949] nS or n041S: n041 in Sp configuration;

[chemical structure]

[0950] nX: stereorandom n043;
[0951] nR or n043R: n043 in Rp configuration;
[0952] nS or n043S: n043 in Sp configuration;

[chemical structure]

[0953] nX: stereorandom n045;
[0954] nR or n045R: n045 in Rp configuration;
[0955] nS or n045S: n045 in Sp configuration;

[chemical structure]

[0956] nX: stereorandom n046;
[0957] nR or n046R: n046 in Rp configuration;
[0958] nS or n046S: n046 in Sp configuration;

[chemical structure]

[0959] nX: stereorandom n047;
[0960] nR or n047R: n047 in Rp configuration;
[0961] nS or n047S: n047 in Sp configuration;

[chemical structure]

[0962] nX: stereorandom n051;
[0963] nR or n051R: n051 in Rp configuration;
[0964] nS or n051S: n051 in Sp configuration;

[chemical structure]

[0965] nX: stereorandom n052;
[0966] nR or n052R: n052 in Rp configuration;
[0967] nS or n052S: n052 in Sp configuration;

[chemical structure]

[0968] nX: stereorandom n054;
[0969] nR or n054R: n054 in Rp configuration;
[0970] nS or n054S: n054 in Sp configuration;

[chemical structure]

[0971] nX: stereorandom n055;
[0972] nR or n055R: n055 in Rp configuration;
[0973] nS or n055S: n055 in Sp configuration;

[chemical structure]

[0974] nX: stereorandom n058;
[0975] nR or n058R: n058 in Rp configuration;
[0976] nS or n058S: n058 in Sp configuration;

[chemical structure]

[0977] nX: stereorandom n060;
[0978] nR or n060R: n060 in Rp configuration;
[0979] nS or n060S: n060 in Sp configuration;

[chemical structure]

[0980] nX: stereorandom n061;
[0981] nR or n061R: n061 in Rp configuration;
[0982] nS or n061S: n061 in Sp configuration;

[chemical structure]

[chemical structure]

[0983] nX: stereorandom n062;
[0984] nR or n062R: n062 in Rp configuration;
[0985] nS or n062S: n062 in Sp configuration;

[chemical structure]

[0986] nX: stereorandom n065;
[0987] nR or n065R: n065 in Rp configuration;
[0988] nS or n065S: n065 in Sp configuration;

[chemical structure]

[0989] nX: stereorandom n066;
[0990] nR or n066R: n066 in Rp configuration;
[0991] nS or n066S: n066 in Sp configuration;

[chemical structure]

[0992] nX: stereorandom n068;
[0993] nR or n068R: n068 in Rp configuration;
[0994] nS or n068S: n068 in Sp configuration;

[chemical structure]

[0995] nX: stereorandom n069;
[0996] nR or n069R: n069 in Rp configuration;
[0997] nS or n069S: n069 in Sp configuration;

[chemical structure]

[0998] nX: stereorandom n070;
[0999] nR or n070R: n070 in Rp configuration;
[1000] nS or n070S: n070 in Sp configuration;

[chemical structure]

[1001] nX: stereorandom n071;
[1002] nR or n071R: n071 in Rp configuration;
[1003] nS or n071S: n071 in Sp configuration;

[chemical structure]

[1004] nX: stereorandom n072;
[1005] nR or n072R: n072 in Rp configuration;
[1006] nS or n072S: n072 in Sp configuration;

[chemical structure]

[1007] nX: stereorandom n073;
[1008] nR or n073R: n073 in Rp configuration;
[1009] nS or n073S: n073 in Sp configuration;

[chemical structure]

[1010] nX: stereorandom n076;
[1011] nR or n076R: n076 in Rp configuration;
[1012] nS or n076S: n076 in Sp configuration;

[chemical structure]

[1013] nX: stereorandom n077;
[1014] nR or n077R: n077 in Rp configuration;
[1015] nS or n077S: n077 in Sp configuration;
[1016] X: stereorandom phosphorothioate or phosphoryl guanidine;

[chemical structure]

[chemical structure]

[chemical structure]

[chemical structure]

[chemical structure]

[chemical structure]

[chemical structure]

[1017] i.e., morpholine carbamate internucleotidic linkage

[chemical structure]

[1018] L001 or nC6o: —NH—(CH₂)₆-linker (C6 linker, C6 amine linker or C6 amino linker), connected to Mod (e.g., Mod001) through —NH—, and, in the case of, for example, VW-38061, the 5′-end of the oligonucleotide chain through a phosphate linkage (O or PO). For example, in WV-38061, L001 is connected to Mod001 through —NH— (forming an amide group —C(O)—NH—), and is connected to the oligonucleotide chain through a phosphate linkage (O).

[chemical structure]

In some embodiments, when L010 is present in the middle of an oligonucleotide, it is bonded to internucleotidic linkages as other sugars (e.g., DNA sugars), e.g., its 5′-carbon is connected to another unit (e.g., 3′ of a sugar) and its 3′-carbon is connected to another unit (e.g., a 5′-carbon of a carbon) independently, e.g., via a linkage (e.g., a phosphate linkage (O or PO) or a phosphorothioate linkage (can be either not chirally controlled or chirally controlled (Sp or Rp)));
[1019] L012:—CH₂CH₂OCH₂CH₂OCH₂CH₂—. When L012 is present in the middle of an oligonucleotide, each of its two ends is independently bonded to an internucleotidic linkage (e.g., a phosphate linkage (O or PO) or a phosphorothioate linkage (can be either not chirally controlled or chirally controlled (Sp or Rp)));

[chemical structure]

wherein L022 is connected to the rest of a molecule through a phosphate unless indicated otherwise;
[1020] L023: HO—(CH₂)₆—, wherein CH₂ is connected to the rest of a molecule through a phosphate unless indicated otherwise. For example, in WV-42644 (wherein the O in OnRnRnRnRSSSSSSSSSSSSSSSSSSnRSSSSSnRSSnR indicates a phosphate linkage connecting L023 to the rest of the molecule);

[chemical structure]

wherein the —CH₂— connection site is utilized as a C5 connection site of a sugar (e.g., a DNA sugar) and is connected to another unit (e.g., 3′ of a sugar), and the connection site on the ring is utilized as a C3 connection site and is connected to another unit (e.g., a 5′-carbon of a carbon), each of which is independently, e.g., via a linkage (e.g., a phosphate linkage (O or PO) or a phosphorothioate linkage (can be either not chirally controlled or chirally controlled (Sp or Rp))). When L025 is at a 5′-end without any modifications, its —CH₂-connection site is bonded to —OH. For example, L025L025L025—in various oligonucleotides has the structure of

[chemical structure]

(may exist as various salt forms) and is connected to 5′-carbon of an oligonucleotide chain via a linkage as indicated (e.g., a phosphate linkage (O or PO) or a phosphorothioate linkage (can be either not chirally controlled or chirally controlled (Sp or Rp)));

[chemical structure]

wherein L016 is connected to the rest of a molecule through a phosphate unless indicated otherwise; L016 is utilized with n001 to form L016n001, which has the structure of

[chemical structure]

### 1.1.1 Double Stranded Oligonucleotide Lengths

[1021] As appreciated by those skilled in the art, ds oligonucleotides can be of various lengths to provide desired properties and/or activities for various uses. Many technologies for assessing, selecting and/or optimizing ds oligonucleotide length are available in the art and can be utilized in accordance with the present disclosure. As demonstrated herein, in certain embodiments, dsRNAi oligonucleotides are of suitable lengths to hybridize with their targets and reduce levels of their targets and/or an encoded product thereof. In certain embodiments, a ds oligonucleotide is long enough to recognize a target nucleic acid (e.g., a target mRNA). In certain embodiments, a ds oligonucleotide is sufficiently long to distinguish between a target nucleic acid and other nucleic acids (e.g., a nucleic acid having a base sequence which is not a target sequence) to reduce off-target effects. In certain embodiments, a dsRNAi oligonucleotide is sufficiently short to reduce complexity of manufacture or production and to reduce cost of products.

[1022] In certain embodiments, the base sequence of a ds oligonucleotide is about 10-500 nucleobases in length. In certain embodiments, a base sequence is about 10-500 nucleobases in length. In certain embodiments, a base sequence is about 10-50 nucleobases in length. In certain embodiments, a base sequence is about 15-50 nucleobases in length. In certain embodiments, a base sequence is from about 15 to about 30 nucleobases in length. In certain embodiments, abase sequence is from about 10 to about 25 nucleobases in length. In certain embodiments, a base sequence is from about 15 to about 22 nucleobases in length. In certain embodiments, a base sequence is about 10, 11, 12, 13, 14, 15, 16, 17, 18, 19, 20, 21, 22, 23, 24, or 25 nucleobases in length. In certain embodiments, a base sequence is about 18 nucleobases in length. In certain embodiments, a base sequence is about 19 nucleobases in length. In certain embodiments, a base sequence is about 20 nucleobases in length. In certain embodiments, a base sequence is about 21 nucleobases in length. In certain embodiments, a base sequence is about 22 nucleobases in length. In certain embodiments, a base sequence is about 23 nucleobases in length. In certain embodiments, a base sequence is about 24 nucleobases in length. In certain embodiments, a base sequence is about 25 nucleobases in length. In certain embodiments, each nucleobase is optionally substituted A, T, C, G, U, or an optionally substituted tautomer of A, T, C, G, or U.

### 2.2.3. Internucleotidic Linkages

[1023] In certain embodiments, ds oligonucleotides comprise base modifications, sugar modifications, and/or internucleotidic linkage modifications. Various internucleotidic linkages can be utilized in accordance with the present disclosure to link units comprising nucleobases, e.g., nucleosides. In certain embodiments, provided ds oligonucleotides comprise both one or more modified internucleotidic linkages and one or more natural phosphate linkages. As widely known by those skilled in the art, natural phosphate linkages are widely found in natural DNA and RNA molecules; they have the structure of —OP(O)(OH)O—, connect sugars in the nucleosides in DNA and RNA, and may be in various salt forms, for example, at physiological pH (about 7.4), natural phosphate linkages are predominantly exist in salt forms with the anion being —OP(O)(O⁻)O—. A modified internucleotidic linkage, or a non-natural phosphate linkage, is an internucleotidic linkage that is not natural phosphate linkage or a salt form thereof. Modified internucleotidic linkages, depending on their structures, may also be in their salt forms. For example, as appreciated by those skilled in the art, phosphorothioate internucleotidic linkages which have the structure of —OP(O)(SH)O— may be in various salt forms, e.g., at physiological pH (about 7.4) with the anion being —OP(O)(S⁻)O—.

[1024] In certain embodiments, a ds oligonucleotide comprises an internucleotidic linkage which is a modified internucleotidic linkage, e.g., phosphorothioate, phosphorodithioate, methylphosphonate, phosphoroamidate, thiophosphate, 3′-thiophosphate, or 5′-thiophosphate.

[1025] In certain embodiments, a modified internucleotidic linkage is a chiral internucleotidic linkage which comprises a chiral linkage phosphorus. In certain embodiments, a chiral internucleotidic linkage is a phosphorothioate linkage. In certain embodiments, a chiral internucleotidic linkage is a non-negatively charged internucleotidic linkage. In certain embodiments, a chiral internucleotidic linkage is a neutral internucleotidic linkage. In certain embodiments, a chiral internucleotidic linkage is chirally controlled with respect to its chiral linkage phosphorus. In certain embodiments, a chiral internucleotidic linkage is stereochemically pure with respect to its chiral linkage phosphorus. In certain embodiments, a chiral internucleotidic linkage is not chirally controlled. In certain embodiments, a pattern of backbone chiral centers comprises or consists of positions and linkage phosphorus configurations of chirally controlled internucleotidic linkages (Rp or Sp) and positions of achiral internucleotidic linkages (e.g., natural phosphate linkages).

[1026] In certain embodiments, an internucleotidic linkage comprises a P-modification, wherein a P-modification is a modification at a linkage phosphorus. In certain embodiments, a modified internucleotidic linkage is a moiety which does not comprise a phosphorus but serves to link two sugars or two moieties that each independently comprises a nucleobase, e.g., as in peptide nucleic acid (PNA).

[1027] In certain embodiments, a ds oligonucleotide comprises a modified internucleotidic linkage, e.g., those having the structure of Formula I, I-a, I-b, or I-c and described herein and/or in: WO 2018/022473, WO 2018/098264, WO 2018/223056, WO 2018/223073, WO 2018/223081, WO 2018/237194, WO 2019/032607, WO 2019/055951, WO 2019/075357, WO 2019/200185, WO 2019/217784, and/or WO 2019/032612, the internucleotidic linkages (e.g., those of Formula I, I-a, I-b, I-c, etc.) of each of which are independently incorporated herein by reference. In certain embodiments, a modified internucleotidic linkage is a chiral internucleotidic linkage. In certain embodiments, a modified internucleotidic linkage is a phosphorothioate internucleotidic linkage.

[1028] In certain embodiments, a modified internucleotidic linkage is a non-negatively charged internucleotidic linkage. In certain embodiments, provided ds oligonucleotides comprise one or more non-negatively charged internucleotidic linkages. In certain embodiments, a non-negatively charged internucleotidic linkage is a positively charged internucleotidic linkage. In certain embodiments, a non-negatively charged internucleotidic linkage is a neutral internucleotidic linkage. In certain embodiments, the present disclosure provides ds oligonucleotides comprising one or more neutral internucleotidic linkages. In certain embodiments, a non-negatively charged internucleotidic linkage has the structure of Formula I-n-1, I-n-2, I-n-3, I-n-4, II, II-a-1, II-a-2, II-b-1, II-b-2, II-c-1, II-c-2, II-d-1, II-d-2, etc., or a salt form thereof, as described herein and/or in U.S. Pat. Nos. 9,394,333, 9,744,183, 9,605,019, 9,982,257, US 20170037399, US 20180216108, US 20180216107, U.S. Pat. No. 9,598,458, WO 2017/062862, WO 2018/067973, WO 2017/160741, WO 2017/192679, WO 2017/210647, WO 2018/098264, WO 2018/022473, WO 2018/223056, WO 2018/223073, WO 2018/223081, WO 2018/237194, WO 2019/032607, WO2019/032612, WO 2019/055951, WO 2019/075357, WO 2019/200185, WO 2019/217784, and/or WO 2019/032612, the non-negatively charged internucleotidic linkages (e.g., those of Formula I-n-1, I-n-2, I-n-3, I-n-4, II, II-a-1, II-a-2, II-b-1, II-b-2, II-c-1, II-c-2, II-d-1, II-d-2, etc., or a suitable salt form thereof) of each of which are independently incorporated herein by reference.

[1029] In certain embodiments, a non-negatively charged internucleotidic linkage can improve the delivery and/or activities (e.g., adenosine editing activity).

[1030] In certain embodiments, a modified internucleotidic linkage (e.g., a non-negatively charged internucleotidic linkage) comprises optionally substituted triazolyl. In certain embodiments, a modified internucleotidic linkage (e.g., a non-negatively charged internucleotidic linkage) comprises optionally substituted alkynyl. In certain embodiments, a modified internucleotidic linkage comprises a triazole or alkyne moiety. In certain embodiments, a triazole moiety, e.g., a triazolyl group, is optionally substituted. In certain embodiments, a triazole moiety, e.g., a triazolyl group) is substituted. In certain embodiments, a triazole moiety is unsubstituted. In certain embodiments, a modified internucleotidic linkage comprises an optionally substituted cyclic guanidine moiety. In certain embodiments, a modified internucleotidic linkage has the structure of

[chemical structure]

and is optionally chirally controlled, wherein R¹ is -L-R′, wherein L is L^{B} as described herein, and R′ is as described herein. In certain embodiments, each R¹ is independently R′. In certain embodiments, each R′ is independently R. In certain embodiments, two R¹ are R and are taken together to form a ring as described herein. In certain embodiments, two R¹ on two different nitrogen atoms are R and are taken together to form a ring as described herein. In certain embodiments, R¹ is independently optionally substituted C₁₋₆ aliphatic as described herein. In certain embodiments, R¹ is methyl. In certain embodiments, two R′ on the same nitrogen atom are R and are taken together to form a ring as described herein. In certain embodiments, a modified internucleotidic linkage has the structure of

[chemical structure]

and is optionally chirally controlled. In certain embodiments,

[chemical structure]

In certain embodiments, a modified internucleotidic linkage comprises an optionally substituted cyclic guanidine moiety and has the structure of:

[chemical structure]

wherein W is O or S. In certain embodiments, W is O. In certain embodiments, W is S. In certain embodiments, a non-negatively charged internucleotidic linkage is stereochemically controlled.
In certain embodiments, a modified internucleotidic linkage has the structure of

[chemical structure]

and is optionally chirally controlled

[chemical structure]

and is optionally chirally controlled,

[chemical structure]

and is optionally chirally controlled,

[chemical structure]

and is optionally chirally controlled, or

[chemical structure]

and is optionally chirally controlled wherein R² is H, C6-amine,

[chemical structure]

[chemical structure]

[chemical structure]

[chemical structure]

[1031] In certain embodiments, a non-negatively charged internucleotidic linkage or a neutral internucleotidic linkage is an internucleotidic linkage comprising a triazole moiety. In some embodiments, an internucleotidic linkage comprising a triazole moiety (e.g., an optionally substituted triazolyl group) has the structure of

[chemical structure]

In some embodiments, an internucleotidic linkage comprising a triazole moiety has the structure of

[chemical structure]

In some embodiments, an internucleotidic linkage comprising a triazole moiety has the formula of

[chemical structure]

where W is O or S. In some embodiments, an internucleotidic linkage comprising an alkyne moiety (e.g., an optionally substituted alkynyl group) has the formula of

[chemical structure]

wherein W is O or S. In some embodiments, an internucleotidic linkage, e.g., a non-negatively charged internucleotidic linkage, a neutral internucleotidic linkage, comprises a cyclic guanidine moiety. In some embodiments, an internucleotidic linkage comprising a cyclic guanidine moiety has the structure of

[chemical structure]

In some embodiments, a non-negatively charged internucleotidic linkage, or a neutral internucleotidic linkage, is or comprising a structure selected from

[chemical structure]

wherein W is O or S. In certain embodiments, an internucleotidic linkage, e.g., a non-negatively charged internucleotidic linkage, a neutral internucleotidic linkage, comprises a cyclic guanidine moiety. In certain embodiments, an internucleotidic linkage comprising a cyclic guanidine moiety has the structure of

[chemical structure]

In certain embodiments, a non-negatively charged internucleotidic linkage, or a neutral internucleotidic linkage, is or comprising a structure

[chemical structure]

wherein W is O or S.

[1032] In certain embodiments, an internucleotidic linkage comprises a Tmg group

[chemical structure]

In certain embodiments, an internucleotidic linkage comprises a Tmg group and has the structure of

[chemical structure]

(the “Tmg internucleotidic linkage”). In certain embodiments, neutral internucleotidic linkages include internucleotidic linkages of PNA and PMO, and a Tmg internucleotidic linkage.

[1033] In certain embodiments, a non-negatively charged internucleotidic linkage has the structure of Formula I, I-a, I-b, I-c, I-n-1, I-n-2, I-n-3, I-n-4, II, II-a-1, II-a-2, II-b-1, II-b-2, II-c-1, II-c-2, II-d-1, II-d-2, etc., or a salt form thereof. In certain embodiments, a non-negatively charged internucleotidic linkage comprises an optionally substituted 3-20 membered heterocyclyl or heteroaryl group having 1-10 heteroatoms. In certain embodiments, a non-negatively charged internucleotidic linkage comprises an optionally substituted 3-20 membered heterocyclyl or heteroaryl group having 1-10 heteroatoms, wherein at least one heteroatom is nitrogen. In certain embodiments, such a heterocyclyl or heteroaryl group is of a 5-membered ring. In certain embodiments, such a heterocyclyl or heteroaryl group is of a 6-membered ring.

[1034] In certain embodiments, a non-negatively charged internucleotidic linkage comprises an optionally substituted 5-20 membered heteroaryl group having 1-10 heteroatoms. In certain embodiments, a non-negatively charged internucleotidic linkage comprises an optionally substituted 5-20 membered heteroaryl group having 1-10 heteroatoms, wherein at least one heteroatom is nitrogen. In certain embodiments, a non-negatively charged internucleotidic linkage comprises an optionally substituted 5-6 membered heteroaryl group having 1-4 heteroatoms, wherein at least one heteroatom is nitrogen. In certain embodiments, a non-negatively charged internucleotidic linkage comprises an optionally substituted 5-membered heteroaryl group having 1-4 heteroatoms, wherein at least one heteroatom is nitrogen. In certain embodiments, a heteroaryl group is directly bonded to a linkage phosphorus.

[1035] In certain embodiments, a non-negatively charged internucleotidic linkage comprises an optionally substituted 5-20 membered heterocyclyl group having 1-10 heteroatoms. In certain embodiments, a non-negatively charged internucleotidic linkage comprises an optionally substituted 5-20 membered heterocyclyl group having 1-10 heteroatoms, wherein at least one heteroatom is nitrogen. In certain embodiments, a non-negatively charged internucleotidic linkage comprises an optionally substituted 5-6 membered heterocyclyl group having 1-4 heteroatoms, wherein at least one heteroatom is nitrogen. In certain embodiments, a non-negatively charged internucleotidic linkage comprises an optionally substituted 5-membered heterocyclyl group having 1-4 heteroatoms, wherein at least one heteroatom is nitrogen. In certain embodiments, at least two heteroatoms are nitrogen. In some embodiments, a non-negatively charged internucleotidic linkage comprises an optionally substituted triazolyl group. In some embodiments, a non-negatively charged internucleotidic linkage comprises an unsubstituted triazolyl group, e.g.,

[chemical structure]

In some embodiments, a non-negatively charged internucleotidic linkage comprises a substituted triazolyl group, e.g.,

[chemical structure]

[1036] In certain embodiments, a heterocyclyl group is directly bonded to a linkage phosphorus. In certain embodiments, a heterocyclyl group is bonded to a linkage phosphorus through a linker, e.g., ═N— when the heterocyclyl group is part of a guanidine moiety who directed bonded to a linkage phosphorus through its ═N—. In certain embodiments, a non-negatively charged internucleotidic linkage comprises an optionally substituted

[chemical structure]

group. In certain embodiments, a non-negatively charged internucleotidic linkage comprises a substituted

[chemical structure]

group. In certain embodiments, a non-negatively charged internucleotidic linkage comprises a

[chemical structure]

group, wherein each R¹ is independently -L-R. In certain embodiments, each R¹ is independently optionally substituted C₁₋₆ alkyl. In certain embodiments, each R¹ is independently methyl.

[1037] In certain embodiments, a modified internucleotidic linkage, e.g., a non-negatively charged internucleotidic linkage, comprises a triazole or alkyne moiety, each of which is optionally substituted. In certain embodiments, a modified internucleotidic linkage comprises a triazole moiety. In certain embodiments, a modified internucleotidic linkage comprises an unsubstituted triazole moiety. In certain embodiments, a modified internucleotidic linkage comprises a substituted triazole moiety. In certain embodiments, a modified internucleotidic linkage comprises an alkyl moiety. In certain embodiments, a modified internucleotidic linkage comprises an optionally substituted alkynyl group. In certain embodiments, a modified internucleotidic linkage comprises an unsubstituted alkynyl group. In certain embodiments, a modified internucleotidic linkage comprises a substituted alkynyl group. In certain embodiments, an alkynyl group is directly bonded to a linkage phosphorus.

[1038] In certain embodiments, a ds oligonucleotide comprises different types of internucleotidic phosphorus linkages. In certain embodiments, a chirally controlled oligonucleotide comprises at least one natural phosphate linkage and at least one modified (non-natural) internucleotidic linkage. In certain embodiments, a ds oligonucleotide comprises at least one natural phosphate linkage and at least one phosphorothioate. In certain embodiments, a ds oligonucleotide comprises at least one non-negatively charged internucleotidic linkage. In certain embodiments, a ds oligonucleotide comprises at least one natural phosphate linkage and at least one non-negatively charged internucleotidic linkage. In certain embodiments, a ds oligonucleotide comprises at least one phosphorothioate internucleotidic linkage and at least one non-negatively charged internucleotidic linkage. In certain embodiments, a ds oligonucleotide comprises at least one phosphorothioate internucleotidic linkage, at least one natural phosphate linkage, and at least one non-negatively charged internucleotidic linkage. In certain embodiments, ds oligonucleotides comprise one or more, e.g., 1-50, 1-40, 1-30, 1-20, 1-15, 1-10, 1, 2, 3, 4, 5, 6, 7, 8, 9, 10, 11, 12, 13, 14, 15, 16, 17, 18, 19, 20 or more non-negatively charged internucleotidic linkages. In certain embodiments, a non-negatively charged internucleotidic linkage is not negatively charged in that at a given pH in an aqueous solution less than 50%, 40%, 40%, 30%, 20%, 10%, 5%, or 1% of the internucleotidic linkage exists in a negatively charged salt form. In certain embodiments, a pH is about pH 7.4. In certain embodiments, a pH is about 4-9. In certain embodiments, the percentage is less than 10%. In certain embodiments, the percentage is less than 5%. In certain embodiments, the percentage is less than 1%. In certain embodiments, an internucleotidic linkage is a non-negatively charged internucleotidic linkage in that the neutral form of the internucleotidic linkage has no pKa that is no more than about 1, 2, 3, 4, 5, 6, or 7 in water. In certain embodiments, no pKa is 7 or less. In certain embodiments, no pKa is 6 or less. In certain embodiments, no pKa is 5 or less. In certain embodiments, no pKa is 4 or less. In certain embodiments, no pKa is 3 or less. In certain embodiments, no pKa is 2 or less. In certain embodiments, no pKa is 1 or less. In certain embodiments, pKa of the neutral form of an internucleotidic linkage can be represented by pKa of the neutral form of a compound having the structure of CH₃—the internucleotidic linkage-CH₃. For example, pKa of the neutral form of an internucleotidic linkage having the structure of Formula I may be represented by the pKa of the neutral form of a compound having the structure of

[chemical structure]

(wherein each of X, Y, Z is independently —O—, —S—, —N(R′)—; L is L^{B}, and R¹ is -L-R′), pKa of

[chemical structure]

can be represented by pKa

[chemical structure]

In certain embodiments, a non-negatively charged internucleotidic linkage is a neutral internucleotidic linkage. In certain embodiments, a non-negatively charged internucleotidic linkage is a positively-charged internucleotidic linkage. In certain embodiments, a non-negatively charged internucleotidic linkage comprises a guanidine moiety. In certain embodiments, a non-negatively charged internucleotidic linkage comprises a heteroaryl base moiety. In certain embodiments, a non-negatively charged internucleotidic linkage comprises a triazole moiety. In certain embodiments, a non-negatively charged internucleotidic linkage comprises an alkynyl moiety.

[1039] In certain embodiments, a neutral or non-negatively charged internucleotidic linkage has the structure of any neutral or non-negatively charged internucleotidic linkage described in any of: U.S. Pat. Nos. 9,394,333, 9,744,183, 9,605,019, 9,982,257, US 20170037399, US 20180216108, US 20180216107, U.S. Pat. No. 9,598,458, WO 2017/062862, WO 2018/067973, WO 2017/160741, WO 2017/192679, WO 2017/210647, WO 2018/098264, WO 2018/022473, WO 2018/223056, WO 2018/223073, WO 2018/223081, WO 2018/237194, WO 2019/032607, WO2019/032612, WO 2019/055951, WO 2019/075357, WO 2019/200185, WO 2019/217784, and/or WO 2019/032612,2607, WO2019032612, WO 2019/055951, WO 2019/075357, WO 2019/200185, WO 2019/217784, and/or WO 2019/032612, each neutral or non-negatively charged internucleotidic linkage of each of which is hereby incorporated by reference.

[1040] In certain embodiments, each R′ is independently optionally substituted C₁. 6 aliphatic. In certain embodiments, each R′ is independently optionally substituted C₁₋₆ alkyl. In certain embodiments, each R′ is independently —CH₃. In certain embodiments, each R⁸ is —H.

[1041] In certain embodiments, a non-negatively charged internucleotidic linkage has the structure of

[chemical structure]

In certain embodiments, a non-negatively charged internucleotidic linkage has the structure of

[chemical structure]

In certain embodiments, a non-negatively charged internucleotidic linkage has the structure of

[chemical structure]

In some embodiments, a non-negatively charged internucleotidic linkage has the structure of

[chemical structure]

In some embodiments, a non-negatively charged internucleotidic linkage has the structure of

[chemical structure]

In some embodiments, a non-negatively charged internucleotidic linkage has the structure of

[chemical structure]

In some embodiments, anon-negatively charged internucleotidic linkage has the structure of

[chemical structure]

In some embodiments, a non-negatively charged internucleotidic linkage has the structure of

[chemical structure]

In some embodiments, a non-negatively charged internucleotidic linkage has the structure of

[chemical structure]

In some embodiments, a non-negatively charged internucleotidic linkage has the structure of

[chemical structure]

In some embodiments, a non-negatively charged internucleotidic linkage has the structure of

[chemical structure]

In some embodiments, a non-negatively charged internucleotidic linkage has the structure of

[chemical structure]

In some embodiments, W is O. In some embodiments, W is S. In some embodiments, a neutral internucleotidic linkage is a non-negatively charged internucleotidic linkage described above.

[1042] In certain embodiments, provided ds oligonucleotides comprise 1 or more internucleotidic linkages of Formula I, I-a, I-b, I-c, I-n-1, I-n-2, I-n-3, I-n-4, II, II-a-1, II-a-2, II-b-1, II-b-2, II-c-1, II-c-2, II-d-1, or II-d-2, which are described in U.S. Pat. Nos. 9,394,333, 9,744,183, 9,605,019, 9,982,257, US 20170037399, US 20180216108, US 20180216107, U.S. Pat. No. 9,598,458, WO 2017/062862, WO 2018/067973, WO 2017/160741, WO 2017/192679, WO 2017/210647, WO 2018/098264, WO 2018/022473, WO 2018/223056, WO 2018/223073, WO 2018/223081, WO 2018/237194, WO 2019/032607, WO2019/032612, WO 2019/055951, WO 2019/075357, WO 2019/200185, WO 2019/217784, and/or WO 2019/032612,2607, WO2019032612, WO 2019/055951, WO 2019/075357, WO 2019/200185, WO 2019/217784, and/or WO 2019/032612, the Formula I, I-a, I-b, I-c, I-n-1, I-n-2, I-n-3, I-n-4, II, II-a-1, II-a-2, II-b-1, II-b-2, II-c-1, II-c-2, II-d-1, or II-d-2, or salt forms thereof, each of which are independently incorporated herein by reference.

[1043] In certain embodiments, a ds oligonucleotide comprises a neutral internucleotidic linkage and a chirally controlled internucleotidic linkage. In certain embodiments, a ds oligonucleotide comprises a neutral internucleotidic linkage and a chirally controlled internucleotidic linkage which is not the neutral internucleotidic linkage. In certain embodiments, a ds oligonucleotide comprises a neutral internucleotidic linkage and a chirally controlled phosphorothioate internucleotidic linkage. In certain embodiments, the present disclosure provides a ds oligonucleotide comprising one or more non-negatively charged internucleotidic linkages and one or more phosphorothioate internucleotidic linkages, wherein each phosphorothioate internucleotidic linkage in the oligonucleotide is independently a chirally controlled internucleotidic linkage. In certain embodiments, the present disclosure provides a ds oligonucleotide comprising one or more neutral internucleotidic linkages and one or more phosphorothioate internucleotidic linkage, wherein each phosphorothioate internucleotidic linkage in the ds oligonucleotide is independently a chirally controlled internucleotidic linkage. In certain embodiments, a ds oligonucleotide comprises at least 5, 6, 7, 8, 9, 10, 11, 12, 13, 14, 15, 16, 17, 18, 19, 20 or more chirally controlled phosphorothioate internucleotidic linkages. In certain embodiments, non-negatively charged internucleotidic linkage is chirally controlled. In certain embodiments, non-negatively charged internucleotidic linkage is not chirally controlled. In certain embodiments, a neutral internucleotidic linkage is chirally controlled. In certain embodiments, a neutral internucleotidic linkage is not chirally controlled.

[1044] Without wishing to be bound by any particular theory, the present disclosure notes that a neutral internucleotidic linkage can be more hydrophobic than a phosphorothioate internucleotidic linkage (PS), which can be more hydrophobic than a natural phosphate linkage (PO). Typically, unlike a PS or PO, a neutral internucleotidic linkage bears less charge. Without wishing to be bound by any particular theory, the present disclosure notes that incorporation of one or more neutral internucleotidic linkages into a ds oligonucleotide may increase the ds oligonucleotides' ability to be taken up by a cell and/or to escape from endosomes. Without wishing to be bound by any particular theory, the present disclosure notes that incorporation of one or more neutral internucleotidic linkages can be utilized to modulate melting temperature of duplexes formed between a ds oligonucleotide and its target nucleic acid.

[1045] Without wishing to be bound by any particular theory, the present disclosure notes that incorporation of one or more non-negatively charged internucleotidic linkages, e.g., neutral internucleotidic linkages, into a ds oligonucleotide may be able to increase the ds oligonucleotide's ability to mediate a function such as target adenosine editing.

[1046] As appreciated by those skilled in the art, internucleotidic linkages such as natural phosphate linkages and those of Formula I, I-a, I-b, I-c, I-n-1, I-n-2, I-n-3, I-n-4, II, II-a-1, II-a-2, II-b-1, II-b-2, II-c-1, II-c-2, II-d-1, II-d-2, or salt forms thereof typically connect two nucleosides (which can either be natural or modified) as described in U.S. Pat. Nos. 9,394,333, 9,744,183, 9,605,019, 9,982,257, US 20170037399, US 20180216108, US 20180216107, U.S. Pat. No. 9,598,458, WO 2017/062862, WO 2018/067973, WO 2017/160741, WO 2017/192679, WO 2017/210647, WO 2018/098264, WO 2018/022473, WO 2018/223056, WO 2018/223073, WO 2018/223081, WO 2018/237194, WO 2019/032607, WO2019032612, WO 2019/055951, WO 2019/075357, WO 2019/200185, WO 2019/217784, and/or WO 2019/032612, the Formula I, I-a, I-b, I-c, I-n-1, I-n-2, I-n-3, I-n-4, II, II-a-1, II-a-2, II-b-1, II-b-2, II-c-1, II-c-2, II-d-1, II-d-2, or salt forms thereof, each of which are independently incorporated herein by reference. A typical connection, as in natural DNA and RNA, is that an internucleotidic linkage forms bonds with two sugars (which can be either unmodified or modified as described herein). In many embodiments, as exemplified herein an internucleotidic linkage forms bonds through its oxygen atoms or heteroatoms (e.g., Y and Z in various formulae) with one optionally modified ribose or deoxyribose at its 5′ carbon, and the other optionally modified ribose or deoxyribose at its 3′ carbon. In certain embodiments, each nucleoside units connected by an internucleotidic linkage independently comprises a nucleobase which is independently an optionally substituted A, T, C, G, or U, or a substituted tautomer of A, T, C, G or U, or a nucleobase comprising an optionally substituted heterocyclyl and/or a heteroaryl ring having at least one nitrogen atom.

[1047] In some embodiments, a linkage has the structure of or comprises —Y—P^{L}(—X—R^{L})—Z—, or a salt form thereof, wherein:
[1048] P^{L} is P, P(═W), P—>B(-L_{L}-R^{L})₃, or P^{N};
[1049] W is O, N(-L^{L}-R^{L}), S or Se;
[1050] P^{N} is P═N—C(-L^{L}-R′)(=L^{N}-R′) or P═N-L^{L}-R^{L};
[1051] L^{N} is ═N-L^{L1}-, ═CH-L^{L1}- wherein CH is optionally substituted, or ═N⁺(R′)(Q⁻)-L^{L1}-;
[1052] Q⁻ is an anion;
[1053] each of X, Y and Z is independently —O—, —S—, -L^{L}-N(-L^{L}-R^{L})-L^{L}, -L^{L}-N=C(-L^{L}-R^{L})-L^{L}-, or L^{L};
[1054] each R^{L} is independently-L^{L}-N(R′)₂, -L^{L}-R′, —N═C(-L^{L}-R′)₂, -L^{L}-N(R′)C(NR′)N(R′)₂, -L^{L}-N(R′)C(O)N(R′)₂, a carbohydrate, or one or more additional chemical moieties optionally connected through a linker;
[1055] each of L^{L1} and L^{L} is independently L;
[1056] -Cy^{IL}- is -Cy-;
[1057] each L is independently a covalent bond, or a bivalent, optionally substituted, linear or branched group selected from a C₁₋₃₀ aliphatic group and a C₁₋₃₀ heteroaliphatic group having 1-10 heteroatoms, wherein one or more methylene units are optionally and independently replaced by an optionally substituted group selected from C₁₋₆ alkylene, C₁₋₆ alkenylene, —C≡C—, a bivalent C1-C₆ heteroaliphatic group having 1-5 heteroatoms, —C(R′)₂—, -Cy-, —O—, —S—, —S—S—, —N(R′)—, —C(O)—, —C(S)—, —C(NR′)—, —C(NR′)N(R′)—, —N(R′)C(NR′)N(R′)—, —C(O)N(R′)—, —N(R′)C(O)N(R′)—, —N(R′)C(O)O—, —S(O)—, —S(O)₂—, —S(O)₂N(R′)—, —C(O)S—, —C(O)O—, —P(O)(OR′)—, —P(O)(SR′)—, —P(O)(R′)—, —P(O)(NR′)—, —P(S)(OR′)—, —P(S)(SR′)—, —P(S)(R′)—, —P(S)(NR′)—, —P(R′)—, —P(OR′)—, —P(SR′)—, —P(NR′)—, —P(OR′)[B(R′)₃]—, —OP(O)(OR′)O—, —OP(O)(SR′)O—, —OP(O)(R′)O—, —OP(O)(NR′)O—, —OP(OR′)O—, —OP(SR′)O—, —OP(NR′)O—, —OP(R′)O—, —OP(OR′)[B(R′)₃]O—, and —[C(R′)₂C(R′)₂O]n-, wherein n is 1-50, and one or more nitrogen or carbon atoms are optionally and independently replaced with Cy^{L};
[1058] each -Cy- is independently an optionally substituted bivalent 3-30 membered, monocyclic, bicyclic or polycyclic ring having 0-10 heteroatoms;
[1059] each Cy^{L} is independently an optionally substituted trivalent or tetravalent, 3-30 membered, monocyclic, bicyclic or polycyclic ring having 0-10 heteroatoms;
[1060] each R′ is independently —R, —C(O)R, —C(O)N(R)₂, —C(O)OR, or —S(O)₂R;
[1061] each R is independently —H, or an optionally substituted group selected from C₁₋₃₀ aliphatic, C₁₋₃₀ heteroaliphatic having 1-10 heteroatoms, C₆₋₃₀ aryl, C₆₋₃₀ arylaliphatic, C₆₋₃₀ arylheteroaliphatic having 1-10 heteroatoms, 5-30 membered heteroaryl having 1-10 heteroatoms, and 3-30 membered heterocyclyl having 1-10 heteroatoms, or
[1062] two R groups are optionally and independently taken together to form a covalent bond, or:
[1063] two or more R groups on the same atom are optionally and independently taken together with the atom to form an optionally substituted, 3-30 membered, monocyclic, bicyclic or polycyclic ring having, in addition to the atom, 0-10 heteroatoms; or
[1064] two or more R groups on two or more atoms are optionally and independently taken together with their intervening atoms to form an optionally substituted, 3-30 membered, monocyclic, bicyclic or polycyclic ring having, in addition to the intervening atoms, 0-10 heteroatoms.

[1065] In some embodiments, an internucleotidic linkage has the structure of —O—P^{L}(—X—R^{L})—O—, wherein each variable is independently as described herein. In some embodiments, an internucleotidic linkage has the structure of —O—P(═W)(—X—R^{L})—O— wherein each variable is independently as described herein. In some embodiments, an internucleotidic linkage has the structure of —O—P(═W)[—N(-L_{L}-R^{L})—R^{L}]—O—, wherein each variable is independently as described herein. In some embodiments, an internucleotidic linkage has the structure of —O—P(═W)(—NH-L^{L}-R^{L})—O—, wherein each variable is independently as described herein. In some embodiments, an internucleotidic linkage has the structure of —O—P(═W)[—N(R′)₂]—O—, wherein each variable is independently as described herein. In some embodiments, an internucleotidic linkage has the structure of —O—P(═W)(—NHR′)—O—, wherein each variable is independently as described herein. In some embodiments, an internucleotidic linkage has the structure of —O—P(═W)(—NHSO₂R)—O—, wherein each variable is independently as described herein. In some embodiments, an internucleotidic linkage has the structure of —O—P(═W)[—N═C(-L_{L}-R′)₂]—O—, wherein each variable is independently as described herein. In some embodiments, an internucleotidic linkage has the structure of —O—P(═W)[—N═C[N(R′)₂]₂]—O—, wherein each variable is independently as described herein. In some embodiments, an internucleotidic linkage has the structure of —OP(═W)(—N═C(R″)₂)—O—, wherein each variable is independently as described herein. In some embodiments, an internucleotidic linkage has the structure of —OP(═W)(—N(R″)₂)—O—, wherein each variable is independently as described herein. In some embodiments, W is O. In some embodiments, W is S. In some embodiments, such an internucleotidic linkage is a non-negatively charged internucleotidic linkage. In some embodiments, such an internucleotidic linkage is a neutral internucleotidic linkage.

[1066] In some embodiments, an internucleotidic linkage has the structure of —P^{L}(—X—R^{L})—Z—, wherein each variable is independently as described herein. In some embodiments, an internucleotidic linkage has the structure of —P^{L}(—X—R^{L})—, wherein each variable is independently as described herein. In some embodiments, an internucleotidic linkage has the structure of —P(═W)(—X—R^{L})—O—, wherein each variable is independently as described herein. In some embodiments, an internucleotidic linkage has the structure of —P(═W)[—N(-L^{L}-R^{L})—R^{L}]—O—, wherein each variable is independently as described herein. In some embodiments, an internucleotidic linkage has the structure of —P(═W)(—NH-L^{L}-R^{L})—O—, wherein each variable is independently as described herein. In some embodiments, an interucleotidic linkage has the structure of —P(═W)[—N(R′)₂]—O—, wherein each variable is independently as described herein. In some embodiments, an internucleotidic linkage has the structure of —P(═W)(—NHR′)—O—, wherein each variable is independently as described herein. In some embodiments, an internucleotidic linkage has the structure of —P(═W)(—NHSO₂R)—O—, wherein each variable is independently as described herein. In some embodiments, an internucleotidic linkage has the structure of —P(═W)[—N═C(-L^{L}-R′)₂]—O—, wherein each variable is independently as described herein. In some embodiments, an internucleotidic linkage has the structure of —P(═W)[—N═C[N(R′)₂]₂]—O—, wherein each variable is independently as described herein. In some embodiments, an internucleotidic linkage has the structure of —P(═W)(—N═C(R″)₂)—O—, wherein each variable is independently as described herein. In some embodiments, an internucleotidic linkage has the structure of —P(═W)(—N(R″)₂)—O—, wherein each variable is independently as described herein. In some embodiments, W is O. In some embodiments, W is S. In some embodiments, such an interucleotidic linkage is a non-negatively charged internucleotidic linkage. In some embodiments, such an internucleotidic linkage is a neutral internucleotidic linkage. In some embodiments, P of such an internucleotidic linkage is bonded to N of a sugar.

[1067] In some embodiments, a linkage is a phosphoryl guanidine internucleotidic linkage. In some embodiments, a linkage is a thio-phosphoryl guanidine internucleotidic linkage.

[1068] In some embodiments, one or more methylene units are optionally and independently replaced with a moiety as described herein. In some embodiments, L or L^{L} is or comprises —SO₂—. In some embodiments, L or L^{L} is or comprises —SO₂N(R′)—. In some embodiments, L or L^{L} is or comprises —C(O)—. In some embodiments, L or L^{L} is or comprises —C(O)O—. In some embodiments, L or L^{L} is or comprises —C(O)N(R′)—. In some embodiments, L or L^{L} is or comprises —P(═W)(R′)—. In some embodiments, L or L^{L} is or comprises —P(═O)(R′)—. In some embodiments, L or L^{L} is or comprises —P(═S)(R′)—. In some embodiments, L or L^{L} is or comprises —P(R′)—. In some embodiments, L or L^{L} is or comprises —P(═W)(OR′)—. In some embodiments, L or L^{L} is or comprises —P(═O)(OR′)—. In some embodiments, L or L^{L} is or comprises —P(═S)(OR′)—. In some embodiments, L or L^{L} is or comprises —P(OR′)—.

[1069] In some embodiments, —X—R^{L} is —N(R′)SO₂R^{L}. In some embodiments, —X—R^{L} is-N(R′)C(O)R^{L}. In some embodiments, —X—R^{L} is-N(R′)P(═O)(R′)R^{L}.

[1070] In some embodiments, a linkage, e.g., a non-negatively charged internucleotidic linkage or neutral internucleotidic linkage, has the structure of or comprises —P(═W)(—N═C(R″)₂)—, —P(═W)(—N(R′)SO₂R″)—, —P(═W)(—N(R′)C(O)R″)—, —P(═W)(—N(R″)₂)—, —P(═W)(—N(R′)P(O)(R″)₂)—, —OP(═W)(—N═C(R″)₂)O—, —OP(═W)(—N(R′)SO₂R″)O—, —OP(═W)(—N(R′)C(O)R″)O—, —OP(═W)(—N(R″)₂)O—, —OP(═W)(—N(R′)P(O)(R″)₂)O—, —P(═W)(—N═C(R″)₂)O—, —P(═W)(—N(R′)SO₂R″)O—, —P(═W)(—N(R′)C(O)R″)O—, —P(═W)(—N(R″)₂)O—, or —P(═W)(—N(R′)P(O)(R″)₂)O—, or a salt form thereof, wherein:
[1071] W is O or S;
[1072] each R″ is independently R′, —OR′, —P(═W)(R′)₂, or —N(R′)₂;
[1073] each R′ is independently —R, —C(O)R, —C(O)N(R)₂, —C(O)OR, or —S(O)₂R;
[1074] each R is independently —H, or an optionally substituted group selected from C₁₋₃₀ aliphatic, C₁₋₃₀ heteroaliphatic having 1-10 heteroatoms, C₆₋₃₀ aryl, C₆₋₃₀ arylaliphatic, C₆₋₃₀ arylheteroaliphatic having 1-10 heteroatoms, 5-30 membered heteroaryl having 1-10 heteroatoms, and 3-30 membered heterocyclyl having 1-10 heteroatoms, or
[1075] two R groups are optionally and independently taken together to form a covalent bond, or:
[1076] two or more R groups on the same atom are optionally and independently taken together with the atom to form an optionally substituted, 3-30 membered, monocyclic, bicyclic or polycyclic ring having, in addition to the atom, 0-10 heteroatoms; or
[1077] two or more R groups on two or more atoms are optionally and independently taken together with their intervening atoms to form an optionally substituted, 3-30 membered, monocyclic, bicyclic or polycyclic ring having, in addition to the intervening atoms, 0-10 heteroatoms.

[1078] In some embodiments, W is O. In some embodiments, an internucleotidic linkage has the structure of —P(═O)(—N═C(R″)₂)—, —P(═O)(—N(R′)SO₂R″)—, —P(═O)(—N(R′)C(O)R″)—, —P(═O)(—N(R″)₂)—, —P(═O)(—N(R′)P(O)(R″)₂)—, —OP(═O)(—N═C(R″)₂)O—, —OP(═O)(—N(R′)SO₂R″)O—, —OP(═O)(—N(R′)C(O)R″)O—, —OP(═O)(—N(R″)₂)O—, —OP(═O)(—N(R′)P(O)(R″)₂)O—, —P(═O)(—N═C(R″)₂)O—, —P(═O)(—N(R′)SO₂R″)O—, —P(═O)(—N(R′)C(O)R″)O—, —P(═O)(—N(R″)₂)O—, or —P(═O)(—N(R′)P(O)(R″)₂)O—, or a salt form thereof. In some embodiments, an internucleotidic linkage has the structure of —P(═O)(—N═C(R″)₂)— —P(═O)(—N(R″)₂)—, —OP(═O)(—N═C(R″)₂)—O—, —OP(═O)(—N(R″)₂)—O—, —P(═O)(—N═C(R″)₂)—O— or —P(═O)(—N(R″)₂)—O— or a salt form thereof. In some embodiments, an internucleotidic linkage has the structure of —OP(═O)(—N═C(R″)₂)—O— or —OP(═O)(—N(R″)₂)—O—, or a salt form thereof. In some embodiments, an internucleotidic linkage has the structure of —OP(═O)(—N═C(R″)₂)—O—, or a salt form thereof. In some embodiments, an internucleotidic linkage has the structure of —OP(═O)(—N(R″)₂)—O—, or a salt form thereof. In some embodiments, an internucleotidic linkage has the structure of —OP(═O)(—N(R′)SO₂R″)O—, or a salt form thereof. In some embodiments, an internucleotidic linkage has the structure of —OP(═O)(—N(R′)C(O)R″)O—, or a salt form thereof. In some embodiments, an internucleotidic linkage has the structure of —OP(═O)(—N(R′)P(O)(R″)₂)O—, or a salt form thereof. In some embodiments, an internucleotidic linkage is n001.

[1079] In some embodiments, W is S. In some embodiments, an internucleotidic linkage has the structure of —P(═S)(—N═C(R″)₂)—, —P(═S)(—N(R′)SO₂R″)—, —P(═S)(—N(R′)C(O)R″)—, —P(═S)(—N(R″)₂)—, —P(═S)(—N(R′)P(O)(R″)₂)—, —OP(═S)(—N═C(R″)₂)O—, —OP(═S)(—N(R′)SO₂R″)O—, —OP(═S)(—N(R′)C(O)R″)O—, —OP(═S)(—N(R″)₂)O—, —OP(═S)(—N(R′)P(O)(R″)₂)O—, —P(═S)(—N═C(R″)₂)O—, —P(═S)(—N(R′)SO₂R″)O—, —P(═S)(—N(R′)C(O)R″)O—, —P(═S)(—N(R″)₂)O—, or —P(═S)(—N(R′)P(O)(R″)₂)O—, or a salt form thereof. In some embodiments, an internucleotidic linkage has the structure of —P(═S)(—N═C(R″)₂)— —P(═S)(—N(R″)₂)—, —OP(═S)(—N═C(R″)₂)—O—, —OP(═S)(—N(R″)₂)—O—, —P(═S)(—N═C(R″)₂)—O— or —P(═S)(—N(R″)₂)—O— or a salt form thereof. In some embodiments, an internucleotidic linkage has the structure of —OP(═S)(—N═C(R″)₂)—O— or —OP(═S)(—N(R″)₂)—O—, or a salt form thereof. In some embodiments, an internucleotidic linkage has the structure of —OP(═S)(—N═C(R″)₂)—O—, or a salt form thereof. In some embodiments, an internucleotidic linkage has the structure of —OP(═S)(—N(R″)₂)—O—, or a salt form thereof. In some embodiments, an internucleotidic linkage has the structure of —OP(═S)(—N(R′)SO₂R″)O—, or a salt form thereof. In some embodiments, an internucleotidic linkage has the structure of —OP(═S)(—N(R′)C(O)R″)O—, or a salt form thereof. In some embodiments, an internucleotidic linkage has the structure of —OP(═S)(—N(R′)P(O)(R″)₂)O—, or a salt form thereof. In some embodiments, an internucleotidic linkage is *n001.

[1080] In some embodiments, an internucleotidic linkage has the structure of —P(═O)(—N(R′)SO₂R″)—, wherein R″ is as described herein. In some embodiments, an internucleotidic linkage has the structure of —P(═S)(—N(R′)SO₂R″)—, wherein R″ is as described herein. In some embodiments, an internucleotidic linkage has the structure of —P(═O)(—N(R′)SO₂R″)O—, wherein R″ is as described herein. In some embodiments, an internucleotidic linkage has the structure of —P(═S)(—N(R′)SO₂R″)O—, wherein R″ is as described herein. In some embodiments, an internucleotidic linkage has the structure of —OP(═O)(—N(R′)SO₂R″)O—, wherein R″ is as described herein. In some embodiments, an internucleotidic linkage has the structure of —OP(═S)(—N(R′)SO₂R″)O—, wherein R″ is as described herein. In some embodiments, R′, e.g., of —N(R′)—, is hydrogen or optionally substituted C₁₋₆ aliphatic. In some embodiments, R′ is C₁₋₆ alkyl. In some embodiments, R′ is hydrogen. In some embodiments, R″, e.g., in —SO₂R″, is R′ as described herein. In some embodiments, an internucleotidic linkage has the structure of —P(═O)(—NHSO₂R″)—, wherein R″ is as described herein. In some embodiments, an internucleotidic linkage has the structure of —P(═S)(—NHSO₂R″)—, wherein R″ is as described herein. In some embodiments, an internucleotidic linkage has the structure of —P(═O)(—NHSO₂R″)O—, wherein R″ is as described herein. In some embodiments, an internucleotidic linkage has the structure of —P(═S)(—NHSO₂R″)O—, wherein R″ is as described herein. In some embodiments, an internucleotidic linkage has the structure of —OP(═O)(—NHSO₂R″)O—, wherein R″ is as described herein. In some embodiments, an internucleotidic linkage has the structure of —OP(═S)(—NHSO₂R″)O—, wherein R″ is as described herein. In some embodiments, —X—R^{L} is-N(R′)SO₂R^{L}, wherein each of R′ and R^{L} is independently as described herein. In some embodiments, R^{L} is R″. In some embodiments, R^{L} is R′. In some embodiments, —X—R^{L} is —N(R′)SO₂R″, wherein R′ is as described herein. In some embodiments, —X—R^{L} is —N(R′)SO₂R′, wherein R′ is as described herein. In some embodiments, —X—R^{L} is —NHSO₂R′, wherein R′ is as described herein. In some embodiments, R′ is R as described herein. In some embodiments, R′ is optionally substituted C₁₋₆ aliphatic. In some embodiments, R′ is optionally substituted C₁₋₆ alkyl. In some embodiments, R′ is optionally substituted phenyl. In some embodiments, R′ is optionally substituted heteroaryl. In some embodiments, R″, e.g., in —SO₂R″, is R. In some embodiments, R is an optionally substituted group selected from C₁₋₆ aliphatic, aryl, heterocyclyl, and heteroaryl. In some embodiments, R is optionally substituted C₁₋₆ aliphatic. In some embodiments, R is optionally substituted C₁₋₆ alkyl. In some embodiments, R is optionally substituted C₁₋₆ alkenyl. In some embodiments, R is optionally substituted C₁₋₆ alkynyl. In some embodiments, R is optionally substituted methyl. In some embodiments, —X—R^{L} is —NHSO₂CH₃. In some embodiments, R is —CF₃. In some embodiments, R is methyl. In some embodiments, R is optionally substituted ethyl. In some embodiments, R is ethyl. In some embodiments, R is —CH₂CHF₂. In some embodiments, R is —CH₂CH₂OCH₃. In some embodiments, R is optionally substituted propyl. In some embodiments, R is optionally substituted butyl. In some embodiments, R is n-butyl. In some embodiments, R is —(CH₂)₆NH₂. In some embodiments, R is an optionally substituted linear C₂₋₂₀ aliphatic. In some embodiments, R is optionally substituted linear C₂₋₂₀ alkyl. In some embodiments, R is linear C₂₋₂₀ alkyl. In some embodiments, R is optionally substituted C₁, C₂, C₃, C₄, C₅, C₆, C₇, C₈, C₉, C₁₀, C₁₁, C₁₂, C₁₃, C₁₄, C₁₅, C₁₆, C₁₇, C₁₈, C₁₉, or C₂₀ aliphatic. In some embodiments, R is optionally substituted C₁, C₂, C₃, C₄, C₅, C₆, C₇, C₈, C₉, C₁₀, C₁₁, C₁₂, C₁₃, C₁₄, C₁₅, C₁₆, C₁₇, C₁₈, C₁₉, or C₂₀ alkyl. In some embodiments, R is optionally substituted linear C₁, C₂, C₃, C₄, C₅, C₆, C₇, C₈, C₉, C₁₀, C₁₁, C₁₂, C₁₃, C₁₄, C₁₅, C₁₆, C₁₇, C₁₈, C₁₉, or C₂₀ alkyl. In some embodiments, R is linear C₁, C₂, C₃, C₄, C₅, C₆, C₇, C₈, C₉, C₁₀, C₁₁, C₁₂, C₁₃, C₁₄, C₁₈, C₁₆, C₁₇, C₁₈, C₁₉, or C₂₀ alkyl. In some embodiments, R is optionally substituted phenyl. In some embodiments, R is phenyl. In some embodiments, R is p-methylphenyl. In some embodiments, R is 4-dimethylaminophenyl. In some embodiments, R is 3-pyridinyl. In some embodiments, R is

[chemical structure]

In some embodiments, R is

[chemical structure]

In some embodiments, R is benzyl. In some embodiments, R is optionally substituted heteroaryl. In some embodiments, R is optionally substituted 1,3-diazolyl. In some embodiments, R is optionally substituted 2-(1,3)-diazolyl. In some embodiments, R is optionally substituted 1-methyl-2-(1,3)-diazolyl. In some embodiments, R is isopropyl. In some embodiments, R″ is —N(R′)₂. In some embodiments, R″ is —N(CH₃)₂. In some embodiments, R″, e.g., in —SO₂R″, is —OR′, wherein R′ is as described herein. In some embodiments, R′ is R as described herein. In some embodiments, R″ is —OCH₃. In some embodiments, a linkage is —OP(═O)(—NHSO₂R)O—, wherein R is as described herein. In some embodiments, R is optionally substituted linear alkyl as described herein. In some embodiments, R is linear alkyl as described herein. In some embodiments, a linkage is —OP(═O)(—NHSO₂CH₃)O—. In some embodiments, a linkage is —OP(═O)(—NHSO₂CH₂CH₃)O—. In some embodiments, a linkage is —OP(═O)(—NHSO₂CH₂CH₂OCH₃)O—. In some embodiments, a linkage is —OP(═O)(—NHSO₂CH₂Ph)O—. In some embodiments, a linkage is —OP(═O)(—NHSO₂CH₂CHF₂)O—. In some embodiments, a linkage is —OP(═O)(—NHSO₂(4-methylphenyl))O—. In some embodiments, —X—R^{L} is

[chemical structure]

In some embodiments, a linkage is —OP(═O)(—X—R^{L})O—, wherein —X—R^{L} is

[chemical structure]

In some embodiments, a linkage is —OP(═O)(—NHSO₂CH(CH₃)₂)O—. In some embodiments, a linkage is —OP(═O)(—NHSO₂N(CH₃)₂)O—.

[1081] In some embodiments, an internucleotidic linkage has the structure of —P(═O)(—N(R′)C(O)R″)—, wherein R″ is as described herein. In some embodiments, an internucleotidic linkage has the structure of —P(═S)(—N(R′)C(O)R″)—, wherein R″ is as described herein. In some embodiments, an internucleotidic linkage has the structure of —P(═O)(—N(R′)C(O)R″)O—, wherein R″ is as described herein. In some embodiments, an internucleotidic linkage has the structure of —P(═S)(—N(R′)C(O)R″)O—, wherein R″ is as described herein. In some embodiments, an internucleotidic linkage has the structure of —OP(═O)(—N(R′)C(O)R″)O—, wherein R″ is as described herein. In some embodiments, an internucleotidic linkage has the structure of —OP(═S)(—N(R′)C(O)R″)O—, wherein R″ is as described herein. In some embodiments, R′, e.g., of —N(R′)—, is hydrogen or optionally substituted C₁₋₆ aliphatic. In some embodiments, R′ is C₁₋₆ alkyl. In some embodiments, R′ is hydrogen. In some embodiments, R″, e.g., in —C(O)R″, is R′ as described herein. In some embodiments, an internucleotidic linkage has the structure of —P(═O)(—NHC(O)R″)—, wherein R″ is as described herein. In some embodiments, an internucleotidic linkage has the structure of —P(═S)(—NHC(O)R″)—, wherein R″ is as described herein. In some embodiments, an internucleotidic linkage has the structure of —P(═O)(—NHC(O)R″)O—, wherein R″ is as described herein. In some embodiments, an internucleotidic linkage has the structure of —P(═S)(—NHC(O)R″)O—, wherein R″ is as described herein. In some embodiments, an internucleotidic linkage has the structure of —OP(═O)(—NHC(O)R″)O—, wherein R″ is as described herein. In some embodiments, an internucleotidic linkage has the structure of —OP(═S)(—NHC(O)R″)O—, wherein R″ is as described herein. In some embodiments, —X—R^{L} is-N(R′)COR^{L}, wherein R^{L} is as described herein. In some embodiments, —X—R^{L} is —N(R′)COR″, wherein R″ is as described herein. In some embodiments, —X—R^{L} is —N(R′)COR′, wherein R′ is as described herein. In some embodiments, —X—R^{L} is —NHCOR′, wherein R′ is as described herein. In some embodiments, R′ is R as described herein. In some embodiments, R′ is optionally substituted C₁₋₆ aliphatic. In some embodiments, R′ is optionally substituted C₁₋₆ alkyl. In some embodiments, R′ is optionally substituted phenyl. In some embodiments, R′ is optionally substituted heteroaryl. In some embodiments, R″, e.g., in —C(O)R″, is R. In some embodiments, R is an optionally substituted group selected from C₁₋₆ aliphatic, aryl, heterocyclyl, and heteroaryl. In some embodiments, R is optionally substituted C₁₋₆ aliphatic. In some embodiments, R is optionally substituted C₁₋₆ alkyl. In some embodiments, R is optionally substituted C₁₋₆ alkenyl. In some embodiments, R is optionally substituted C₁₋₆ alkynyl. In some embodiments, R is methyl. In some embodiments, —X—R^{L} is —NHC(O)CH₃. In some embodiments, R is optionally substituted methyl. In some embodiments, R is —CF₃. In some embodiments, R is optionally substituted ethyl. In some embodiments, R is ethyl. In some embodiments, R is —CH₂CHF₂. In some embodiments, R is —CH₂CH₂OCH₃. In some embodiments, R is optionally substituted C₁₋₂₀ (e.g., C₁₋₆, C₂₋₆, C₃₋₆, C₁₋₁₀, C₂₋₁₀, C₃₋₁₀, C₂₋₂₀, C₃₋₂₀, C₁₀₋₂₀, 1, 2, 3, 4, 5, 6, 7, 8, 9, 10, 11, 12, 13, 14, 15, 16, 17, 18, 19, or 20, etc.) aliphatic. In some embodiments, R is optionally substituted C₁₋₂₀ (e.g., C₁₋₆, C₂₋₆, C₃₋₆, C₁₋₁₀, C₂₋₁₀, C₃₋₁₀, C₂₋₂₀, C₃₋₂₀, C₁₀₋₂₀, 1, 2, 3, 4, 5, 6, 7, 8, 9, 10, 11, 12, 13, 14, 15, 16, 17, 18, 19, or 20, etc.) alkyl. In some embodiments, R is an optionally substituted linear C₂₋₂₀ aliphatic. In some embodiments, R is optionally substituted linear C₂₋₂₀ alkyl. In some embodiments, R is linear C₂₋₂₀ alkyl. In some embodiments, R is optionally substituted C₁, C₂, C₃, C₄, C₅, C₆, C₇, C₈, C₉, C₁₀, C₁₁, C₁₂, C₁₃, C₁₄, C₁₅, C₁₆, C₁₇, C₁₈, C₁₉, or C₂₀ aliphatic. In some embodiments, R is optionally substituted C₁, C₂, C₃, C₄, C₅, C₆, C₇, C₈, C₉, C₁₀, C₁₁, C₁₂, C₁₃, C₁₄, C₁₈, C₁₆, C₁₇, C₁₈, C₁₉, or C₂₀ alkyl. In some embodiments, R is optionally substituted linear C₁, C₂, C₃, C₄, C₅, C₆, C₇, C₈, C₉, C₁₀, C₁₁, C₁₂, C₁₃, C₁₄, C₁₅, C₁₆, C₁₇, C₁₈, C₁₉, or C₂₀ alkyl. In some embodiments, R is linear C₁, C₂, C₃, C₄, C₅, C₆, C₇, C₈, C₉, C₁₀, C₁₁, C₁₂, C₁₃, C₁₄, C₁₅, C₁₆, C₁₇, C₁₈, C₁₉, or C₂₀ alkyl. In some embodiments, R is optionally substituted aryl. In some embodiments, R is optionally substituted phenyl. In some embodiments, R is p-methylphenyl. In some embodiments, R is benzyl. In some embodiments, R is optionally substituted heteroaryl. In some embodiments, R is optionally substituted 1,3-diazolyl. In some embodiments, R is optionally substituted 2-(1,3)-diazolyl. In some embodiments, R is optionally substituted 1-methyl-2-(1,3)-diazolyl. In some embodiments, R^{L} is —(CH₂)₅NH₂. In some embodiments, R^{L} is

[chemical structure]

In some embodiments, R^{L} is

[chemical structure]

In some embodiments, R″ is —N(R′)₂. In some embodiments, R″ is —N(CH₃)₂. In some embodiments, —X—R^{L} is —N(R′)CON(R^{L})₂, wherein each of R′ and R^{L} is independently as described herein. In some embodiments, —X—R^{L} is —NHCON(R^{L})₂, wherein R^{L} is as described herein. In some embodiments, two R′ or two R^{L} are taken together with the nitrogen atom to which they are attached to form a ring as described herein, e.g., optionally substituted C

[chemical structure]

In some embodiments, R″, e.g., in —C(O)R″, is —OR′, wherein R′ is as described herein. In some embodiments, R′ is R as described herein. In some embodiments, is optionally substituted C₁₋₆ aliphatic. In some embodiments, is optionally substituted C₁₋₆ alkyl. In some embodiments, R″ is —OCH₃. In some embodiments, —X—R^{L} is —N(R′)C(O)OR^{L}, wherein each of R′ and R^{L} is independently as described herein. In some embodiments, R is

[chemical structure]

In some embodiments, —X—R^{L} is —NHC(O)OCH₃. In some embodiments, —X—R^{L} is —NHC(O)N(CH₃)₂. In some embodiments, a linkage is —OP(O)(NHC(O)CH₃)O—. In some embodiments, a linkage is —OP(O)(NHC(O)OCH₃)O—. In some embodiments, a linkage is —OP(O)(NHC(O)(p-methylphenyl))O—. In some embodiments, a linkage is —OP(O)(NHC(O)N(CH₃)₂)O—. In some embodiments, —X—R^{L} is —N(R′)R^{L}, wherein each of R′ and R^{L} is independently as described herein. In some embodiments, —X—R^{L} is N(R′)R^{L}, wherein each of R′ and R^{L} is independently not hydrogen. In some embodiments, —X—R^{L} is —NHR^{L}, wherein R^{L} is as described herein. In some embodiments, R^{L} is not hydrogen. In some embodiments, R^{L} is optionally substituted aryl or heteroaryl. In some embodiments, R^{L} is optionally substituted aryl. In some embodiments, R^{L} is optionally substituted phenyl. In some embodiments, —X—R^{L} is —N(R′)₂, wherein each R′ is independently as described herein. In some embodiments, —X—R^{L} is NHR′, wherein R′ is as described herein. In some embodiments, —X—R^{L} is —NHR, wherein R is as described herein. In some embodiments, —X—R^{L} is R^{L}, wherein R^{L} is as described herein. In some embodiments, R^{L} is —N(R′)₂, wherein each R′ is independently as described herein. In some embodiments, R^{L} is —NHR′, wherein R′ is as described herein. In some embodiments, R^{L} is —NHR, wherein R is as described herein. In some embodiments, R^{L} is —N(R′)₂, wherein each R′ is independently as described herein. In some embodiments, none of R′ in —N(R′)₂ is hydrogen. In some embodiments, R^{L} is —N(R′)₂, wherein each R′ is independently C₁₋₆ aliphatic. In some embodiments, R^{L} is -L-R′, wherein each of L and R′ is independently as described herein. In some embodiments, R^{L} is -L-R, wherein each of L and R is independently as described herein. In some embodiments, R^{L} is —N(R′)-Cy-N(R′)—R′. In some embodiments, R^{L} is —N(R′)-Cy-C(O)—R′. In some embodiments, R^{L} is —N(R′)-Cy-O—R′. In some embodiments, R^{L} is —N(R′)-Cy-SO₂—R′. In some embodiments, R^{L} is —N(R′)-Cy-SO₂—N(R′)₂. In some embodiments, R^{L} is —N(R′)-Cy-C(O)—N(R′)₂. In some embodiments, R^{L} is —N(R′)-Cy-OP(O)(R″)₂. In some embodiments, -Cy- is an optionally substituted bivalent aryl group. In some embodiments, -Cy- is optionally substituted phenylene. In some embodiments, -Cy- is optionally substituted 1,4-phenylene. In some embodiments, -Cy- is 1,4-phenylene. In some embodiments, R^{L} is —N(CH₃)₂. In some embodiments, R^{L} is —N(i-Pr)₂. In some embodiments, R^{L} is

[chemical structure]

In some embodiments, R^{L} is

[chemical structure]

In some embodiments, R^{L} is

[chemical structure]

In some embodiments, R^{L} is

[chemical structure]

In some embodiments, R^{L} is

[chemical structure]

In some embodiments, R^{L} is

[chemical structure]

In some embodiments, R^{L} is

[chemical structure]

In some embodiments, R^{L} is

[chemical structure]

In some embodiments, R^{L} is

[chemical structure]

In some embodiments, R^{L} is

[chemical structure]

In some embodiments, R^{L} is

[chemical structure]

In some embodiments, R^{L} is

[chemical structure]

In some embodiments, R^{L} is

[chemical structure]

In some embodiments, R^{L} is

[chemical structure]

In some embodiments, R^{L} is

[chemical structure]

In some embodiments, R^{L} is

[chemical structure]

In some embodiments, R^{L} is

[chemical structure]

In some embodiments. R^{L} is

[chemical structure]

In some embodiments, R^{L} is

[chemical structure]

[chemical structure]

[chemical structure]

In some embodiments, —X—R^{L} is —N(R′)—C(O)-Cy-R^{L}. In some embodiments, —X—R^{L} is R^{L}. In some embodiments, R^{L} is —N(R′)—C(O)-Cy-O—R′. In some embodiments, R^{L} is —N(R′)—C(O)-Cy-R′. In some embodiments, R^{L} is —N(R′)—C(O)-Cy-C(O)—R′. In some embodiments, R^{L} is —N(R′)—C(O)-Cy-N(R′)₂. In some embodiments, R^{L} is —N(R′)—C(O)-Cy-SO₂—N(R′)₂. In some embodiments, R^{L} is N(R′)—C(O)-Cy-C(O)—N(R′)₂. In some embodiments, R^{L} is —N(R′)—C(O)-Cy-C(O)—N(R′)—SO₂—R′. In some embodiments, R′ is R as described herein. In some embodiments, R^{L} is

[chemical structure]

[chemical structure]

[chemical structure]

[1082] As described herein, in some embodiments, one or more methylene units of L, or a variable which comprises or is L, are independently replaced with —O—, —N(R′)—, —C(O)—, —C(O)N(R′)—, —SO₂—, —SO₂N(R′)—, or -Cy-. In some embodiments, a methylene unit is replaced with -Cy-. In some embodiments, -Cy- is an optionally substituted bivalent aryl group. In some embodiments, -Cy- is optionally substituted phenylene. In some embodiments, -Cy- is optionally substituted 1,4-phenylene. In some embodiments, -Cy- is an optionally substituted bivalent 5-20 (e.g. 5, 6, 7, 8, 9, 10, 11, 12, 13, 14, 15, 16, 17, 18, 19, or 20) membered heteroaryl group having 1-10 (e.g., 1, 2, 3, 4, 5, 6, 7, 8, 9, or 10) heteroatoms. In some embodiments, -Cy- is monocyclic. In some embodiments, -Cy- is bicyclic. In some embodiments, -Cy- is polycyclic. In some embodiments, each monocyclic unit in -Cy- is independently 3-10 (e.g., 3, 4, 5, 6, 7, 8, 9, or 10) membered, and is independently saturated, partially saturated, or aromatic. In some embodiments, -Cy- is an optionally substituted 3-20 (e.g., 3, 4, 5, 6, 7, 8, 9, 10, 11, 12, 13, 14, 15, 16, 17, 18, 19, or 20) membered monocyclic, bicyclic or polycyclic aliphatic group. In some embodiments, -Cy- is an optionally substituted 3-20 (e.g., 3, 4, 5, 6, 7, 8, 9, 10, 11, 12, 13, 14, 15, 16, 17, 18, 19, or 20) membered monocyclic, bicyclic or polycyclic heteroaliphatic group having 1-10 (e.g., 1, 2, 3, 4, 5, 6, 7, 8, 9, or 10) heteroatoms.

[1083] In some embodiments, an internucleotidic linkage has the structure of —P(═O)(—N(R′)P(O)(R″)₂)—, wherein each R″ is independently as described herein. In some embodiments, an internucleotidic linkage has the structure of —P(═S)(—N(R′)P(O)(R″)₂)—, wherein each R″ is independently as described herein. In some embodiments, an internucleotidic linkage has the structure of —P(═O)(—N(R′)P(O)(R″)₂)O—, wherein each R″ is independently as described herein. In some embodiments, an internucleotidic linkage has the structure of —P(═S)(—N(R′)P(O)(R″)₂)O—, wherein each R″ is independently as described herein. In some embodiments, an internucleotidic linkage has the structure of —OP(═O)(—N(R′)P(O)(R″)₂)O—, wherein each R″ is independently as described herein. In some embodiments, an internucleotidic linkage has the structure of —OP(═S)(—N(R′)P(O)(R″)₂)O—, wherein each R″ is independently as described herein. In some embodiments, R′, e.g., of —N(R′)—, is hydrogen or optionally substituted C₁₋₆ aliphatic. In some embodiments, R′ is C₁₋₆ alkyl. In some embodiments, R′ is hydrogen. In some embodiments, R″, e.g., in —P(O)(R″)₂, is R′ as described herein. In some embodiments, an internucleotidic linkage has the structure of —P(═O)(—NHP(O)(R″)₂)—, wherein each R″ is independently as described herein. In some embodiments, an internucleotidic linkage has the structure of —P(═S)(—NHP(O)(R″)₂)—, wherein each R″ is independently as described herein. In some embodiments, an internucleotidic linkage has the structure of —P(═O)(—NHP(O)(R″)₂)O—, wherein each R″ is independently as described herein. In some embodiments, an internucleotidic linkage has the structure of —P(═S)(—NHP(O)(R″)₂)O—, wherein each R″ is independently as described herein. In some embodiments, an internucleotidic linkage has the structure of —OP(═O)(—NHP(O)(R″)₂)O—, wherein each R″ is independently as described herein. In some embodiments, an internucleotidic linkage has the structure of —OP(═S)(—NHP(O)(R″)₂)O—, wherein each R″ is independently as described herein. In some embodiments, an occurrence of R″, e.g., in —P(O)(R″)₂, is R. In some embodiments, R is an optionally substituted group selected from C₁₋₆ aliphatic, aryl, heterocyclyl, and heteroaryl. In some embodiments, R is optionally substituted C₁₋₆ aliphatic. In some embodiments, R is optionally substituted C₁₋₆ alkyl. In some embodiments, R is optionally substituted C₁₋₆ alkenyl. In some embodiments, R is optionally substituted C₁₋₆ alkynyl. In some embodiments, R is methyl. In some embodiments, R is optionally substituted methyl. In some embodiments, R is —CF₃. In some embodiments, R is optionally substituted ethyl. In some embodiments, R is ethyl. In some embodiments, R is —CH₂CHF₂. In some embodiments, R is —CH₂CH₂OCH₃. In some embodiments, R is optionally substituted C₁₋₂₀ (e.g., C₁₋₆, C₂₋₆, C₃₋₆, C₁₋₁₀, C₂₋₁₀, C₃₋₁₀, C₂₋₂₀, C₃₋₂₀, C₁₀₋₂₀, 1, 2, 3, 4, 5, 6, 7, 8, 9, 10, 11, 12, 13, 14, 15, 16, 17, 18, 19, or 20, etc.) aliphatic. In some embodiments, R is optionally substituted C₁₋₂₀ (e.g., C₁₋₆, C₂₋₆, C₃₋₆, C₁₋₁₀, C₂₋₁₀, C₃₋₁₀, C₂₋₂₀, C₃₋₂₀, C₁₀₋₂₀, 1, 2, 3, 4, 5, 6, 7, 8, 9, 10, 11, 12, 13, 14, 15, 16, 17, 18, 19, or 20, etc.) alkyl. In some embodiments, R is an optionally substituted linear C₂₋₂₀ aliphatic. In some embodiments, R is optionally substituted linear C₂₋₂₀ alkyl. In some embodiments, R is linear C₂₋₂₀ alkyl. In some embodiments, R is isopropyl. In some embodiments, R is optionally substituted C₁, C₂, C₃, C₄, C₅, C₆, C₇, C₈, C₉, C₁₀, C₁₁, C₁₂, C₁₃, C₁₄, C₁₅, C₁₆, C₁₇, C₁₈, C₁₉, or C₂₀ aliphatic. In some embodiments, R is optionally substituted C₁, C₂, C₃, C₄, C₅, C₆, C₇, C₈, C₉, C₁₀, C₁₁, C₁₂, C₁₃, C₁₄, C₁₅, C₁₆, C₁₇, C₁₈, C₁₉, or C₂₀ alkyl. In some embodiments, R is optionally substituted linear C₁, C₂, C₃, C₄, C₅, C₆, C₇, C₈, C₉, C₁₀, C₁₁, C₁₂, C₁₃, C₁₄, C₁₈, C₁₆, C₁₇, C₁₈, C₁₉, or C₂₀ alkyl. In some embodiments, R is linear C₁, C₂, C₃, C₄, C₅, C₆, C₇, C₈, C₉, C₁₀, C₁₁, C₁₂, C₁₃, C₁₄, C₁₅, C₁₆, C₁₇, C₁₈, C₁₉, or C₂₀ alkyl. In some embodiments, each R″ is independently R as described herein, for example, in some embodiments, each R″ is methyl. In some embodiments, R″ is optionally substituted aryl. In some embodiments, R is optionally substituted phenyl. In some embodiments, R is p-methylphenyl. In some embodiments, R is benzyl. In some embodiments, R is optionally substituted heteroaryl. In some embodiments, R is optionally substituted 1,3-diazolyl. In some embodiments, R is optionally substituted 2-(1,3)-diazolyl. In some embodiments, R is optionally substituted 1-methyl-2-(1,3)-diazolyl. In some embodiments, an occurrence of R″ is —N(R′)₂. In some embodiments, R″ is —N(CH₃)₂. In some embodiments, an occurrence of R″, e.g., in —P(O)(R″)₂, is —OR′, wherein R′ is as described herein. In some embodiments, R′ is R as described herein. In some embodiments, is optionally substituted C₁₋₆ aliphatic. In some embodiments, is optionally substituted C₁₋₆ alkyl. In some embodiments, R″ is —OCH₃. In some embodiments, each R″ is —OR′ as described herein. In some embodiments, each R″ is —OCH₃. In some embodiments, each R″ is —OH. In some embodiments, a linkage is —OP(O)(NHP(O)(OH)₂)O—. In some embodiments, a linkage is —OP(O)(NHP(O)(OCH₃)₂)O—. In some embodiments, a linkage is —OP(O)(NHP(O)(CH₃)₂)O—.

[1084] In some embodiments, —N(R″)₂ is —N(R′)₂. In some embodiments, —N(R″)₂ is —NHR. In some embodiments, —N(R″)₂ is —NHC(O)R. In some embodiments, —N(R″)₂ is —NHC(O)OR. In some embodiments, —N(R″)₂ is —NHS(O)₂R.

[1085] In some embodiments, an internucleotidic linkage is a phosphoryl guanidine internucleotidic linkage. In some embodiments, an internucleotidic linkage comprises —X—R^{L} as described herein. In some embodiments, —X—R^{L} is-N=C(-L^{L}-R^{L})₂. In some embodiments, —X—R^{L} is-N=C[N(R^{L})₂]₂. In some embodiments, —X—R^{L} is-N=C[NR′R^{L}]₂. In some embodiments, —X—R^{L} is —N═C[N(R′)₂]₂. In some embodiments, —X—R^{L} is —N═C[N(R^{L})₂](CHR^{L1}R^{L2}), wherein each of R^{L1} and R^{L2} is independently as described herein. In some embodiments, —X—R^{L} is-N=C(NR′R^{L})(CHR^{L1}R^{L2}), wherein each of R^{L1} and R^{L2} is independently as described herein. In some embodiments, —X—R^{L} is —N═C(NR′R^{L})(CR′R^{L1}R^{L2}), wherein each of R^{L1} and R^{L2} is independently as described herein. In some embodiments, —X—R^{L} is —N=C[N(R′)₂](CHR′R^{L2}). In some embodiments, —X—R^{L} is —N=C[N(R^{L})₂](R^{L}). In some embodiments, —X—R^{L} is —N=C(NR′R^{L})(R^{L}). In some embodiments, —X—R^{L} is —N=C(NR′R^{L})(R′). In some embodiments, —X—R^{L} is —N═C[N(R′)₂](R′). In some embodiments, —X—R^{L} is —N=C(NR′R^{L})(NR′R^{L2}), wherein each R^{L1} and R^{L2} is independently R^{L}, and each R′ and R^{L} is independently as described herein. In some embodiments, —X—R^{L} is —N=C(NR′R^{L1})(NR′R^{L2}), wherein variable is independently as described herein. In some embodiments, —X—R^{L} is —N═C(NR′R^{L1})(CHR′R^{L2}), wherein variable is independently as described herein. In some embodiments, —X—R^{L} is N=C(NR′R^{L1})(R′), wherein variable is independently as described herein. In some embodiments, each R′ is independently R. In some embodiments, R is optionally substituted C₁₋₆ aliphatic. In some embodiments, R is methyl. In some embodiments, —X—R^{L} is

[chemical structure]

In some embodiments, two groups selected from R′, R^{L}, R^{L1}, R^{L2}, etc. (in some embodiments, on the same atom (e.g., —N(R′)₂, or —NR′R^{L}, or —N(R^{L})₂, wherein R′ and R^{L} can independently be R as described herein), etc.), or on different atoms (e.g., the two R′ in —N═C(NR′R^{L})(CR′R^{L1}R^{L2}) or —N═C(NR′R^{L1})(NR′R^{L2}); can also be two other variables that can be R, e.g., R^{L}, R^{L}, R^{L2} etc.)) are independently R and are taken together with their intervening atoms to form a ring as described herein. In some embodiments, two of R, R′, R^{L}, R^{L1}, or R^{L2} on the same atom, e.g., of —N(R′)₂, —N(R^{L})₂, —NR′R^{L}, —NR′R^{L}, —NR′R^{L2}, —CR′R^{L1}R^{L2}, etc., are taken together to form a ring as described herein. In some embodiments, two R′, R^{L}, R^{L1}, or R^{L2} on two different atoms, e.g., the two R′ in —N═C(NR′R^{L})(CR′R^{L1}R^{L2}), —N═C(NR′R^{L1})(NR′R^{L2}), etc. are taken together to form a ring as described herein. In some embodiments, a formed ring is an optionally substituted 3-20 (e.g., 3-15, 3-12, 3-10, 3-9, 3-8, 3-7, 3-6, 4-15, 4-12, 4-10, 4-9, 4-8, 4-7, 4-6, 5-15, 5-12, 5-10, 5-9, 5-8, 5-7, 5-6, 1, 2, 3, 4, 5, 6, 7, 8, 9, 10, 11, 12, 13, 14, 15, 16, 17, 18, 19, 20, etc.) monocyclic, bicyclic or tricyclic ring having 0-5 additional heteroatoms. In some embodiments, a formed ring is monocyclic as described herein. In some embodiments, a formed ring is an optionally substituted 5-10 membered monocyclic ring. In some embodiments, a formed ring is bicyclic. In some embodiments, a formed ring is polycyclic. In some embodiments, two groups that are or can be R (e.g., the two R′ in —N═C(NR′R^{L})(CR′R^{L1}R^{L2}) or —N═C(NR′RY)(NR′R^{L2}), the two R′ in —N═C(NR′R^{L})(CR′R^{L1}R^{L2}), —N═C(NR′R^{L1})(NR′R^{L2}), etc.) are taken together to form an optionally substituted bivalent hydrocarbon chain, e.g., an optionally substituted C₁₋₂₀ aliphatic chain, optionally substituted —(CH₂)n- wherein n is 1-20 (e.g., 1, 2, 3, 4, 5, 6, 7, 8, 9, 10, 11, 12, 13, 14, 15, 16, 17, 18, 19, or 20). In some embodiments, a hydrocarbon chain is saturated. In some embodiments, a hydrocarbon chain is partially unsaturated. In some embodiments, a hydrocarbon chain is unsaturated. In some embodiments, two groups that are or can be R (e.g., the two R′ in —N═C(NR′R^{L})(CR′R^{L1}R^{L2}) or —N═C(NR′R^{L1})(NR′R^{L2}), the two R′ in —N═C(NR′R^{L})(CR′R^{L1}R^{L2}), —N═C(NR′R^{L1})(NR′R^{L2}), etc.) are taken together to form an optionally substituted bivalent heteroaliphatic chain, e.g., an optionally substituted C₁₋₂₀ heteroaliphatic chain having 1-10 heteroatoms. In some embodiments, a heteroaliphatic chain is saturated. In some embodiments, a heteroaliphatic chain is partially unsaturated. In some embodiments, a heteroaliphatic chain is unsaturated. In some embodiments, a chain is optionally substituted —(CH₂)—. In some embodiments, a chain is optionally substituted —(CH₂)₂—. In some embodiments, a chain is optionally substituted —(CH₂)—. In some embodiments, a chain is optionally substituted —(CH₂)₂—. In some embodiments, a chain is optionally substituted —(CH₂)₃—. In some embodiments, a chain is optionally substituted —(CH₂)₄—. In some embodiments, a chain is optionally substituted —(CH₂)₅—. In some embodiments, a chain is optionally substituted —(CH₂)₆—. In some embodiments, a chain is optionally substituted —CH═CH—. In some embodiments, a chain is optionally substituted

[chemical structure]

In some embodiments, a chain is optionally substituted

[chemical structure]

In some embodiments, a chain is optionally substituted

[chemical structure]

In some embodiments, a chain is optionally substituted

[chemical structure]

In some embodiments, a chain is optionally substituted

[chemical structure]

In some embodiments, a chain is optionally substituted

[chemical structure]

In some embodiments, a chain is optionally substituted

[chemical structure]

In some embodiments, a chain is optionally substituted

[chemical structure]

In some embodiments, a chain is optionally substituted

[chemical structure]

In some embodiments, two of R, R′, R^{L}, R^{L1}, R^{L2}, etc. on different atoms are taken together to form a ring as described herein. For examples, in some embodiments, —X—R^{L} is

[chemical structure]

In some embodiments, —X—R^{L} is

[chemical structure]

In some embodiments, —X—R^{L} is

[chemical structure]

In some embodiments, —X—R^{L} is

[chemical structure]

In some embodiments, —X—R^{L} is

[chemical structure]

In some embodiments, —X—R^{L} is

[chemical structure]

In some embodiments, —X—R^{L} is

[chemical structure]

In some embodiments, —X—R^{L} is R^{L2} is

[chemical structure]

In some embodiments, —X—R^{L} is

[chemical structure]

In some embodiments, —X—R^{L} is

[chemical structure]

In some embodiments, —N(R′)₂, —N(R)₂, —N(R^{L})₂, —NR′R^{L}, —NR′^{L1}, —NR′R^{L2}, NR^{L1}R^{L2}, etc. is a formed ring. In some embodiments, a ring is optionally substituted

[chemical structure]

In some embodiments, a ring is optionally substituted

[chemical structure]

In some embodiments, a ring is optionally substituted

[chemical structure]

In some embodiments, a ring is optionally substituted

[chemical structure]

In some embodiments, a ring is optionally substituted

[chemical structure]

In some embodiments, a ring is optionally substituted

[chemical structure]

In some embodiments, a ring is optionally substituted

[chemical structure]

In some embodiments, a ring is optionally substituted

[chemical structure]

In some embodiments, a ring is optionally substituted

[chemical structure]

In some embodiments, a ring is optionally substituted

[chemical structure]

In some embodiments, a ring is optionally substituted

[chemical structure]

In some embodiments, a ring is optionally substituted

[chemical structure]

In some embodiments, a ring is optionally substituted

[chemical structure]

In some embodiments, a ring is optionally substituted

[chemical structure]

In some embodiments, a ring is optionally substituted

[chemical structure]

[1086] In some embodiments, R^{L1} and R^{L2} are the same. In some embodiments, R^{L1} and R^{L2} are different. In some embodiments, each of R^{L1} and R^{L2} is independently R^{L} as described herein, e.g., below.

[1087] In some embodiments, R^{L} is optionally substituted C₁₋₃₀ aliphatic. In some embodiments, R^{L} is optionally substituted C₁₋₃₀ alkyl. In some embodiments, R^{L} is linear. In some embodiments, R^{L} is optionally substituted linear C₁₋₃₀ alkyl. In some embodiments, R^{L} is optionally substituted C₁₋₆ alkyl. In some embodiments, R^{L} is methyl. In some embodiments, R^{L} is ethyl. In some embodiments, R^{L} is n-propyl. In some embodiments, R^{L} is isopropyl. In some embodiments, R^{L} is n-butyl. In some embodiments, R^{L} is tert-butyl. In some embodiments, R^{L} is (E)-CH₂—CH═CH—CH₂—CH₃. In some embodiments R^{L} is (Z)—CH₂—CH═CH—CH₂—CH₃. In some embodiments, R^{L} is

[chemical structure]

In some embodiments, R^{L} is

[chemical structure]

In some embodiments, R^{L} is CH₃(CH₂)₂C≡CC≡C(CH₂)₃—. In some embodiments, R^{L} is CH₃(CH₂)₅C≡C—. In some embodiments, R^{L} optionally substituted aryl. In some embodiments, R^{L} is optionally substituted phenyl. In some embodiments, R^{L} is phenyl substituted with one or more halogen. In some embodiments, R^{L} is phenyl optionally substituted with halogen, —N(R′), or —N(R′)C(O)R′. In some embodiments, R^{L} is phenyl optionally substituted with —C₁, —Br, —F, —N(Me)₂, or —NHCOCH₃. In some embodiments, R^{L} is LLR′, wherein L^{L} is an optionally substituted C₁₋₂₀ saturated, partially unsaturated or unsaturated hydrocarbon chain. In some embodiments, such a hydrocarbon chain is linear. In some embodiments, such a hydrocarbon chain is unsubstituted. In some embodiments, L^{L} is (E)-CH₂—CH═CH—. In some embodiments, L^{L} is —CH₂—C≡C—CH₂—. In some embodiments, L^{L} is —(CH₂)₃—. In some embodiments, L^{L} is —(CH₂)₄—. In some embodiments, L^{L} is —(CH₂)r-, wherein n is 1-30 (e.g., 1-20, 5-30, 6-30, 1, 2, 3, 4, 5, 6, 7, 8, 9, 10, 11, 12, 13, 14, 15, 16, 17, 18, 19, 20, 21, 22, 23, 24, 25, 26, 27, 28, 29 or 30, etc.). In some embodiments, R′ is optionally substituted aryl as described herein. In some embodiments, R′ is optionally substituted phenyl. In some embodiments, R′ is phenyl. In some embodiments, R′ is optionally substituted heteroaryl as described herein. In some embodiments, R′ is 2′-pyridinyl. In some embodiments, R′ is 3′-pyridinyl. In some embodiments, R^{L} is

[chemical structure]

In some embodiments, R^{L} is

[chemical structure]

In some embodiments, R^{L} is

[chemical structure]

In some embodiments, R^{L} is-L^{L}-N(R′)₂, wherein each variable is independently as described herein. In some embodiments, each R′ is independently C₁₋₆ aliphatic as described herein. In some embodiments, —N(R′)₂ is —N(CH₃)₂. In some embodiments, —N(R′)₂ is —NH₂. In some embodiments, R^{L} is —(CH₂)r-N(R′)₂, wherein n is 1-30 (e.g., 1-20, 5-30, 6-30, 1, 2, 3, 4, 5, 6, 7, 8, 9, 10, 11, 12, 13, 14, 15, 16, 17, 18, 19, 20, 21, 22, 23, 24, 25, 26, 27, 28, 29 or 30, etc.). In some embodiments, R^{L} is —(CH₂CH₂O)ₙ—CH₂CH₂—N(R′)₂, wherein n is 1-30 (e.g., 1-20, 5-30, 6-30, 1, 2, 3, 4, 5, 6, 7, 8, 9, 10, 11, 12, 13, 14, 15, 16, 17, 18, 19, 20, 21, 22, 23, 24, 25, 26, 27, 28, 29 or 30, etc.). In some embodiments, R^{L} is

[chemical structure]

In some embodiments, R^{L} is

[chemical structure]

In some embodiments, R^{L} is

[chemical structure]

In some embodiments, R^{L} is —(CH₂)ₙ—NH₂. In some embodiments, R^{L} is —(CH₂CH₂O)r-CH₂CH₂—NH₂. In some embodiments, R^{L} is —(CH₂CH₂O)ₙ—CH₂CH₂—R′, wherein n is 1-30 (e.g., 1-20, 5-30, 6-30, 1, 2, 3, 4, 5, 6, 7, 8, 9, 10, 11, 12, 13, 14, 15, 16, 17, 18, 19, 20, 21, 22, 23, 24, 25, 26, 27, 28, 29 or 30, etc.). In some embodiments, R^{L} is —(CH₂CH₂O)ₙₙ—CH₂CH₂CH₃, wherein n is 1-30 (e.g., 1-20, 5-30, 6-30, 1, 2, 3, 4, 5, 6, 7, 8, 9, 10, 11, 12, 13, 14, 15, 16, 17, 18, 19, 20, 21, 22, 23, 24, 25, 26, 27, 28, 29 or 30, etc.). In some embodiments, R^{L} is —(CH₂CH₂O)ₙ—CH₂CH₂OH, wherein n is 1-30 (e.g., 1-20, 5-30, 6-30, 1, 2, 3, 4, 5, 6, 7, 8, 9, 10, 11, 12, 13, 14, 15, 16, 17, 18, 19, 20, 21, 22, 23, 24, 25, 26, 27, 28, 29 or 30, etc.). In some embodiments, R^{L} is or comprises a carbohydrate moiety, e.g., GalNAc. In some embodiments, R^{L} is -L^{L}-GalNAc. In some embodiments, R^{L} is

[chemical structure]

In some embodiments, one or more methylene units of L^{L} are independently replaced with -Cy- (e.g., optionally substituted 1,4-phenylene, a 3-30 membered bivalent optionally substituted monocyclic, bicyclic, or polycyclic cycloaliphatic ring, etc.), —O—, —N(R′)— (e.g., —NH), —C(O)—, —C(O)N(R′)— (e.g., —C(O)NH—), —C(NR′)— (e.g., —C(NH)—), —N(R′)C(O)(N(R′)— (e.g., —NHC(O)NH—), —N(R′)C(NR′)(N(R′)— (e.g., —NHC(NH)NH—), —(CH₂CH₂O)ₙ—, etc. For example, in some embodiments, R^{L} is

[chemical structure]

In some embodiments, R^{L} is

[chemical structure]

In some embodiments, R^{L} is

[chemical structure]

In some embodiments, R^{L} is

[chemical structure]

In some embodiments, R^{L} is

[chemical structure]

wherein n is 0-20. In some embodiments, R^{L} is or comprises one or more additional chemical moieties (e.g., carbohydrate moieties, GalNAc moieties, etc.) optionally substituted connected through a linker (which can be bivalent or polyvalent). For example, in some embodiments, R^{L} is

[chemical structure]

wherein n is 0-20. In some embodiments, R^{L} is

[chemical structure]

wherein n is 0-20. In some embodiments, R^{L} is R′ as described herein. As described herein, many variable can independently be R′. In some embodiments, R′ is R as described herein. As described herein, various variables can independently be R. In some embodiments, R is optionally substituted C₁₋₆ aliphatic. In some embodiments, R is optionally substituted C₁₋₆ alkyl. In some embodiments, R is methyl. In some embodiments, R is optionally substituted cycloaliphatic. In some embodiments, R is optionally substituted cycloalkyl. In some embodiments, R is optionally substituted aryl. In some embodiments, R is optionally substituted phenyl. In some embodiments, R is optionally substituted heteroaryl. In some embodiments, R is optionally substituted heterocyclyl. In some embodiments, R is optionally substituted C₁₋₂₀ heterocyclyl having 1-5 heteroatoms, e.g., one of which is nitrogen. In some embodiments, R is optionally substituted

[chemical structure]

In some embodiments, R is optionally substituted

[chemical structure]

In some embodiments, R is optionally substituted

[chemical structure]

In some embodiments, R is optionally substituted

[chemical structure]

In some embodiments, R is optionally substituted

[chemical structure]

In some embodiments, R is optionally substituted

[chemical structure]

In some embodiments, R is optionally substituted

[chemical structure]

In some embodiments, R is optionally substituted

[chemical structure]

In some embodiments, R is optionally substituted

[chemical structure]

In some embodiments, R is optionally substituted

[chemical structure]

In some embodiments, R is optionally substituted

[chemical structure]

In some embodiments, R is optionally substituted

[chemical structure]

In some embodiments, R is optionally substituted

[chemical structure]

In some embodiments, R is optionally substituted

[chemical structure]

In some embodiments, R is optionally substituted

[chemical structure]

[1088] In some embodiments, —X—R^{L} is

[chemical structure]

In some embodiments, —X—R^{L} is

[chemical structure]

In some embodiments, —X—R^{L} is

[chemical structure]

In some embodiments, —X—R^{L} is

[chemical structure]

In some embodiments, —X—R^{L} is

[chemical structure]

In some embodiments, —X—R^{L} is

[chemical structure]

In some embodiments, —X—R^{L} is

[chemical structure]

In some embodiments, —X—R^{L} is

[chemical structure]

In some embodiments, —X—R^{L} is

[chemical structure]

In some embodiments, —X—R^{L} is

[chemical structure]

In some embodiments, —X—R^{L} is

[chemical structure]

In some embodiments, —X—R^{L} is

[chemical structure]

In some embodiments, —X—R^{L} is

[chemical structure]

wherein n is 1-20. In some embodiments, —X—R^{L} is

[chemical structure]

wherein n is 1-20. In some embodiments, —X—R^{L} is selected from:

[chemical structure]

[chemical structure]

In some embodiments, —X—R^{L} is

[chemical structure]

In some embodiments, —X—R^{L} is

[chemical structure]

In some embodiments, —X—R^{L} is

[chemical structure]

[1089] In some embodiments, R^{L} is R″ as described herein. In some embodiments, R^{L} is R as described herein.

[1090] In some embodiments, R″ or R^{L} is or comprises an additional chemical moiety. In some embodiments, R″ or R^{L} is or comprises an additional chemical moiety, wherein the additional chemical moiety is or comprises a carbohydrate moiety. In some embodiments, R″ or R^{L} is or comprises a GalNAc. In some embodiments, R^{L} or R″ is replaced with, or is utilized to connect to, an additional chemical moiety.

[1091] In some embodiments, X is —O—. In some embodiments, X is —S—. In some embodiments, X is -L^{L}-N(-L^{L}-R^{L})-L^{L}-. In some embodiments, X is —N(-L^{L}-R^{L})L^{L} In some embodiments, X is -L^{L}-N(-L^{L}-R^{L})—. In some embodiments, X is —N(-L^{L}-R^{L})—. In some embodiments, X is -L^{L}-N=C(-L^{L}-R^{L})-L^{L}-. In some embodiments, X is —N═C(-L^{L}-R^{L})-L^{L}-. In some embodiments, X is -L^{L}-N=C(-L^{L}-R^{L})—. In some embodiments, X is —N═C(-L^{L}-R^{L})—. In some embodiments, X is L^{L}. In some embodiments, X is a covalent bond.

[1092] In some embodiments, Y is a covalent bond. In some embodiments, Y is —O—. In some embodiments, Y is —N(R′)—. In some embodiments, Z is a covalent bond. In some embodiments, Z is —O—. In some embodiments, Z is —N(R′)—. In some embodiments, R′ is R. In some embodiments, R is —H. In some embodiments, R is optionally substituted C₁₋₆ aliphatic. In some embodiments, R is methyl. In some embodiments, R is ethyl. In some embodiments, R is propyl. In some embodiments, R is optionally substituted phenyl. In some embodiments, R is phenyl.

[1093] As described herein, various variables in structures in the present disclosure can be or comprise R. Suitable embodiments for R are described extensively in the present disclosure. As appreciated by those skilled in the art, R embodiments described for a variable that can be R may also be applicable to another variable that can be R. Similarly, embodiments described for a component/moiety (e.g., L) for a variable may also be applicable to other variables that can be or comprise the component/moiety.

[1094] In some embodiments, R″ is R′. In some embodiments, R″ is —N(R′)₂.

[1095] In some embodiments, —X—R^{L} is —SH. In some embodiments, —X—R^{L} is —OH.

[1096] In some embodiments, —X—R^{L} is —N(R′)₂. In some embodiments, each R′ is independently optionally substituted C₁₋₆ aliphatic. In some embodiments, each R′ is independently methyl.

[1097] In some embodiments, a non-negatively charged internucleotidic linkage has the structure of —OP(═O)(—N═C((N(R′)₂)₂—O—. In some embodiments, a R′ group of one N(R′)₂ is R, a R′ group of the other N(R′)₂ is R, and the two R groups are taken together with their intervening atoms to form an optionally substituted ring, e.g., a 5-membered ring as in n001. In some embodiments, each R′ is independently R, wherein each R is independently optionally substituted C₁₋₆ aliphatic.

[1098] In some embodiments, —X—R^{L} is —N=C(-L^{L}-R′)₂. In some embodiments, —X—R^{L} is —N=C(-L^{L1}-L^{L2}-L^{L3}-R′)₂, wherein each L^{L1}, L^{L2} and L^{L3} is independently L″, wherein each L″ is independently a covalent bond, or a bivalent, optionally substituted, linear or branched group selected from a C₁₋₁₀ aliphatic group and a C₁₋₁₀ heteroaliphatic group having 1-5 heteroatoms, wherein one or more methylene units are optionally and independently replaced by an optionally substituted group selected from C₁₋₆ alkylene, C₁₋₆ alkenylene, —C≡C—, a bivalent C₁-C₆ heteroaliphatic group having 1-5 heteroatoms, —C(R′)₂—, -Cy-, —O—, —S—, —S—S—, —N(R′)—, —C(O)—, —C(S)—, —C(NR′)—, —C(O)N(R′)—, —N(R′)C(O)N(R′)—, —N(R′)C(O)O—, —S(O)—, —S(O)₂—, —S(O)₂N(R′)—, —C(O)S—, —C(O)O—, —P(O)(OR′)—, —P(O)(SR′)—, —P(O)(R′)—, —P(O)(NR′)—, —P(S)(OR′)—, —P(S)(SR′)—, —P(S)(R′)—, —P(S)(NR′)—, —P(R′)—, —P(OR′)—, —P(SR′)—, —P(NR′)—, —P(OR′)[B(R′)₃]—, —OP(O)(OR′)O—, —OP(O)(SR′)O—, —OP(O)(R′)O—, —OP(O)(NR′)O—, —OP(OR′)O—, —OP(SR′)O—, —OP(NR′)O—, —OP(R′)O—, or —OP(OR′)[B(R′)₃]O—, and one or more nitrogen or carbon atoms are optionally and independently replaced with Cy^{L}. In some embodiments, L^{L2} is -Cy-. In some embodiments, L^{L}1 is a covalent bond. In some embodiments, L^{L3} is a covalent bond. In some embodiments, —X—R^{L} is —N═C(-L^{L1}-Cy-L^{L3}-R′)₂. In some embodiments, —X—R^{L} is

[chemical structure]

In some embodiments, —X—R^{L} is

[chemical structure]

In some embodiments, —X—R^{L} is

[chemical structure]

In some embodiments, —X—R^{L} is

[chemical structure]

In some embodiments, —X—R^{L} is

[chemical structure]

In some embodiments, —X—R^{L} is

[chemical structure]

[1099] In some embodiments, as utilized in the present disclosure, L is covalent bond. In some embodiments, L is a bivalent, optionally substituted, linear or branched group selected from a C₁₋₃₀ aliphatic group and a C₁₋₃₀ heteroaliphatic group having 1-10 heteroatoms, wherein one or more methylene units are optionally and independently replaced by an optionally substituted group selected from C₁₋₆ alkylene, C₁₋₆ alkenylene, —C≡C—, a bivalent C₁-C₆ heteroaliphatic group having 1-5 heteroatoms, —C(R′)₂—, -Cy-, —O—, —S—, —S—S—, —N(R′)—, —C(O)—, —C(S)—, —C(NR′)—, —C(O)N(R′)—, —N(R′)C(O)N(R′)—, —N(R′)C(O)O—, —S(O)—, —S(O)₂—, —S(O)₂N(R′)—, —C(O)S—, —C(O)O—, —P(O)(OR′)—, —P(O)(SR′)—, —P(O)(R′)—, —P(O)(NR′)—, —P(S)(OR′)—, —P(S)(SR′)—, —P(S)(R′)—, —P(S)(NR′)—, —P(R′)—, —P(OR′)—, —P(SR′)—, —P(NR′)—, —P(OR′)[B(R′)₃]—, —OP(O)(OR′)O—, —OP(O)(SR′)O—, —OP(O)(R′)O—, —OP(O)(NR′)O—, —OP(OR′)O—, —OP(SR′)O—, —OP(NR′)O—, —OP(R′)O—, or —OP(OR′)[B(R′)₃]O—, and one or more nitrogen or carbon atoms are optionally and independently replaced with Cy^{L}. In some embodiments, L is a bivalent, optionally substituted, linear or branched group selected from a C₁₋₃₀ aliphatic group and a C₁₋₃₀ heteroaliphatic group having 1-10 heteroatoms, wherein one or more methylene units are optionally and independently replaced by an optionally substituted group selected from —C≡C—, —C(R′)₂—, -Cy-, —O—, —S—, —S—S—, —N(R′)—, —C(O)—, —C(S)—, —C(NR′)—, —C(O)N(R′)—, —N(R′)C(O)N(R′)—, —N(R′)C(O)O—, —S(O)—, —S(O)₂—, —S(O)₂N(R′)—, —C(O)S—, —C(O)O—, —P(O)(OR′)—, —P(O)(SR′)—, —P(O)(R′)—, —P(O)(NR′)—, —P(S)(OR′)—, —P(S)(SR′)—, —P(S)(R′)—, —P(S)(NR′)—, —P(R′)—, —P(OR′)—, —P(SR′)—, —P(NR′)—, —P(OR′)[B(R′)₃]—, —OP(O)(OR′)O—, —OP(O)(SR′)O—, —OP(O)(R′)O—, —OP(O)(NR′)O—, —OP(OR′)O—, —OP(SR′)O—, —OP(NR′)O—, —OP(R′)O—, or —OP(OR′)[B(R′)₃]O—, and one or more nitrogen or carbon atoms are optionally and independently replaced with Cy^{L}. In some embodiments, L is a bivalent, optionally substituted, linear or branched group selected from a C₁₋₁₀ aliphatic group and a C₁₋₁₀ heteroaliphatic group having 1-10 heteroatoms, wherein one or more methylene units are optionally and independently replaced by an optionally substituted group selected from —C≡C—, —C(R′)₂—, -Cy-, —O—, —S—, —S—S—, —N(R′)—, —C(O)—, —C(S)—, —C(NR′)—, —C(O)N(R′)—, —N(R′)C(O)N(R′)—, —N(R′)C(O)O—, —S(O)—, —S(O)₂—, —S(O)₂N(R′)—, —C(O)S—, —C(O)O—, —P(O)(OR′)—, —P(O)(SR′)—, —P(O)(R′)—, —P(O)(NR′)—, —P(S)(OR′)—, —P(S)(SR′)—, —P(S)(R′)—, —P(S)(NR′)—, —P(R′)—, —P(OR′)—, —P(SR′)—, —P(NR′)—, —P(OR′)[B(R′)₃]—, —OP(O)(OR′)O—, —OP(O)(SR′)O—, —OP(O)(R′)O—, —OP(O)(NR′)O—, —OP(OR′)O—, —OP(SR′)O—, —OP(NR′)O—, —OP(R′)O—, or —OP(OR′)[B(R′)₃]O—, and one or more nitrogen or carbon atoms are optionally and independently replaced with Cy^{L}. In some embodiments, one or more methylene units are optionally and independently replaced by an optionally substituted group selected from —C≡C—, —C(R′)₂—, -Cy-, —O—, —S—, —S—S—, —N(R′)—, —C(O)—, —C(S)—, —C(NR′)—, —C(O)N(R′)—, —N(R′)C(O)N(R′)—, —N(R′)C(O)O—, —S(O)—, —S(O)₂—, —S(O)₂N(R′)—, —C(O)S—, or —C(O)O—.

[1100] In some embodiments, an internucleotidic linkage is a phosphoryl guanidine internucleotidic linkage. In some embodiments, —X—R^{L} is —N═C[N(R′)₂]2. In some embodiments, each R′ is independently R. In some embodiments, R is optionally substituted C₁₋₆ aliphatic. In some embodiments, R is methyl. In some embodiments, —X—R^{L} is

[chemical structure]

In some embodiments, one R′ on a nitrogen atom is taken with a R′ on the other nitrogen to form a ring as described herein.

[1101] In some embodiments, —X—R^{L} is

[chemical structure]

wherein R¹ and R² are independently R′. In some embodiments, —X—R^{L} is

[chemical structure]

In some embodiments, —X—R^{L} is

[chemical structure]

In some embodiments, two R′ on the same nitrogen are taken together to form a ring as described herein. In some embodiments, —X—R^{L} is

[chemical structure]

In some embodiments, —X—R^{L} is

[chemical structure]

In some embodiments, —X—R^{L} is

[chemical structure]

In some embodiments, —X—R^{L} is

[chemical structure]

In some embodiments, —X—R^{L} is

[chemical structure]

In some embodiments, —X—R^{L} is

[chemical structure]

In some embodiments, —X—R^{L} is

[chemical structure]

In some embodiments, —X—R^{L} is

[chemical structure]

In some embodiments, —X—R^{L} is

[chemical structure]

[1102] In some embodiments, —X—R^{L} is R as described herein. In some embodiments, R is not hydrogen. In some embodiments, R is optionally substituted C₁₋₆ aliphatic. In some embodiments, R is optionally substituted C₁₋₆ alkyl. In some embodiments, R is methyl.

[1103] In some embodiments, —X—R^{L} is selected from Tables below. In some embodiments, X is as described herein. In some embodiments, R^{L} is as described herein. In some embodiments, a linkage has the structure of —Y—P^{L}(—X—R^{L})—Z—, wherein —X—R^{L} is selected from Tables below, and each other variable is independently as described herein. In some embodiments, a linkage has the structure of or comprises —P(O)(—X—R^{L})—, wherein —X—R^{L} is selected from Tables below. In some embodiments, a linkage has the structure of or comprises —P(S)(—X—R^{L})—, wherein —X—R^{L} is selected from Tables below. In some embodiments, a linkage has the structure of or comprises —P(—X—R^{L})—, wherein —X—R^{L} is selected from Tables below. In some embodiments, a linkage has the structure of or comprises —O—P(O)(—X—R^{L})—O—, wherein —X—R^{L} is selected from Tables below. In some embodiments, a linkage has the structure of or comprises —O—P(S)(—X—R^{L})—O—, wherein —X—R^{L} is selected from Tables below. In some embodiments, a linkage has the structure of or comprises —O—P(—X—R^{L})—O—, wherein —X—R^{L} is selected from Tables below. In some embodiments, a linkage has the structure of —O—P(O)(—X—R^{L})—O—, wherein —X—R^{L} is selected from Tables below. In some embodiments, a linkage has the structure of —O—P(S)(—X—R^{L})—O—, wherein —X—R^{L} is selected from Tables below. In some embodiments, a linkage has the structure of —O—P(—X—R^{L})—, wherein —X—R^{L} is selected from Tables below. In some embodiments, the Tables below, n is 0-20 or as described herein.

TABLE L-1
Certain useful moieties bonded to linkage phosphorus (e.g., —X—R^{L}).

[chemical structure]

[chemical structure]

[chemical structure]

[chemical structure]

[chemical structure]

[chemical structure]

[chemical structure]

[chemical structure]

[chemical structure]

[chemical structure]

[chemical structure]

[chemical structure]

[chemical structure]

[chemical structure]

[chemical structure]

[chemical structure]

[chemical structure]

[chemical structure]

[chemical structure]

[chemical structure]

[chemical structure]

[chemical structure]

[chemical structure]

[chemical structure]

[chemical structure]

[chemical structure]

[chemical structure]

[chemical structure]

[chemical structure]

[chemical structure]

[chemical structure]

[chemical structure]

[chemical structure]

[chemical structure]

[chemical structure]

[chemical structure]

[chemical structure]

[chemical structure]

[chemical structure]

[chemical structure]

[chemical structure]

[chemical structure]

[chemical structure]

[chemical structure]

[chemical structure]

[chemical structure]

[chemical structure]

[chemical structure]

[chemical structure]

[chemical structure]

[chemical structure]

[chemical structure]

[chemical structure]

[chemical structure]

[chemical structure]

[chemical structure]

[chemical structure]

[chemical structure]

wherein each R^{LS} is independently R^{S}. In some embodiments, each R^{LS} is independently
—Cl, —Br, —F, —N(Me)₂, or —NHCOCH₃.

TABLE L-2
Certain useful moieties bonded to linkage phosphorus
(e.g., —X—R^{L}).

[chemical structure]

[chemical structure]

[chemical structure]

[chemical structure]

[chemical structure]

[chemical structure]

[chemical structure]

[chemical structure]

[chemical structure]

[chemical structure]

[chemical structure]

[chemical structure]

[chemical structure]

[chemical structure]

[chemical structure]

[chemical structure]

TABLE L-3
Certain useful moieties bonded to linkage phosphorus
(e.g., —X—R^{L}).

[chemical structure]

[chemical structure]

[chemical structure]

TABLE L-4
Certain useful moieties bonded to linkage phosphorus
(e.g., —X—R^{L}).

[chemical structure]

[chemical structure]

[chemical structure]

[chemical structure]

[chemical structure]

[chemical structure]

[chemical structure]

[chemical structure]

[chemical structure]

[chemical structure]

[chemical structure]

[chemical structure]

[chemical structure]

[chemical structure]

[chemical structure]

[chemical structure]

[chemical structure]

[chemical structure]

[chemical structure]

[chemical structure]

[chemical structure]

[chemical structure]

[chemical structure]

[chemical structure]

[chemical structure]

[chemical structure]

[chemical structure]

[chemical structure]

[chemical structure]

[chemical structure]

[chemical structure]

[chemical structure]

[chemical structure]

[chemical structure]

[chemical structure]

[chemical structure]

[chemical structure]

[chemical structure]

[chemical structure]

[chemical structure]

[chemical structure]

TABLE L-5
Certain useful moieties bonded to linkage phosphorus (e.g., —X—R^{L}).

[chemical structure]

[chemical structure]

[chemical structure]

[chemical structure]

[chemical structure]

[chemical structure]

[chemical structure]

[chemical structure]

[chemical structure]

[chemical structure]

[chemical structure]

[chemical structure]

[chemical structure]

[chemical structure]

[chemical structure]

[chemical structure]

[chemical structure]

[chemical structure]

[chemical structure]

[chemical structure]

[chemical structure]

[chemical structure]

[chemical structure]

[chemical structure]

[chemical structure]

[chemical structure]

[chemical structure]

[chemical structure]

[chemical structure]

[chemical structure]

[chemical structure]

[chemical structure]

[chemical structure]

[chemical structure]

[chemical structure]

[chemical structure]

[chemical structure]

[chemical structure]

[chemical structure]

[chemical structure]

[chemical structure]

[chemical structure]

[chemical structure]

[chemical structure]

[chemical structure]

[chemical structure]

[chemical structure]

[chemical structure]

[chemical structure]

[chemical structure]

[chemical structure]

[chemical structure]

[chemical structure]

[chemical structure]

[chemical structure]

TABLE L-6
Certain useful moieties bonded to linkage phosphorus
(e.g., —X—R^{L}).

[chemical structure]

[chemical structure]

[chemical structure]

[chemical structure]

[chemical structure]

[chemical structure]

[chemical structure]

[chemical structure]

[chemical structure]

[chemical structure]

[chemical structure]

[chemical structure]

[chemical structure]

[chemical structure]

[chemical structure]

[1104] In some embodiments, an internucleotidic linkage, e.g., a non-negatively charged internucleotidic linkage or a neutral internucleotidic linkage, has the structure of -L^{L1}-Cy^{IL}-L^{L2}-. In some embodiments, L^{L1} is bonded to a 3′-carbon of a sugar. In some embodiments, L^{L2} is bonded to a 5′-carbon of a sugar. In some embodiments, L^{L1} is —O—CH₂—. In some embodiments, L^{L2} is a covalent bond. In some embodiments, L^{L2} is a —N(R′)—. In some embodiments, L^{L2} is a —NH—. In some embodiments, L^{L2} is bonded to a 5′-carbon of a sugar, which 5′-carbon is substituted with ═O. In some embodiments, Cy^{IL} is optionally substituted 3-10 membered saturated, partially unsaturated, or aromatic ring having 0-5 heteroatoms. In some embodiments, Cy^{IL} is an optionally substituted triazole ring. In some embodiments, Cy^{IL} is

[chemical structure]

In some embodiments, a linkage is

[chemical structure]

[1105] In some embodiments, a non-negatively charged internucleotidic linkage has the structure of —OP(═W)(—N(R′)₂)—O—.

[1106] In some embodiments, R′ is R. In some embodiments, R′ is H. In some embodiments, R′ is —C(O)R. In some embodiments, R′ is —C(O)OR. In some embodiments, R′ is —S(O)₂R.

[1107] In some embodiments, R″ is —NHR′. In some embodiments, —N(R′)₂ is —NHR′.

[1108] As described herein, some embodiments, R is H. In some embodiments, R is optionally substituted C₁₋₆ aliphatic. In some embodiments, R is optionally substituted C₁₋₆ alkyl. In some embodiments, R is methyl. In some embodiments, R is substituted methyl. In some embodiments, R is ethyl. In some embodiments, R is substituted ethyl.

[1109] In some embodiments, as described herein, a non-negatively charged internucleotidic linkage is a neutral internucleotidic linkage.

[1110] In some embodiments, a modified internucleotidic linkage (e.g., a non-negatively charged internucleotidic linkage) comprises optionally substituted triazolyl. In some embodiments, R′ is or comprises optionally substituted triazolyl. In some embodiments, a modified internucleotidic linkage (e.g., a non-negatively charged internucleotidic linkage) comprises optionally substituted alkynyl. In some embodiments, R′ is optionally substituted alkynyl. In some embodiments, R′ comprises an optionally substituted triple bond. In some embodiments, a modified internucleotidic linkage comprises a triazole or alkyne moiety. In some embodiments, R′ is or comprises an optionally substituted triazole or alkyne moiety. In some embodiments, a triazole moiety, e.g., a triazolyl group, is optionally substituted. In some embodiments, a triazole moiety, e.g., a triazolyl group) is substituted. In some embodiments, a triazole moiety is unsubstituted. In some embodiments, a modified internucleotidic linkage comprises an optionally substituted guanidine moiety. In some embodiments, a modified internucleotidic linkage comprises an optionally substituted cyclic guanidine moiety. In some embodiments, R′, R^{L}, or —X—R^{L}, is or comprises an optionally substituted guanidine moiety. In some embodiments, R′, R^{L}, or —X—R^{L}, is or comprises an optionally substituted cyclic guanidine moiety. In some embodiments, R′, R^{L}, or —X—R^{L} comprises an optionally substituted cyclic guanidine moiety and an internucleotidic linkage has the structure of:

[chemical structure]

wherein W is O or S. In some embodiments, W is O. In some embodiments, W is S. In some embodiments, a non-negatively charged internucleotidic linkage is stereochemically controlled.

[1111] In some embodiments, a non-negatively charged internucleotidic linkage or a neutral internucleotidic linkage is an internucleotidic linkage comprising a triazole moiety. In some embodiments, a non-negatively charged internucleotidic linkage or a non-negatively charged interucleotidic linkage comprises an optionally substituted triazolyl group. In some embodiments, an internucleotidic linkage comprising a triazole moiety (e.g., an optionally substituted triazolyl group) has the structure of

[chemical structure]

In some embodiments, an internucleotidic linkage comprising a triazole moiety has the structure of

[chemical structure]

In some embodiments, an internucleotidic linkage, e.g., a non-negatively charged internucleotidic linkage, a neutral internucleotidic linkage, comprises a cyclic guanidine moiety. In some embodiments, an interucleotidic linkage comprising a cyclic guanidine moiety has the structure of

[chemical structure]

In some embodiments, a non-negatively charged interucleotidic linkage, or a neutral internucleotidic linkage, is or comprising a structure selected from

[chemical structure]

wherein W is O or S.

[1112] In some embodiments, an internucleotidic linkage comprises a Tmg group

[chemical structure]

In some embodiments, an internucleotidic linkage comprises a Tmg group and has the structure of

[chemical structure]

(the “Tmg internucleotidic linkage”). In some embodiments, neutral internucleotidic linkages include internucleotidic linkages of PNA and PMO, and an Tmg internucleotidic linkage.

[1113] In some embodiments, a non-negatively charged internucleotidic linkage comprises an optionally substituted 3-20 membered heterocyclyl or heteroaryl group having 1-10 heteroatoms. In some embodiments, a non-negatively charged internucleotidic linkage comprises an optionally substituted 3-20 membered heterocyclyl or heteroaryl group having 1-10 heteroatoms, wherein at least one heteroatom is nitrogen. In some embodiments, such a heterocyclyl or heteroaryl group is of a 5-membered ring. In some embodiments, such a heterocyclyl or heteroaryl group is of a 6-membered ring.

[1114] In some embodiments, a non-negatively charged internucleotidic linkage comprises an optionally substituted 5-20 membered heteroaryl group having 1-10 heteroatoms. In some embodiments, a non-negatively charged internucleotidic linkage comprises an optionally substituted 5-20 membered heteroaryl group having 1-10 heteroatoms, wherein at least one heteroatom is nitrogen. In some embodiments, a non-negatively charged internucleotidic linkage comprises an optionally substituted 5-6 membered heteroaryl group having 1-4 heteroatoms, wherein at least one heteroatom is nitrogen. In some embodiments, a non-negatively charged internucleotidic linkage comprises an optionally substituted 5-membered heteroaryl group having 1-4 heteroatoms, wherein at least one heteroatom is nitrogen. In some embodiments, a heteroaryl group is directly bonded to a linkage phosphorus. In some embodiments, a non-negatively charged internucleotidic linkage comprises an optionally substituted 5-20 membered heterocyclyl group having 1-10 heteroatoms. In some embodiments, a non-negatively charged internucleotidic linkage comprises an optionally substituted 5-20 membered heterocyclyl group having 1-10 heteroatoms, wherein at least one heteroatom is nitrogen. In some embodiments, a non-negatively charged internucleotidic linkage comprises an optionally substituted 5-6 membered heterocyclyl group having 1-4 heteroatoms, wherein at least one heteroatom is nitrogen. In some embodiments, a non-negatively charged internucleotidic linkage comprises an optionally substituted 5-membered heterocyclyl group having 1-4 heteroatoms, wherein at least one heteroatom is nitrogen. In some embodiments, at least two heteroatoms are nitrogen. In some embodiments, a heterocyclyl group is directly bonded to a linkage phosphorus. In some embodiments, a heterocyclyl group is bonded to a linkage phosphorus through a linker, e.g., ═N— when the heterocyclyl group is part of a guanidine moiety who directed bonded to a linkage phosphorus through its ═N—. In some embodiments, a non-negatively charged internucleotidic linkage comprises an optionally substituted

[chemical structure]

group. In some embodiments, anon-negatively charged internucleotidic linkage comprises a substituted

[chemical structure]

group. In some embodiments, a non-negatively charged internucleotidic linkage comprises a

[chemical structure]

group. In some embodiments, each R¹ is independently optionally substituted C₁₋₆ alkyl. In some embodiments, each R¹ is independently methyl.

[1115] In some embodiments, a non-negatively charged internucleotidic linkage, e.g., a neutral internucleotidic linkage is not chirally controlled. In some embodiments, a non-negatively charged internucleotidic linkage is chirally controlled. In some embodiments, a non-negatively charged internucleotidic linkage is chirally controlled and its linkage phosphorus is Rp. In some embodiments, a non-negatively charged internucleotidic linkage is chirally controlled and its linkage phosphorus is Sp.

[1116] In some embodiments, an internucleotidic linkage comprises no linkage phosphorus. In some embodiments, an internucleotidic linkage has the structure of —C(O)—(O)— or —C(O)—N(R′)—, wherein R′ is as described herein. In some embodiments, an internucleotidic linkage has the structure of —C(O)—(O)—. In some embodiments, an internucleotidic linkage has the structure of —C(O)—N(R′)—, wherein R′ is as described herein. In various embodiments, —C(O)— is bonded to nitrogen. In some embodiments, an internucleotidic linkage is or comprises —C(O)—O— which is part of a carbamate moiety. In some embodiments, an internucleotidic linkage is or comprises —C(O)—O— which is part of a urea moiety.

[1117] In some embodiments, an oligonucleotide comprises 1-20, 1-15, 1-10, 1-5, or 1, 2, 3, 4, 5, 6, 7, 8, 9, 10, or more non-negatively charged internucleotidic linkages. In some embodiments, an oligonucleotide comprises 1-20, 1-15, 1-10, 1-5, or 1, 2, 3, 4, 5, 6, 7, 8, 9, 10, or more neutral internucleotidic linkages. In some embodiments, each of non-negatively charged internucleotidic linkage and/or neutral internucleotidic linkages is optionally and independently chirally controlled. In some embodiments, each non-negatively charged internucleotidic linkage in an oligonucleotide is independently a chirally controlled internucleotidic linkage. In some embodiments, each neutral internucleotidic linkage in an oligonucleotide is independently a chirally controlled internucleotidic linkage. In some embodiments, at least one non-negatively charged internucleotidic linkage/neutral internucleotidic linkage has the structure of

[chemical structure]

In some embodiments, an oligonucleotide comprises at least one non-negatively charged internucleotidic linkage wherein its linkage phosphorus is in Rp configuration, and at least one non-negatively charged internucleotidic linkage wherein its linkage phosphorus is in Sp configuration.

[1118] In many embodiments, as demonstrated extensively, oligonucleotides of the present disclosure comprise two or more different internucleotidic linkages. In some embodiments, an oligonucleotide comprises a phosphorothioate internucleotidic linkage and a non-negatively charged internucleotidic linkage. In some embodiments, an oligonucleotide comprises a phosphorothioate internucleotidic linkage, a non-negatively charged internucleotidic linkage, and a natural phosphate linkage. In some embodiments, a non-negatively charged internucleotidic linkage is a neutral internucleotidic linkage. In some embodiments, a non-negatively charged internucleotidic linkage is n001, n003, n004, n006, n008 or n009, n013, n020, n021, n025, n026, n029, n031, n033, n037, n046, n047, n048, n054, or n055). In some embodiments, a non-negatively charged internucleotidic linkage is n001. In some embodiments, each phosphorothioate internucleotidic linkage is independently chirally controlled. In some embodiments, each chiral modified internucleotidic linkage is independently chirally controlled. In some embodiments, one or more non-negatively charged internucleotidic linkage are not chirally controlled.

[1119] A typical connection, as in natural DNA and RNA, is that an internucleotidic linkage forms bonds with two sugars (which can be either unmodified or modified as described herein). In many embodiments, as exemplified herein an internucleotidic linkage forms bonds through its oxygen atoms or heteroatoms with one optionally modified ribose or deoxyribose at its 5′ carbon, and the other optionally modified ribose or deoxyribose at its 3′ carbon. In some embodiments, internucleotidic linkages connect sugars that are not ribose sugars, e.g., sugars comprising N ring atoms and acyclic sugars as described herein.

[1120] In some embodiments, each nucleoside units connected by an internucleotidic linkage independently comprises a nucleobase which is independently an optionally substituted A, T, C, G, or U, or an optionally substituted tautomer of A, T, C, G or U.

[1121] In some embodiments, an oligonucleotide comprises a modified internucleotidic linkage (e.g., a modified internucleotidic linkage having the structure of Formula I, I-a, I-b, or I-c, I-n-1, I-n-2, I-n-3, I-n-4, II, II-a-1, II-a-2, II-b-1, II-b-2, II-c-1, II-c-2, II-d-1, II-d-2, etc., or a salt form thereof) as described in U.S. Pat. Nos. 9,394,333, 9,744,183, 9,605,019, 9,598,458, 9,982,257, U.S. Ser. No. 10/160,969, U.S. Ser. No. 10/479,995, US 2020/0056173, US 2018/0216107, US 2019/0127733, U.S. Ser. No. 10/450,568, US 2019/0077817, US 2019/0249173, US 2019/0375774, WO 2018/223056, WO 2018/223073, WO 2018/223081, WO 2018/237194, WO 2019/032607, WO 2019/055951, WO 2019/075357, WO 2019/200185, WO 2019/217784, and/or WO 2019/032612 the internucleotidic linkages (e.g., those of Formula I, I-a, I-b, or I-c, I-n-1, I-n-2, I-n-3, I-n-4, II, II-a-1, II-a-2, II-b-1, II-b-2, II-c-1, II-c-2, II-d-1, II-d-2, etc.,) of each of which are independently incorporated herein by reference. In some embodiments, a modified internucleotidic linkage is a non-negatively charged internucleotidic linkage. In some embodiments, provided oligonucleotides comprise one or more non-negatively charged internucleotidic linkages. In some embodiments, a non-negatively charged internucleotidic linkage is a positively charged internucleotidic linkage. In some embodiments, a non-negatively charged internucleotidic linkage is a neutral internucleotidic linkage. In some embodiments, the present disclosure provides oligonucleotides comprising one or more neutral internucleotidic linkages. In some embodiments, a non-negatively charged internucleotidic linkage or a neutral internucleotidic linkage (e.g., one of Formula I-n-1, I-n-2, I-n-3, I-n-4, II, II-a-1, II-a-2, II-b-1, II-b-2, II-c-1, II-c-2, II-d-1, II-d-2, etc.) is as described in U.S. Pat. Nos. 9,394,333, 9,744,183, 9,605,019, 9,598,458, 9,982,257, U.S. Ser. No. 10/160,969, U.S. Ser. No. 10/479,995, US 2020/0056173, US 2018/0216107, US 2019/0127733, U.S. Ser. No. 10/450,568, US 2019/0077817, US 2019/0249173, US 2019/0375774, WO 2018/223056, WO 2018/223073, WO 2018/223081, WO 2018/237194, WO 2019/032607, WO 2019/055951, WO 2019/075357, WO 2019/200185, WO 2019/217784, and/or WO 2019/032612. In some embodiments, a non-negatively charged internucleotidic linkage or neutral internucleotidic linkage is one of Formula I-n-1, I-n-2, I-n-3, I-n-4, II, II-a-1, II-a-2, II-b-1, II-b-2, II-c-1, II-c-2, II-d-1, II-d-2, etc. as described in WO 2018/223056, WO 2019/032607, WO 2019/075357, WO 2019/032607, WO 2019/075357, WO 2019/200185, WO 2019/217784, and/or WO 2019/032612, such internucleotidic linkages of each of which are independently incorporated herein by reference.

[1122] As described herein, various variables can be R, e.g., R′, R^{L}, etc. Various embodiments for R are described in the present disclosure (e.g., when describing variables that can be R). Such embodiments are generally useful for all variables that can be R. In some embodiments, R is hydrogen. In some embodiments, R is optionally substituted C₁₋₃₀ (e.g., 1, 2, 3, 4, 5, 6, 7, 8, 9, 10, 11, 12, 13, 14, 15, 16, 17, 18, 19, 20, 21, 22, 23, 24, 25, 26, 27, 28, 29 or 30) aliphatic. In some embodiments, R is optionally substituted C₁₋₂₀ aliphatic. In some embodiments, R is optionally substituted C₁₋₁₀ aliphatic. In some embodiments, R is optionally substituted C₁₋₆ aliphatic. In some embodiments, R is optionally substituted alkyl. In some embodiments, R is optionally substituted C₁₋₆ alkyl. In some embodiments, R is optionally substituted methyl. In some embodiments, R is methyl. In some embodiments, R is optionally substituted ethyl. In some embodiments, R is optionally substituted propyl. In some embodiments, R is isopropyl. In some embodiments, R is optionally substituted butyl. In some embodiments, R is optionally substituted pentyl. In some embodiments, R is optionally substituted hexyl.

[1123] In some embodiments, R is optionally substituted 3-30 membered (e.g., 3, 4, 5, 6, 7, 8, 9, 10, 11, 12, 13, 14, 15, 16, 17, 18, 19, 20, 21, 22, 23, 24, 25, 26, 27, 28, 29 or 30) cycloaliphatic. In some embodiments, R is optionally substituted cycloalkyl. In some embodiments, cycloaliphatic is monocyclic, bicyclic, or polycyclic, wherein each monocyclic unit is independently saturated or partially saturated. In some embodiments, R is optionally substituted cyclopropyl. In some embodiments, R is optionally substituted cyclobutyl. In some embodiments, R is optionally substituted cyclopentyl. In some embodiments, R is optionally substituted cyclohexyl. In some embodiments, R is optionally substituted adamantyl.

[1124] In some embodiments, R is optionally substituted C₁₋₃₀ (e.g., 1, 2, 3, 4, 5, 6, 7, 8, 9, 10, 11, 12, 13, 14, 15, 16, 17, 18, 19, 20, 21, 22, 23, 24, 25, 26, 27, 28, 29 or 30) heteroaliphatic having 1-10 heteroatoms. In some embodiments, R is optionally substituted C₁₋₂₀ aliphatic having 1-10 heteroatoms. In some embodiments, R is optionally substituted C₁₋₁₀ aliphatic having 1-10 heteroatoms. In some embodiments, R is optionally substituted C₁₋₆ aliphatic having 1-3 heteroatoms. In some embodiments, R is optionally substituted heteroalkyl. In some embodiments, R is optionally substituted C₁₋₆ heteroalkyl. In some embodiments, R is optionally substituted 3-30 membered (e.g., 3, 4, 5, 6, 7, 8, 9, 10, 11, 12, 13, 14, 15, 16, 17, 18, 19, 20, 21, 22, 23, 24, 25, 26, 27, 28, 29 or 30) heterocycloaliphatic having 1-10 heteroatoms. In some embodiments, R is optionally substituted heterocycloalkyl. In some embodiments, heterocycloaliphatic is monocyclic, bicyclic, or polycyclic, wherein each monocyclic unit is independently saturated or partially saturated.

[1125] In some embodiments, R is optionally substituted C₆₋₃₀ aryl. In some embodiments, R is optionally substituted phenyl. In some embodiments, R is optionally substituted phenyl. In some embodiments, R is C₆₋₁₄ aryl. In some embodiments, R is optionally substituted bicyclic aryl. In some embodiments, R is optionally substituted polycyclic aryl. In some embodiments, R is optionally substituted C₆-30 arylaliphatic. In some embodiments, R is C₆₋₃₀ arylheteroaliphatic having 1-10 heteroatoms.

[1126] In some embodiments, R is optionally substituted 5-30 (5, 6, 7, 8, 9, 10, 11, 12, 13, 14, 15, 16, 17, 18, 19, 20, 21, 22, 23, 24, 25, 26, 27, 28, 29 or 30) membered heteroaryl having 1-10 heteroatoms. In some embodiments, R is optionally substituted 5-20 membered heteroaryl having 1-10 heteroatoms. In some embodiments, R is optionally substituted 5-10 membered heteroaryl having 1-10 heteroatoms. In some embodiments, R is optionally substituted 5-membered heteroaryl having 1-5 heteroatoms. In some embodiments, R is optionally substituted 5-membered heteroaryl having 1-4 heteroatoms. In some embodiments, R is optionally substituted 5-membered heteroaryl having 1-3 heteroatoms. In some embodiments, R is optionally substituted 5-membered heteroaryl having 1-2 heteroatoms. In some embodiments, R is optionally substituted 5-membered heteroaryl having one heteroatom. In some embodiments, R is optionally substituted 6-membered heteroaryl having 1-5 heteroatoms. In some embodiments, R is optionally substituted 6-membered heteroaryl having 1-4 heteroatoms. In some embodiments, R is optionally substituted 6-membered heteroaryl having 1-3 heteroatoms. In some embodiments, R is optionally substituted 6-membered heteroaryl having 1-2 heteroatoms. In some embodiments, R is optionally substituted 6-membered heteroaryl having one heteroatom. In some embodiments, R is optionally substituted monocyclic heteroaryl. In some embodiments, R is optionally substituted bicyclic heteroaryl. In some embodiments, R is optionally substituted polycyclic heteroaryl. In some embodiments, a heteroatom is nitrogen.

[1127] In some embodiments, R is optionally substituted 2-pyridinyl. In some embodiments, R is optionally substituted 3-pyridinyl. In some embodiments, R is optionally substituted 4-pyridinyl. In some embodiments, R is optionally substituted

[chemical structure]

[1128] In some embodiments, R is optionally substituted 3-30 (3, 4, 5, 6, 7, 8, 9, 10, 11, 12, 13, 14, 15, 16, 17, 18, 19, 20, 21, 22, 23, 24, 25, 26, 27, 28, 29 or 30) membered heterocyclyl having 1-10 heteroatoms. In some embodiments, R is optionally substituted 3-membered heterocyclyl having 1-2 heteroatoms. In some embodiments, R is optionally substituted 4-membered heterocyclyl having 1-2 heteroatoms. In some embodiments, R is optionally substituted 5-20 membered heterocyclyl having 1-10 heteroatoms. In some embodiments, R is optionally substituted 5-10 membered heterocyclyl having 1-10 heteroatoms. In some embodiments, R is optionally substituted 5-membered heterocyclyl having 1-5 heteroatoms. In some embodiments, R is optionally substituted 5-membered heterocyclyl having 1-4 heteroatoms. In some embodiments, R is optionally substituted 5-membered heterocyclyl having 1-3 heteroatoms. In some embodiments, R is optionally substituted 5-membered heterocyclyl having 1-2 heteroatoms. In some embodiments, R is optionally substituted 5-membered heterocyclyl having one heteroatom. In some embodiments, R is optionally substituted 6-membered heterocyclyl having 1-5 heteroatoms. In some embodiments, R is optionally substituted 6-membered heterocyclyl having 1-4 heteroatoms. In some embodiments, R is optionally substituted 6-membered heterocyclyl having 1-3 heteroatoms. In some embodiments, R is optionally substituted 6-membered heterocyclyl having 1-2 heteroatoms. In some embodiments, R is optionally substituted 6-membered heterocyclyl having one heteroatom. In some embodiments, R is optionally substituted monocyclic heterocyclyl. In some embodiments, R is optionally substituted bicyclic heterocyclyl. In some embodiments, R is optionally substituted polycyclic heterocyclyl. In some embodiments, R is optionally substituted saturated heterocyclyl. In some embodiments, R is optionally substituted partially unsaturated heterocyclyl. In some embodiments, a heteroatom is nitrogen. In some embodiments, R is optionally substituted

[chemical structure]

In some embodiments, R is optionally substituted

[chemical structure]

In some embodiments, R is optionally substituted

[chemical structure]

[1129] In some embodiments, two R groups are optionally and independently taken together to form a covalent bond. In some embodiments, two or more R groups on the same atom are optionally and independently taken together with the atom to form an optionally substituted, 3-30 membered, monocyclic, bicyclic or polycyclic ring having, in addition to the atom, 0-10 heteroatoms. In some embodiments, two or more R groups on two or more atoms are optionally and independently taken together with their intervening atoms to form an optionally substituted, 3-30 membered, monocyclic, bicyclic or polycyclic ring having, in addition to the intervening atoms, 0-10 heteroatoms.

[1130] Various variables may comprise an optionally substituted ring, or can be taken together with their intervening atom(s) to form a ring. In some embodiments, a ring is 3-30 (e.g., 3, 4, 5, 6, 7, 8, 9, 10, 11, 12, 13, 14, 15, 16, 17, 18, 19, 20, 21, 22, 23, 24, 25, 26, 27, 28, 29 or 30) membered. In some embodiments, a ring is 3-20 membered. In some embodiments, a ring is 3-15 membered. In some embodiments, a ring is 3-10 membered. In some embodiments, a ring is 3-8 membered. In some embodiments, a ring is 3-7 membered. In some embodiments, a ring is 3-6 membered. In some embodiments, a ring is 4-20 membered. In some embodiments, a ring is 5-20 membered. In some embodiments, a ring is monocyclic. In some embodiments, a ring is bicyclic. In some embodiments, a ring is polycyclic. In some embodiments, each monocyclic ring or each monocyclic ring unit in bicyclic or polycyclic rings is independently saturated, partially saturated or aromatic. In some embodiments, each monocyclic ring or each monocyclic ring unit in bicyclic or polycyclic rings is independently 3-10 membered and has 0-5 heteroatoms.

[1131] In some embodiments, each heteroatom is independently selected oxygen, nitrogen, sulfur, silicon, and phosphorus. In some embodiments, each heteroatom is independently selected oxygen, nitrogen, sulfur, and phosphorus. In some embodiments, each heteroatom is independently selected oxygen, nitrogen, and sulfur. In some embodiments, a heteroatom is in an oxidized form.

[1132] As appreciated by those skilled in the art, many other types of internucleotidic linkages may be utilized in accordance with the present disclosure, for example, those described in U.S. Pat. Nos. 3,687,808; 4,469,863; 4,476,301; 5,177,195; 5,023,243; 5,034,506; 5,166,315; 5,185,444; 5,188,897; 5,214,134; 5,216,141; 5,235,033; 5,264,423; 5,264,564; 5,276,019; 5,278,302; 5,286,717; 5,321,131; 5,399,676; 5,405,938; 5,405,939; 5,434,257; 5,453,496; 5,455,233; 5,466,677; 5,466,677; 5,470,967; 5,476,925; 5,489,677; 5,519,126; 5,536,821; 5,541,307; 5,541,316; 5,550,111; 5,561,225; 5,563,253; 5,571,799; 5,587,361; 5,596,086; 5,602,240; 5,608,046; 5,610,289; 5,618,704; 5,623,070; 5,625,050; 5,633,360; 5,64,562; 5,663,312; 5,677,437; 5,677,439; 6,160,109; 6,239,265; 6,028,188; 6,124,445; 6,169,170; 6,172,209; 6,277,603; 6,326,199; 6,346,614; 6,444,423; 6,531,590; 6,534,639; 6,608,035; 6,683,167; 6,858,715; 6,867,294; 6,878,805; 7,015,315; 7,041,816; 7,273,933; 7,321,029; or RE39464. In certain embodiments, a modified internucleotidic linkage is one described in U.S. Pat. No. 9,982,257, US 20170037399, US 20180216108, WO 2017192664, WO 2017015575, WO2017062862, WO 2018067973, WO 2017160741, WO 2017192679, WO 2017210647, WO 2018098264, PCT/US18/35687, PCT/US18/38835, or PCT/US18/51398, the nucleobases, sugars, internucleotidic linkages, chiral auxiliaries/reagents, and technologies for oligonucleotide synthesis (reagents, conditions, cycles, etc.) of each of which is independently incorporated herein by reference.

[1133] In certain embodiments, each internucleotidic linkage in a ds oligonucleotide is independently selected from a natural phosphate linkage, a phosphorothioate linkage, and anon-negatively charged internucleotidic linkage (e.g., n001). In certain embodiments, each internucleotidic linkage in a ds oligonucleotide is independently selected from a natural phosphate linkage, a phosphorothioate linkage, and a neutral internucleotidic linkage (e.g., n001).

[1134] In certain embodiments, a ds oligonucleotide comprises one or more nucleotides that independently comprise a phosphorus modification prone to “autorelease” under certain conditions. That is, under certain conditions, a particular phosphorus modification is designed such that it self-cleaves from the ds oligonucleotide to provide, e.g., a natural phosphate linkage. In certain embodiments, such a phosphorus modification has a structure of —O-L-R¹, wherein L is L^{B} as described herein, and R¹ is R′ as described herein. In certain embodiments, a phosphorus modification has a structure of —S-L-R¹, wherein each L and R¹ is independently as described in the present disclosure. Certain examples of such phosphorus modification groups can be found in U.S. Pat. No. 9,982,257. In certain embodiments, an autorelease group comprises a morpholino group. In certain embodiments, an autorelease group is characterized by the ability to deliver an agent to the internucleotidic phosphorus linker, which agent facilitates further modification of the phosphorus atom such as, e.g., desulfurization. In certain embodiments, the agent is water and the further modification is hydrolysis to form a natural phosphate linkage.

[1135] In certain embodiments, a ds oligonucleotide comprises one or more internucleotidic linkages that improve one or more pharmaceutical properties and/or activities of the oligonucleotide. It is well documented in the art that certain oligonucleotides are rapidly degraded by nucleases and exhibit poor cellular uptake through the cytoplasmic cell membrane (Poijarvi-Virta et al., Curr. Med. Chem. (2006), 13(28); 3441-65; Wagner et al., Med. Res. Rev. (2000), 20(6):417-51; Peyrottes et al., Mini Rev. Med. Chem. (2004), 4(4):395-408; Gosselin et al., (1996), 43(1):196-208; Bologna et al., (2002), Antisense & Nucleic Acid Drug Development 12:33-41). Vives et al. (Nucleic Acids Research (1999), 27(20):4071-76) reported that tert-butyl SATE pro-oligonucleotides displayed markedly increased cellular penetration compared to the parent oligonucleotide under certain conditions.

[1136] Ds oligonucleotides can comprise various number of natural phosphate linkages. In certain embodiments, 5% or more of the internucleotidic linkages of provided ds oligonucleotides are natural phosphate linkages. In certain embodiments, 10% or more of the internucleotidic linkages of provided ds oligonucleotides are natural phosphate linkages. In certain embodiments, 15% or more of the internucleotidic linkages of provided ds oligonucleotides are natural phosphate linkages. In certain embodiments, 20% or more of the internucleotidic linkages of provided ds oligonucleotides are natural phosphate linkages. In certain embodiments, 25% or more of the internucleotidic linkages of provided ds oligonucleotides are natural phosphate linkages. In certain embodiments, 30% or more of the internucleotidic linkages of provided ds oligonucleotides are natural phosphate linkages. In certain embodiments, 35% or more of the internucleotidic linkages of provided ds oligonucleotides are natural phosphate linkages. In certain embodiments, 40% or more of the internucleotidic linkages of provided ds oligonucleotides are natural phosphate linkages. In certain embodiments, provided ds oligonucleotides comprises 1, 2, 3, 4, 5, 6, 7, 8, 9, 10 or more natural phosphate linkages. In certain embodiments, provided ds oligonucleotides comprises 4, 5, 6, 7, 8, 9, 10 or more natural phosphate linkages. In certain embodiments, the number of natural phosphate linkages is 2. In certain embodiments, the number of natural phosphate linkages is 3. In certain embodiments, the number of natural phosphate linkages is 4. In certain embodiments, the number of natural phosphate linkages is 5. In certain embodiments, the number of natural phosphate linkages is 6. In certain embodiments, the number of natural phosphate linkages is 7. In certain embodiments, the number of natural phosphate linkages is 8. In certain embodiments, some or all of the natural phosphate linkages are consecutive.

[1137] In certain embodiments, the present disclosure demonstrates that, in at least some cases, Sp internucleotidic linkages, among other things, at the 5′- and/or 3′-end can improve ds oligonucleotide stability. In certain embodiments, the present disclosure demonstrates that, among other things, natural phosphate linkages and/or Rp internucleotidic linkages may improve removal of ds oligonucleotides from a system. As appreciated by a person having ordinary skill in the art, various assays known in the art can be utilized to assess such properties in accordance with the present disclosure.

[1138] In certain embodiments, each phosphorothioate internucleotidic linkage in a ds oligonucleotide or a portion thereof (e.g., a domain, a subdomain, etc.) is independently chirally controlled. In certain embodiments, each is independently Sp or Rp. In certain embodiments, a high level is Sp as described herein. In certain embodiments, each phosphorothioate internucleotidic linkage in a ds oligonucleotide or a portion thereof is chirally controlled and is Sp. In certain embodiments, one or more, e.g., about 1-5 (e.g., about 1, 2, 3, 4, or 5) is Rp.

[1139] In certain embodiments, as illustrated in certain examples, a ds oligonucleotide or a portion thereof comprises one or more non-negatively charged internucleotidic linkages, each of which is optionally and independently chirally controlled. In certain embodiments, each non-negatively charged internucleotidic linkage is independently n001. In certain embodiments, a chiral non-negatively charged internucleotidic linkage is not chirally controlled. In certain embodiments, each chiral non-negatively charged internucleotidic linkage is not chirally controlled. In certain embodiments, a chiral non-negatively charged internucleotidic linkage is chirally controlled. In certain embodiments, a chiral non-negatively charged internucleotidic linkage is chirally controlled and is Rp. In certain embodiments, a chiral non-negatively charged internucleotidic linkage is chirally controlled and is Sp. In certain embodiments, each chiral non-negatively charged internucleotidic linkage is chirally controlled. In certain embodiments, the number of non-negatively charged internucleotidic linkages in a ds oligonucleotide or a portion thereof is about 1-10, or about 1, 2, 3, 4, 5, 6, 7, 8, 9, or 10. In certain embodiments, it is about 1. In certain embodiments, it is about 2. In certain embodiments, it is about 3. In certain embodiments, it is about 4. In certain embodiments, it is about 5. In certain embodiments, it is about 6. In certain embodiments, it is about 7. In certain embodiments, it is about 8. In certain embodiments, it is about 9. In certain embodiments, it is about 10. In certain embodiments, two or more non-negatively charged internucleotidic linkages are consecutive. In certain embodiments, no two non-negatively charged internucleotidic linkages are consecutive. In certain embodiments, all non-negatively charged internucleotidic linkages in a ds oligonucleotide or a portion thereof are consecutive (e.g., 3 consecutive non-negatively charged internucleotidic linkages). In certain embodiments, a non-negatively charged internucleotidic linkage, or two or more (e.g., about 2, about 3, about 4 etc.) consecutive non-negatively charged internucleotidic linkages, are at the 3′-end of a ds oligonucleotide or a portion thereof. In certain embodiments, the last two or three or four internucleotidic linkages of a ds oligonucleotide or a portion thereof comprise at least one internucleotidic linkage that is not a non-negatively charged internucleotidic linkage. In certain embodiments, the last two or three or four internucleotidic linkages of a ds oligonucleotide or a portion thereof comprise at least one internucleotidic linkage that is not n001. In certain embodiments, the internucleotidic linkage linking the first two nucleosides of a ds oligonucleotide or a portion thereof is a non-negatively charged internucleotidic linkage. In certain embodiments, the internucleotidic linkage linking the last two nucleosides of a ds oligonucleotide or a portion thereof is a non-negatively charged internucleotidic linkage. In certain embodiments, the internucleotidic linkage linking the first two nucleosides of a ds oligonucleotide or a portion thereof is a phosphorothioate internucleotidic linkage. In certain embodiments, it is Sp. In certain embodiments, the internucleotidic linkage linking the last two nucleosides of a ds oligonucleotide or a portion thereof is a phosphorothioate internucleotidic linkage. In certain embodiments, it is Sp.

[1140] In certain embodiments, one or more chiral internucleotidic linkages are chirally controlled and one or more chiral internucleotidic linkages are not chirally controlled. In certain embodiments, each phosphorothioate internucleotidic linkage is independently chirally controlled, and one or more non-negatively charged internucleotidic linkage are not chirally controlled. In certain embodiments, each phosphorothioate internucleotidic linkage is independently chirally controlled, and each non-negatively charged internucleotidic linkage is not chirally controlled. In certain embodiments, the internucleotidic linkage between the first two nucleosides of a ds oligonucleotide is a non-negatively charged internucleotidic linkage. In certain embodiments, the internucleotidic linkage between the last two nucleosides are each independently a non-negatively charged internucleotidic linkage. In certain embodiments, both are independently non-negatively charged internucleotidic linkages. In certain embodiments, each non-negatively charged internucleotidic linkage is independently neutral internucleotidic linkage. In certain embodiments, each non-negatively charged internucleotidic linkage is independently n001.

[1141] In certain embodiments, a controlled level of ds oligonucleotides in a composition are desired ds oligonucleotides. In certain embodiments, of all ds oligonucleotides in a composition that share a common base sequence (e.g., a desired sequence for a purpose), or of all ds oligonucleotides in a composition, level of desired ds oligonucleotides (which may exist in various forms (e.g., salt forms) and typically differ only at non-chirally controlled internucleotidic linkages (various forms of the same stereoisomer can be considered the same for this purpose)) is about 5%-100%, 10%-100%, 20%-100%, 30%-100%, 40%-100%, 50%-100%, 60%-100%, 70%-100%, 80-100%, 90-100%, 95-100%, 50%-90%, about 5%, 10%, 15%, 20%, 25%, 30%, 35%, 40%, 45%, 50%, 55%, 60%, 65%, 70%, 75%, 80%, 85%, 90%, 95%, or 100%, or at least 5%, 10%, 15%, 20%, 25%, 30%, 35%, 40%, 45%, 50%, 55%, 60%, 65%, 70%, 75%, 80%, 85%, 90%, 95%, or 99%. In certain embodiments, a level is at least about 50%. In certain embodiments, a level is at least about 60%. In certain embodiments, a level is at least about 70%. In certain embodiments, a level is at least about 75%. In certain embodiments, a level is at least about 80%. In certain embodiments, a level is at least about 85%. In certain embodiments, a level is at least about 90%. In certain embodiments, a level is or is at least (DS)^{nc}, wherein DS is about 90%, 91%, 92%, 93%, 94%, 95%, 96%, 97%, 98%, 99% or 99.5% and nc is the number of chirally controlled internucleotidic linkages as described in the present disclosure (e.g., 1-50, 1-40, 1-30, 1-25, 1-20, 5-50, 5-40, 5-30, 5-25, 5-20, 1, 2, 3, 4, 5, 6, 7, 8, 9, 10, 11, 12, 13, 14, 15, 16, 17, 18, 19, 20, 21, 22, 23, 24, 25 or more). In certain embodiments, a level is or is at least (DS)^{nc}, wherein DS is 95%-100%.

[1142] Various types of internucleotidic linkages may be utilized in combination of other structural elements, e.g., sugars, to achieve desired ds oligonucleotide properties and/or activities. For example, the present disclosure routinely utilizes modified internucleotidic linkages and modified sugars, optionally with natural phosphate linkages and natural sugars, in designing ds oligonucleotides. In certain embodiments, the present disclosure provides a ds oligonucleotide comprising one or more modified sugars. In certain embodiments, the present disclosure provides a ds oligonucleotide comprising one or more modified sugars and one or more modified internucleotidic linkages, one or more of which are natural phosphate linkages.

### 2.3. Double Stranded Oligonucleotide Compositions

[1143] Among other things, the present disclosure provides various ds oligonucleotide compositions. In certain embodiments, the present disclosure provides ds oligonucleotide compositions of ds oligonucleotides described herein. In certain embodiments, a ds oligonucleotide composition, e.g., a dsRNAi oligonucleotide composition, comprises a plurality of a ds oligonucleotide described in the present disclosure. In certain embodiments, a ds oligonucleotide composition, e.g., a dsRNAi oligonucleotide composition, is chirally controlled. In certain embodiments, a ds oligonucleotide composition, e.g., a dsRNAi oligonucleotide composition, is not chirally controlled (stereorandom).

[1144] Linkage phosphorus of natural phosphate linkages is achiral. Linkage phosphorus of many modified internucleotidic linkages, e.g., phosphorothioate internucleotidic linkages, are chiral. In certain embodiments, during preparation of ds oligonucleotide compositions (e.g., in traditional phosphoramidite ds oligonucleotide synthesis), configurations of chiral linkage phosphorus are not purposefully designed or controlled, creating non-chirally controlled (stereorandom) ds oligonucleotide compositions (substantially racemic preparations) which are complex, random mixtures of various stereoisomers (diastereoisomers)—for ds oligonucleotides with n chiral internucleotidic linkages (linkage phosphorus being chiral), typically 2ⁿ stereoisomers (e.g., when n is 10, 2¹⁰=1,032; when n is 20, 2²⁰=1,048,576). These stereoisomers have the same constitution, but differ with respect to the pattern of stereochemistry of their linkage phosphorus.

[1145] In certain embodiments, stereorandom ds oligonucleotide compositions have sufficient properties and/or activities for certain purposes and/or applications. In certain embodiments, stereorandom ds oligonucleotide compositions can be cheaper, easier and/or simpler to produce than chirally controlled ds oligonucleotide compositions. However, stereoisomers within stereorandom compositions may have different properties, activities, and/or toxicities, resulting in inconsistent therapeutic effects and/or unintended side effects by stereorandom compositions, particularly compared to certain chirally controlled ds oligonucleotide compositions of ds oligonucleotides of the same constitution.

### 2.3.1. Chirally Controlled Double Stranded Oligonucleotide Compositions

[1146] In certain embodiments, the present disclosure encompasses technologies for designing and preparing chirally controlled ds oligonucleotide compositions. In certain embodiments, a chirally controlled ds oligonucleotide composition comprises a controlled/pre-determined (not random as in stereorandom compositions) level of a plurality of ds oligonucleotides, wherein the ds oligonucleotides share the same linkage phosphorus stereochemistry at one or more chiral internucleotidic linkages (chirally controlled internucleotidic linkages). In certain embodiments, ds oligonucleotides of a plurality share the same pattern of backbone chiral centers (stereochemistry of linkage phosphorus). In certain embodiments, a pattern of backbone chiral centers is as described in the present disclosure. In certain embodiments, ds oligonucleotides of a plurality share a common constitution. In certain embodiments, they are structurally identical.

[1147] For example, in certain embodiments, the present disclosure provides a ds oligonucleotide composition comprising a plurality of ds oligonucleotides, wherein ds oligonucleotides of the plurality share:
[1148] 1) a common base sequence, and
[1149] 2) the same linkage phosphorus stereochemistry independently at one or more (e.g., about 1-50, 1-40, 1-30, 1-25, 1-20, 1-15, 1-10, 5-50, 5-40, 5-30, 5-25, 5-20, 5-15, 5-10, 1, 2, 3, 4, 5, 6, 7, 8, 9, 10, 11, 12, 13, 14, 15, 16, 17, 18, 19, 20, 21, 22, 23, 24, or 25 or more) chiral internucleotidic linkages (“chirally controlled internucleotidic linkages”); wherein level of ds oligonucleotides of the plurality in the composition is non-random (e.g., controlled/pre-determined as described herein).

[1150] In certain embodiments, the present disclosure provides a ds oligonucleotide composition comprising a plurality of ds oligonucleotides, wherein ds oligonucleotides of the plurality share:
[1151] 1) a common base sequence, and
[1152] 2) the same linkage phosphorus stereochemistry independently at one or more (e.g., about 1-50, 1-40, 1-30, 1-25, 1-20, 1-15, 1-10, 5-50, 5-40, 5-30, 5-25, 5-20, 5-15, 5-10, 1, 2, 3, 4, 5, 6, 7, 8, 9, 10, 11, 12, 13, 14, 15, 16, 17, 18, 19, 20, 21, 22, 23, 24, or 25 or more) chiral internucleotidic linkages (“chirally controlled internucleotidic linkages”); wherein the composition is enriched relative to a substantially racemic preparation of ds oligonucleotides sharing the common base sequence for oligonucleotides of the plurality.

[1153] In certain embodiments, the present disclosure provides a ds oligonucleotide composition comprising a plurality of ds oligonucleotides, wherein ds oligonucleotides of the plurality share:
[1154] 1) a common base sequence, and
[1155] 2) the same linkage phosphorus stereochemistry independently at one or more (e.g., about 1-50, 1-40, 1-30, 1-25, 1-20, 1-15, 1-10, 5-50, 5-40, 5-30, 5-25, 5-20, 5-15, 5-10, 1, 2, 3, 4, 5, 6, 7, 8, 9, 10, 11, 12, 13, 14, 15, 16, 17, 18, 19, 20, 21, 22, 23, 24, or 25 or more) chiral internucleotidic linkages (“chirally controlled internucleotidic linkages”); wherein about 1%-100%, (e.g., about 5%-100%, 10%-100%, 20%-100%, 30%-100%, 40%-100%, 50%-100%, 60%-100%, 70%-100%, 80-100%, 90-100%, 95-100%, 50%-90%, or about 5%, 10%, 20%, 30%, 40%, 50%, 60%, 70%, 80%, 85%, 90%, 91%, 92%, 93%, 94%, 95%, 96%, 97%, 98%, 99%, or 100%, or at least 5%, 10%, 20%, 30%, 40%, 50%, 60%, 70%, 80%, 85%, 90%, 91%, 92%, 93%, 94%, 95%, 96%, 97%, 98%, or 99%) of all ds oligonucleotides in the composition that share the common base sequence are ds oligonucleotides of the plurality.

[1156] In certain embodiments, the percentage/level of the ds oligonucleotides of a plurality is or is at least (DS)^{nc}, wherein DS is 90%-100%, and nc is the number of chirally controlled internucleotidic linkages. In certain embodiments, nc is 5, 6, 7, 8, 9, 10 or more. In certain embodiments, a percentage/level is at least 10%.

[1157] In certain embodiments, a percentage/level is at least 20%. In certain embodiments, a percentage/level is at least 30%. In certain embodiments, a percentage/level is at least 40%. In certain embodiments, a percentage/level is at least 50%. In certain embodiments, a percentage/level is at least 60%. In certain embodiments, a percentage/level is at least 65%. In certain embodiments, a percentage/level is at least 70%. In certain embodiments, a percentage/level is at least 75%. In certain embodiments, a percentage/level is at least 80%. In certain embodiments, a percentage/level is at least 85%. In certain embodiments, a percentage/level is at least 90%. In certain embodiments, a percentage/level is at least 95%.

[1158] In certain embodiments, ds oligonucleotides of a plurality share a common pattern of backbone linkages. In certain embodiments, each ds oligonucleotide of a plurality independently has an internucleotidic linkage of a particular constitution (e.g., —O—P(O)(SH)—O—) or a salt form thereof (e.g., —O—P(O)(SNa)—O—) independently at each internucleotidic linkage site. In certain embodiments, internucleotidic linkages at each internucleotidic linkage site are of the same form. In certain embodiments, internucleotidic linkages at each internucleotidic linkage site are of different forms.

[1159] In certain embodiments, ds oligonucleotides of a plurality share a common constitution. In certain embodiments, ds oligonucleotides of a plurality are of the same form of a common constitution. In certain embodiments, ds oligonucleotides of a plurality are of two or more forms of a common constitution. In certain embodiments, ds oligonucleotides of a plurality are each independently of a particular oligonucleotide or a pharmaceutically acceptable salt thereof, or of a ds oligonucleotide having the same constitution as the particular ds oligonucleotide or a pharmaceutically acceptable salt thereof. In certain embodiments, about 1%-100%, (e.g., about 5%-100%, 10%-100%, 20%-100%, 30%-100%, 40%-100%, 50%-100%, 60%-100%, 70%-100%, 80-100%, 90-100%, 95-100%, 50%-90%, or about 5%, 10%, 20%, 30%, 40%, 50%, 60%, 70%, 80%, 85%, 90%, 91%, 92%, 93%, 94%, 95%, 96%, 97%, 98%, 99%, or 100%, or at least 5%, 10%, 20%, 30%, 40%, 50%, 60%, 70%, 80%, 85%, 90%, 91%, 92%, 93%, 94%, 95%, 96%, 97%, 98%, or 99%) of all ds oligonucleotides in the composition that share a common constitution are ds oligonucleotides of the plurality. In certain embodiments, a percentage of a level is or is at least (DS)^{nc}, wherein DS is 90%-100%, and nc is the number of chirally controlled internucleotidic linkages. In certain embodiments, nc is 5, 6, 7, 8, 9, 10 or more. In certain embodiments, a level is at least 10%. In certain embodiments, a level is at least 20%. In certain embodiments, a level is at least 30%. In certain embodiments, a level is at least 40%. In certain embodiments, a level is at least 50%. In certain embodiments, a level is at least 60%. In certain embodiments, a level is at least 65%. In certain embodiments, a level is at least 70%. In certain embodiments, a level is at least 75%. In certain embodiments, a level is at least 80%. In certain embodiments, a level is at least 85%. In certain embodiments, a level is at least 90%. In certain embodiments, a level is at least 95%.

[1160] In certain embodiments, each phosphorothioate internucleotidic linkage is independently a chirally controlled internucleotidic linkage.

[1161] In certain embodiments, the present disclosure provides a chirally controlled ds oligonucleotide composition comprising a plurality of ds oligonucleotides of a particular ds oligonucleotide type characterized by:
[1162] a) a common base sequence;
[1163] b) a common pattern of backbone linkages;
[1164] c) a common pattern of backbone chiral centers; wherein the composition is enriched, relative to a substantially racemic preparation of ds oligonucleotides having the same common base sequence, for ds oligonucleotides of the particular oligonucleotide type.

[1165] In certain embodiments, the present disclosure provides a chirally controlled ds oligonucleotide composition comprising a plurality of ds oligonucleotides of a particular ds oligonucleotide type characterized by:
[1166] a) a common base sequence;
[1167] b) a common pattern of backbone linkages;
[1168] c) a common pattern of backbone chiral centers; wherein ds oligonucleotides of the plurality comprise at least one internucleotidic linkage comprising a common linkage phosphorus in the Sp configuration; wherein the composition is enriched, relative to a substantially racemic preparation of d oligonucleotides having the same common base sequence, for ds oligonucleotides of the particular ds oligonucleotide type.

[1169] Common patterns of backbone chiral centers, as appreciated by those skilled in the art, comprise at least one Rp or at least one Sp. Certain patterns of backbone chiral centers are illustrated in, e.g., Table 1.

[1170] In certain embodiments, a chirally controlled ds oligonucleotide composition is enriched, relative to a substantially racemic preparation of ds oligonucleotides share the same common base sequence and a common pattern of backbone linkages, for ds oligonucleotides of the particular ds oligonucleotide type.

[1171] In certain embodiments, ds oligonucleotides of a plurality, e.g., a particular ds oligonucleotide type, have a common pattern of backbone phosphorus modifications and a common pattern of nucleoside modifications. In certain embodiments, ds oligonucleotides of a plurality have a common pattern of sugar modifications. In certain embodiments, ds oligonucleotides of a plurality have a common pattern of base modifications. In certain embodiments, ds oligonucleotides of a plurality have a common pattern of nucleoside modifications. In certain embodiments, ds oligonucleotides of a plurality have the same constitution. In certain embodiments, ds oligonucleotides of a plurality are identical. In certain embodiments, ds oligonucleotides of a plurality are of the same ds oligonucleotide (as those skilled in the art will appreciate, such ds oligonucleotides may each independently exist in one of the various forms of the ds oligonucleotide, and may be the same, or different forms of the ds oligonucleotide). In certain embodiments, ds oligonucleotides of a plurality are each independently of the same ds oligonucleotide or a pharmaceutically acceptable salt thereof.

[1172] In certain embodiments, the present disclosure provides chirally controlled ds oligonucleotide compositions, e.g., of many oligonucleotides in Table 1, whose “stereochemistry/linkage” contain S and/or R. In certain embodiments, ds oligonucleotides of a plurality are each independently a particular ds oligonucleotide in Table 1 whose “stereochemistry/linkage” contains S and/or R, optionally in various forms. In certain embodiments, ds oligonucleotides of a plurality are each independently a particular ds oligonucleotide in Table 1, whose “stereochemistry/linkage” contains S and/or R, or a pharmaceutically acceptable salt thereof.

[1173] In certain embodiments, level of a plurality of ds oligonucleotides in a composition can be determined as the product of the diastereopurity of each chirally controlled internucleotidic linkage in the ds oligonucleotides. In certain embodiments, diastereopurity of an internucleotidic linkage connecting two nucleosides in a ds oligonucleotide (or nucleic acid) is represented by the diastereopurity of an internucleotidic linkage of a dimer connecting the same two nucleosides, wherein the dimer is prepared using comparable conditions, in some instances, identical synthetic cycle conditions.

[1174] In certain embodiments, all chiral internucleotidic linkages are independently chiral controlled, and the composition is a completely chirally controlled ds oligonucleotide composition. In certain embodiments, not all chiral internucleotidic linkages are chiral controlled internucleotidic linkages, and the composition is a partially chirally controlled ds oligonucleotide composition.

[1175] Ds oligonucleotides may comprise or consist of various patterns of backbone chiral centers (patterns of stereochemistry of chiral linkage phosphorus). Certain useful patterns of backbone chiral centers are described in the present disclosure. In certain embodiments, a plurality of ds oligonucleotides share a common pattern of backbone chiral centers, which is or comprises a pattern described in the present disclosure (e.g., as in “Stereochemistry and Patterns of Backbone Chiral Centers”, a pattern of backbone chiral centers of a chirally controlled ds oligonucleotide in Table 1, etc.).

[1176] In certain embodiments, a chirally controlled ds oligonucleotide composition is chirally pure (or stereopure, stereochemically pure) ds oligonucleotide composition, wherein the ds oligonucleotide composition comprises a plurality of ds oligonucleotides, wherein the ds oligonucleotides are independently of the same stereoisomer (including that each chiral element of the ds oligonucleotides, including each chiral linkage phosphorus, is independently defined (stereodefined)). A chirally pure (or stereopure, stereochemically pure) ds oligonucleotide composition of a ds oligonucleotide stereoisomer does not contain other stereoisomers (as appreciated by those skilled in the art, one or more unintended stereoisomers may exist as impurities from, e.g., preparation, storage, etc.).

### 2.3.2 Stereochemistry and Patterns of Backbone Chiral Centers

[1177] In contrast to natural phosphate linkages, linkage phosphorus of chiral modified internucleotidic linkages, e.g., phosphoryl guanidine or phosphorothioate internucleotidic linkages, are chiral. Among other things, the present disclosure provides technologies (e.g., oligonucleotides, compositions, methods, etc.) comprising control of stereochemistry of chiral linkage phosphorus in chiral internucleotidic linkages. In certain embodiments, as demonstrated herein, control of stereochemistry can provide improved properties and/or activities, including desired stability, reduced toxicity, improved reduction of target nucleic acids, etc. In certain embodiments, the present disclosure provides useful patterns of backbone chiral centers for oligonucleotides and/or regions thereof, which pattern is a combination of stereochemistry of each chiral linkage phosphorus (Rp or Sp) of chiral linkage phosphorus, indication of each achiral linkage phosphorus (Op, if any), etc. from 5′ to 3′. In certain embodiments, patterns of backbone chiral centers can control cleavage patterns of target nucleic acids when they are contacted with provided ds oligonucleotides or compositions thereof in a cleavage system (e.g., in vitro assay, cells, tissues, organs, organisms, subjects, etc.). In certain embodiments, patterns of backbone chiral centers improve cleavage efficiency and/or selectivity of target nucleic acids when they are contacted with provided ds oligonucleotides or compositions thereof in a cleavage system.

[1178] In certain embodiments, a pattern of backbone chiral centers of a ds oligonucleotide or a region thereof comprises or is any (Np)n(Op)m, wherein Np is Rp or Sp, Op represents a linkage phosphorus being achiral (e.g., as for the linkage phosphorus of natural phosphate linkages), and each of n and m is independently as defined and described in the present disclosure. In certain embodiments, a pattern of backbone chiral centers of a ds oligonucleotide or a region thereof comprises or is (Sp)n(Op)m, wherein each variable is independently as defined and described in the present disclosure. In certain embodiments, a pattern of backbone chiral centers of a ds oligonucleotide or a region thereof comprises or is (Rp)n(Op)m, wherein each variable is independently as defined and described in the present disclosure. In certain embodiments, n is 1. In certain embodiments, a pattern of backbone chiral centers of a ds oligonucleotide or a region thereof comprises or is (Sp)(Op)m, wherein m is 1, 2, 3, 4, 5, 6, 7, 8, 9, or 10. In certain embodiments, a pattern of backbone chiral centers of an oligonucleotide or a region thereof comprises or is (Rp)(Op)m, wherein m is 1, 2, 3, 4, 5, 6, 7, 8, 9, or 10. In certain embodiments, the pattern of backbone chiral centers of a 5′-wing is or comprises (Np)n(Op)m. In certain embodiments, the pattern of backbone chiral centers of a 5′-wing is or comprises (Sp)n(Op)m. In certain embodiments, the pattern of backbone chiral centers of a 5′-wing is or comprises (Rp)n(Op)m. In certain embodiments, the pattern of backbone chiral centers of a 5′-wing is or comprises (Sp)(Op)m. In certain embodiments, the pattern of backbone chiral centers of a 5′-wing is or comprises (Rp)(Op)m. In certain embodiments, the pattern of backbone chiral centers of a 5′-wing is (Sp)(Op)m. In certain embodiments, the pattern of backbone chiral centers of a 5′-wing is (Rp)(Op)m. In certain embodiments, the pattern of backbone chiral centers of a 5′-wing is (Sp)(Op)m, wherein Sp is the linkage phosphorus configuration of the first internucleotidic linkage of the oligonucleotide from the 5′-end. In certain embodiments, the pattern of backbone chiral centers of a 5′-wing is (Rp)(Op)m, wherein Rp is the linkage phosphorus configuration of the first internucleotidic linkage of the oligonucleotide from the 5′-end. In certain embodiments, as described in the present disclosure, m is 2; in certain embodiments, m is 3; in certain embodiments, m is 4; in certain embodiments, m is 5; in certain embodiments, m is 6.

[1179] In certain embodiments, a pattern of backbone chiral centers of a ds oligonucleotide or a region thereof comprises or is (Op)m(Np)n, wherein Np is Rp or Sp, Op represents a linkage phosphorus being achiral (e.g., as for the linkage phosphorus of natural phosphate linkages), and each of n and m is independently as defined and described in the present disclosure. In certain embodiments, a pattern of backbone chiral centers of an oligonucleotide or a region thereof comprises or is (Op)m(Sp)n, wherein each variable is independently as defined and described in the present disclosure. In certain embodiments, a pattern of backbone chiral centers of a ds oligonucleotide or a region thereof comprises or is (Op)m(Rp)n, wherein each variable is independently as defined and described in the present disclosure. In certain embodiments, n is 1. In certain embodiments, a pattern of backbone chiral centers of a ds oligonucleotide or a region thereof comprises or is (Op)m(Sp), wherein m is 1, 2, 3, 4, 5, 6, 7, 8, 9, or 10. In certain embodiments, a pattern of backbone chiral centers of an oligonucleotide or a region thereof comprises or is (Op)m(Rp), wherein m is 1, 2, 3, 4, 5, 6, 7, 8, 9, or 10. In certain embodiments, the pattern of backbone chiral centers of a 3′-wing is or comprises (Op)m(Np)n. In certain embodiments, the pattern of backbone chiral centers of a 3′-wing is or comprises (Op)m(Sp)n. In certain embodiments, the pattern of backbone chiral centers of a 3′-wing is or comprises (Op)m(Rp)n. In certain embodiments, the pattern of backbone chiral centers of a 3′-wing is or comprises (Op)m(Sp). In certain embodiments, the pattern of backbone chiral centers of a 3′-wing is or comprises (Op)m(Rp). In certain embodiments, the pattern of backbone chiral centers of a 3′-wing is (Op)m(Sp). In certain embodiments, the pattern of backbone chiral centers of a 3′-wing is (Op)m(Rp). In certain embodiments, the pattern of backbone chiral centers of a 3′-wing is (Op)m(Sp), wherein Sp is the linkage phosphorus configuration of the last internucleotidic linkage of the ds oligonucleotide from the 5′-end. In certain embodiments, the pattern of backbone chiral centers of a 3′-wing is (Op)m(Rp), wherein Rp is the linkage phosphorus configuration of the last internucleotidic linkage of the oligonucleotide from the 5′-end. In certain embodiments, as described in the present disclosure, m is 2; in certain embodiments, m is 3; in certain embodiments, m is 4; in certain embodiments, m is 5; in certain embodiments, m is 6.

[1180] In certain embodiments, a pattern of backbone chiral centers of a ds oligonucleotide or a region thereof (e.g., a core) comprises or is (Sp)m(Rp/Op)n or (Rp/Op)n(Sp)m, wherein each variable is independently as described in the present disclosure. In certain embodiments, a pattern of backbone chiral centers of a ds oligonucleotide or a region thereof (e.g., a core) comprises or is (Sp)m(Rp)n or (Rp)n(Sp)m, wherein each variable is independently as described in the present disclosure. In certain embodiments, a pattern of backbone chiral centers of a ds oligonucleotide or a region thereof (e.g., a core) comprises or is (Sp)m(Op)n or (Op)n(Sp)m, wherein each variable is independently as described in the present disclosure. In certain embodiments, a pattern of backbone chiral centers of a ds oligonucleotide or a region thereof (e.g., a core) comprises or is (Np)t[(Rp/Op)n(Sp)m]y or [(Rp/Op)n(Sp)m]y(Np)t, wherein y is 1-50, and each other variable is independently as described in the present disclosure. In certain embodiments, a pattern of backbone chiral centers of a ds oligonucleotide or a region thereof (e.g., a core) comprises or is (Np)t[(Rp)n(Sp)m]y or [(Rp)n(Sp)m]y(Np)t, wherein each variable is independently as described in the present disclosure. In certain embodiments, a pattern of backbone chiral centers of a ds n oligonucleotide or a region thereof (e.g., a core) comprises or is [(Rp/Op)n(Sp)m]y(Rp)k, [(Rp/Op)n(Sp)m]y, (Sp)t[(Rp/Op)n(Sp)m]y, (Sp)t[(Rp/Op)n(Sp)m]y(Rp)k, wherein k is 1-50, and each other variable is independently as described in the present disclosure. In certain embodiments, a pattern of backbone chiral centers of a ds oligonucleotide or a region thereof (e.g., a core) comprises or is [(Op)n(Sp)m]y(Rp)k, [(Op)n(Sp)m]y, (Sp)t[(Op)n(Sp)m]y, (Sp)t[(Op)n(Sp)m]y(Rp)k, wherein each variable is independently as described in the present disclosure. In certain embodiments, a pattern of backbone chiral centers of a ds oligonucleotide or a region thereof (e.g., a core) comprises or is [(Rp)n(Sp)m]y(Rp)k, [(Rp)n(Sp)m]y, (Sp)t[(Rp)n(Sp)m]y, (Sp)t[(Rp)n(Sp)m]y(Rp)k, wherein each variable is independently as described in the present disclosure. In certain embodiments, an oligonucleotide comprises a core region. In certain embodiments, an oligonucleotide comprises a core region, wherein each sugar in the core region does not contain a 2′-OR¹, wherein R¹ is as described in the present disclosure. In certain embodiments, a ds oligonucleotide comprises a core region, wherein each sugar in the core region is independently a natural DNA sugar. In certain embodiments, the pattern of backbone chiral centers of the core comprises or is (Rp)(Sp)m. In certain embodiments, the pattern of backbone chiral centers of the core comprises or is (Op)(Sp)m. In certain embodiments, the pattern of backbone chiral centers of the core comprises or is (Np)t[(Rp/Op)n(Sp)m]y or [(Rp/Op)n(Sp)m]y(Np)t. In certain embodiments, the pattern of backbone chiral centers of the core comprises or is (Np)t[(Rp/Op)n(Sp)m]y or [(Rp/Op)n(Sp)m]y(Np)t. In certain embodiments, the pattern of backbone chiral centers of the core comprises or is (Np)t[(Rp)n(Sp)m]y or [(Rp)n(Sp)m]y(Np)t. In certain embodiments, the pattern of backbone chiral centers of a core comprises or is [(Rp/Op)n(Sp)m]y(Rp)k, [(Rp/Op)n(Sp)m]y, (Sp)t[(Rp/Op)n(Sp)m]y, (Sp)t[(Rp/Op)n(Sp)m]y(Rp)k. In certain embodiments, a pattern of backbone chiral centers of a core comprises or is [(Op)n(Sp)m]y(Rp)k, [(Op)n(Sp)m]y, (Sp)t[(Op)n(Sp)m]y, (Sp)t[(Op)n(Sp)m]y(Rp)k. In certain embodiments, a pattern of backbone chiral centers of a core comprises or is [(Rp)n(Sp)m]y(Rp)k, [(Rp)n(Sp)m]y, (Sp)t[(Rp)n(Sp)m]y, or (Sp)t[(Rp)n(Sp)m]y(Rp)k. In certain embodiments, a pattern of backbone chiral centers of a core comprises [(Rp)n(Sp)m]y(Rp)k. In certain embodiments, a pattern of backbone chiral centers of a core comprises [(Rp)n(Sp)m]y(Rp). In certain embodiments, a pattern of backbone chiral centers of a core comprises [(Rp)n(Sp)m]y. In certain embodiments, a pattern of backbone chiral centers of a core comprises (Sp)t[(Rp)n(Sp)m]y. In certain embodiments, a pattern of backbone chiral centers of a core comprises (Sp)t[(Rp)n(Sp)m]y(Rp)k. In certain embodiments, a pattern of backbone chiral centers of a core comprises (Sp)t[(Rp)n(Sp)m]y(Rp). In certain embodiments, a pattern of backbone chiral centers of a core is [(Rp)n(Sp)m]y(Rp)k. In certain embodiments, a pattern of backbone chiral centers of a core is [(Rp)n(Sp)m]y(Rp). In certain embodiments, a pattern of backbone chiral centers of a core is [(Rp)n(Sp)m]y. In certain embodiments, a pattern of backbone chiral centers of a core is (Sp)t[(Rp)n(Sp)m]y. In certain embodiments, a pattern of backbone chiral centers of a core is (Sp)t[(Rp)n(Sp)m]y(Rp)k. In certain embodiments, a pattern of backbone chiral centers of a core is (Sp)t[(Rp)n(Sp)m]y(Rp). In certain embodiments, each n is 1. In certain embodiments, each t is 1. In certain embodiments, t is 2, 3, 4, 5, 6, 7, 8, 9, or 10. In certain embodiments, each of t and n is 1. In certain embodiments, each m is 2 or more. In certain embodiments, k is 1. In certain embodiments, k is 2-10.

[1181] In certain embodiments, a pattern of backbone chiral centers comprises or is (Sp)m(Rp)n, (Rp)n(Sp)m, (Np)t(Rp)n(Sp)m, (Sp)t(Rp)n(Sp)m, (Np)t[(Rp)n(Sp)m]2, (Sp)t[(Rp)n(Sp)m]2, (Np)t(Op)n(Sp)m, (Sp)t(Op)n(Sp)m, (Np)t[(Op)n(Sp)m]2, or (Sp)t[(Op)n(Sp)m]2. In certain embodiments, a pattern is (Np)t(Op/Rp)n(Sp)m(Op/Rp)n(Sp)m. In certain embodiments, a pattern is (Np)t(Op/Rp)n(Sp)1-5(Op/Rp)n(Sp)m. In certain embodiments, a pattern is (Np)t(Op/Rp)n(Sp)2-5(Op/Rp)n(Sp)m. In certain embodiments, a pattern is (Np)t(Op/Rp)n(Sp)2(Op/Rp)n(Sp)m. In certain embodiments, a pattern is (Np)t(Op/Rp)n(Sp)3(Op/Rp)n(Sp)m. In certain embodiments, a pattern is (Np)t(Op/Rp)n(Sp)4(Op/Rp)n(Sp)m. In certain embodiments, a pattern is (Np)t(Op/Rp)n(Sp)5(Op/Rp)n(Sp)m.

[1182] In certain embodiments, Np is Sp. In certain embodiments, (Op/Rp) is Op. In certain embodiments, (Op/Rp) is Rp. In certain embodiments, Np is Sp and (Op/Rp) is Rp. In certain embodiments, Np is Sp and (Op/Rp) is Op. In certain embodiments, Np is Sp and at least one (Op/Rp) is Rp, and at least one (Op/Rp) is Op. In certain embodiments, a pattern of backbone chiral centers comprises or is (Rp)n(Sp)m, (Np)t(Rp)n(Sp)m, or (Sp)t(Rp)n(Sp)m, wherein m>2. In certain embodiments, a pattern of backbone chiral centers comprises or is (Rp)n(Sp)m, (Np)t(Rp)n(Sp)m, or (Sp)t(Rp)n(Sp)m, wherein n is 1, at least one t>1, and at least one m>2.

[1183] In certain embodiments, oligonucleotides comprising core regions whose patterns of backbone chiral centers starting with Rp can provide high activities and/or improved properties. In certain embodiments, oligonucleotides comprising core regions whose patterns of backbone chiral centers ending with Rp can provide high activities and/or improved properties. In certain embodiments, oligonucleotides comprising core regions whose patterns of backbone chiral centers starting with Rp provide high activities (e.g., target cleavage) without significantly impacting its properties, e.g., stability. In certain embodiments, oligonucleotides comprising core regions whose patterns of backbone chiral centers ending with Rp provide high activities (e.g., target cleavage) without significantly impacting its properties, e.g., stability. In certain embodiments, patterns of backbone chiral centers start with Rp and end with Sp. In certain embodiments, patterns of backbone chiral centers start with Rp and end with Rp. In certain embodiments, patterns of backbone chiral centers start with Sp and end with Rp.

[1184] In certain embodiments, a pattern of backbone chiral centers of a RNAi oligonucleotide or a region thereof (e.g., a core) comprises or is (Op)[(Rp/Op)n(Sp)m]y(Rp)k(Op), (Op)[(Rp/Op)n(Sp)m]y(Op), (Op)(Sp)t[(Rp/Op)n(Sp)m]y(Op), or (Op)(Sp)t[(Rp/Op)n(Sp)m]y(Rp)k(Op), wherein k is 1-50, and each other variable is independently as described in the present disclosure. In certain embodiments, a pattern of backbone chiral centers of a RNAi oligonucleotide comprises or is (Op)[(Rp/Op)n(Sp)m]y(Rp)k(Op), (Op)[(Rp/Op)n(Sp)m]y(Op), (Op)(Sp)t[(Rp/Op)n(Sp)m]y(Op), or (Op)(Sp)t[(Rp/Op)n(Sp)m]y(Rp)k(Op), wherein each of f, g, h and j is independently 1-50, and each other variable is independently as described in the present disclosure, and the oligonucleotide comprises a core region whose pattern of backbone chiral centers comprises or is [(Rp/Op)n(Sp)m]y(Rp)k, [(Rp/Op)n(Sp)m]y, (Sp)t[(Rp/Op)n(Sp)m]y, or (Sp)t[(Rp/Op)n(Sp)m]y(Rp)k as described in the present disclosure. In certain embodiments, a pattern of backbone chiral centers is or comprises (Op)[(Rp/Op)n(Sp)m]y(Rp)k(Op). In certain embodiments, a pattern of backbone chiral centers is or comprises (Op)[(Rp/Op)n(Sp)m]y(Rp)(Op). In certain embodiments, a pattern of backbone chiral centers is or comprises (Op)[(Rp/Op)n(Sp)m]y(Op). In certain embodiments, a pattern of backbone chiral centers is or comprises (Op)(Sp)t[(Rp/Op)n(Sp)m]y(Op). In certain embodiments, a pattern of backbone chiral centers is or comprises (Op)(Sp)t[(Rp/Op)n(Sp)m]y(Rp)k(Op). In certain embodiments, a pattern of backbone chiral centers is or comprises (Op)(Sp)t[(Rp/Op)n(Sp)m]y(Rp)(Op). In certain embodiments, a pattern of backbone chiral centers is or comprises (Op)[(Rp)n(Sp)m]y(Rp)k(Op). In certain embodiments, a pattern of backbone chiral centers is or comprises (Op)[(Rp)n(Sp)m]y(Rp)(Op). In certain embodiments, a pattern of backbone chiral centers is or comprises (Op)[(Rp)n(Sp)m]y(Op). In certain embodiments, a pattern of backbone chiral centers is or comprises (Op)(Sp)t[(Rp)n(Sp)m]y(Op). In certain embodiments, a pattern of backbone chiral centers is or comprises (Op)(Sp)t[(Rp)n(Sp)m]y(Rp)k(Op). In certain embodiments, a pattern of backbone chiral centers is or comprises (Op)(Sp)t[(Rp)n(Sp)m]y(Rp)(Op). In certain embodiments, each n is 1. In certain embodiments, k is 1. In certain embodiments, k is 2-10.

[1185] In certain embodiments, a pattern of backbone chiral centers of a RNAi oligonucleotide or a region thereof (e.g., a core) comprises or is (Np)f(Op)g[(Rp/Op)n(Sp)m]y(Rp)k(Op)h(Np)j, (Np)f(Op)g[(Rp/Op)n(Sp)m]y(Op)h(Np)j, (Np)f(Op)g(Sp)t[(Rp/Op)n(Sp)m]y(Op)h(Np)j, or (Np)f(Op)g(Sp)t[(Rp/Op)n(Sp)m]y(Rp)k(Op)h(Np)j, wherein each of f, g, h and j is independently 1-50, and each other variable is independently as described in the present disclosure.

[1186] In certain embodiments, a pattern of backbone chiral centers of a RNAi oligonucleotide comprises or is (Np)f(Op)g[(Rp/Op)n(Sp)m]y(Rp)k(Op)h(Np)j, (Np)f(Op)g[(Rp/Op)n(Sp)m]y(Op)h(Np)j, (Np)f(Op)g(Sp)t[(Rp/Op)n(Sp)m]y(Op)h(Np)j, or (Np)f(Op)g(Sp)t[(Rp/Op)n(Sp)m]y(Rp)k(Op)h(Np)j, and the oligonucleotide comprises a core region whose pattern of backbone chiral centers comprises or is [(Rp/Op)n(Sp)m]y(Rp)k, [(Rp/Op)n(Sp)m]y, (Sp)t[(Rp/Op)n(Sp)m]y, or (Sp)t[(Rp/Op)n(Sp)m]y(Rp)k as described in the present disclosure.

[1187] In certain embodiments, a pattern of backbone chiral centers of a RNAi oligonucleotide is (Np)f(Op)g[(Rp/Op)n(Sp)m]y(Rp)k(Op)h(Np)j, (Np)f(Op)g[(Rp/Op)n(Sp)m]y(Op)h(Np)j, (Np)f(Op)g(Sp)t[(Rp/Op)n(Sp)m]y(Op)h(Np)j, or (Np)f(Op)g(Sp)t[(Rp/Op)n(Sp)m]y(Rp)k(Op)h(Np)j, and the oligonucleotide comprises a core region whose pattern of backbone chiral centers comprises or is [(Rp/Op)n(Sp)m]y(Rp)k, [(Rp/Op)n(Sp)m]y, (Sp)t[(Rp/Op)n(Sp)m]y, or (Sp)t[(Rp/Op)n(Sp)m]y(Rp)k as described in the present disclosure. In certain embodiments, a pattern of backbone chiral centers is or comprises (Np)f(Op)g[(Rp/Op)n(Sp)m]y(Rp)k(Op)h(Np)j.

[1188] In certain embodiments, a pattern of backbone chiral centers is or comprises (Np)f(Op)g[(Rp/Op)n(Sp)m]y(Rp)(Op)h(Np)j. In certain embodiments, a pattern of backbone chiral centers is or comprises (Np)f(Op)g[(Rp/Op)n(Sp)m]y(Op)h(Np)j. In certain embodiments, a pattern of backbone chiral centers is or comprises (Np)f(Op)g(Sp)t[(Rp/Op)n(Sp)m]y(Op)h(Np)j. In certain embodiments, a pattern of backbone chiral centers is or comprises (Np)f(Op)g(Sp)t[(Rp/Op)n(Sp)m]y(Rp)k(Op)h(Np)j. In certain embodiments, a pattern of backbone chiral centers is or comprises (Np)f(Op)g(Sp)t[(Rp/Op)n(Sp)m]y(Rp)(Op)h(Np)j.

[1189] In certain embodiments, a pattern of backbone chiral centers is or comprises (Np)f(Op)g[(Rp)n(Sp)m]y(Rp)k(Op)h(Np)j. In certain embodiments, a pattern of backbone chiral centers is or comprises (Np)f(Op)g[(Rp)n(Sp)m]y(Rp)(Op)h(Np)j. In certain embodiments, a pattern of backbone chiral centers is or comprises (Np)f(Op)g[(Rp)n(Sp)m]y(Op)h(Np)j. In certain embodiments, a pattern of backbone chiral centers is or comprises (Np)f(Op)g(Sp)t[(Rp)n(Sp)m]y(Op)h(Np)j.

[1190] In certain embodiments, a pattern of backbone chiral centers is or comprises (Np)f(Op)g(Sp)t[(Rp)n(Sp)m]y(Rp)k(Op)h(Np)j. In certain embodiments, a pattern of backbone chiral centers is or comprises (Np)f(Op)g(Sp)t[(Rp)n(Sp)m]y(Rp)(Op)h(Np)j.

[1191] In certain embodiments, at least one Np is Sp. In certain embodiments, at least one Np is Rp. In certain embodiments, the 5′ most Np is Sp. In certain embodiments, the 3′ most Np is Sp. In certain embodiments, each Np is Sp. In certain embodiments, (Np)f(Op)g[(Rp/Op)n(Sp)m]y(Rp)k(Op)h(Np)j is (Sp)(Op)g[(Rp)n(Sp)m]y(Rp)k(Op)h(Sp).

[1192] In certain embodiments, (Np)f(Op)g[(Rp/Op)n(Sp)m]y(Rp)k(Op)h(Np)j is (Sp)(Op)g[(Rp)n(Sp)m]y(Rp)(Op)h(Sp). In certain embodiments, a pattern of backbone chiral center of a ds oligonucleotide is or comprises (Sp)(Op)g[(Rp)n(Sp)m]y(Rp)(Op)h(Sp). In certain embodiments, a pattern of backbone chiral center of a ds oligonucleotide is (Sp)(Op)g[(Rp)n(Sp)m]y(Rp)(Op)h(Sp). In certain embodiments, (Np)f(Op)g[(Rp/Op)n(Sp)m]y(Op)h(Np)j is (Sp)(Op)g[(Rp)n(Sp)m]y(Op)h(Sp). In certain embodiments, a pattern of backbone chiral center of a ds oligonucleotide is or comprises (Sp)(Op)g[(Rp)n(Sp)m]y(Op)h(Sp). In certain embodiments, a pattern of backbone chiral center of a ds oligonucleotide is (Sp)(Op)g[(Rp)n(Sp)m]y(Op)h(Sp).

[1193] In certain embodiments, (Np)f(Op)g(Sp)t[(Rp/Op)n(Sp)m]y(Op)h(Np)j is (Sp)(Op)g(Sp)t[(Rp)n(Sp)m]y(Op)h(Sp). In certain embodiments, a pattern of backbone chiral center of a ds oligonucleotide is or comprises (Sp)(Op)g(Sp)t[(Rp)n(Sp)m]y(Op)h(Sp). In certain embodiments, a pattern of backbone chiral center of a ds oligonucleotide is (Sp)(Op)g(Sp)t[(Rp)n(Sp)m]y(Op)h(Sp). In certain embodiments, (Np)f(Op)g(Sp)t[(Rp/Op)n(Sp)m]y(Rp)k(Op)h(Np)j is (Sp)(Op)g(Sp)t[(Rp)n(Sp)m]y(Rp)k(Op)h(Sp).

[1194] In certain embodiments, (Np)f(Op)g(Sp)t[(Rp/Op)n(Sp)m]y(Rp)k(Op)h(Np)j is (Sp)(Op)g(Sp)t[(Rp)n(Sp)m]y(Rp)(Op)h(Sp). In certain embodiments, a pattern of backbone chiral center of a ds oligonucleotide is or comprises (Sp)(Op)g(Sp)t[(Rp)n(Sp)m]y(Rp)(Op)h(Sp). In certain embodiments, a pattern of backbone chiral center of a ds oligonucleotide is (Sp)(Op)g(Sp)t[(Rp)n(Sp)m]y(Rp)(Op)h(Sp). In certain embodiments, each n is 1. In certain embodiments, f is 1. In certain embodiments, g is 1. In certain embodiments, g is greater than 1. In certain embodiments, g is 2. In certain embodiments, g is 3. In certain embodiments, g is 4. In certain embodiments, g is 5. In certain embodiments, g is 6. In certain embodiments, g is 7. In certain embodiments, g is 8. In certain embodiments, g is 9. In certain embodiments, g is 10. In certain embodiments, h is 1. In certain embodiments, h is greater than 1. In certain embodiments, h is 2. In certain embodiments, h is 3. In certain embodiments, h is 4. In certain embodiments, h is 5. In certain embodiments, h is 6. In certain embodiments, h is 7. In certain embodiments, h is 8. In certain embodiments, h is 9. In certain embodiments, h is 10. In certain embodiments, j is 1. In certain embodiments, k is 1. In certain embodiments, k is 2-10.

[1195] In certain embodiments, a pattern of backbone chiral centers of a RNAi oligonucleotide or a region thereof (e.g., a core) comprises or is [(Rp/Op)n(Sp)m]y, (Sp)t[(Rp/Op)n(Sp)m]y, (Sp)t[(Rp/Op)n(Sp)m]yRp, [(Rp/Op)n(Sp)m]y(Rp)k, (Sp)t[(Rp/Op)n(Sp)m]y(Rp)k, (Sp)t[(Rp/Op)n(Sp)m]y(Rp)k(Op)h, (Sp)t[(Rp/Op)n(Sp)m]y(Rp)k(Op)h(Np)j, wherein each variable is independently as described in the present disclosure.

[1196] In certain embodiments, in a provided pattern of backbone chiral centers, at least one (Rp/Op) is Rp. In certain embodiments, at least one (Rp/Op) is Op. In certain embodiments, each (Rp/Op) is Rp. In certain embodiments, each (Rp/Op) is Op. In certain embodiments, at least one of [(Rp)n(Sp)m]y or [(Rp/Op)n(Sp)m]y of a pattern is RpSp. In certain embodiments, at least one of [(Rp)n(Sp)m]y or [(Rp/Op)n(Sp)m]y of a pattern is or comprises RpSpSp. In certain embodiments, at least one of [(Rp)n(Sp)m]y or [(Rp/Op)n(Sp)m]y in a pattern is RpSp, and at least one of [(Rp)n(Sp)m]y or [(Rp/Op)n(Sp)m]y in a pattern is or comprises RpSpSp. For example, in certain embodiments, [(Rp)n(Sp)m]y in a pattern is (RpSp)[(Rp)n(Sp)m]_{(y-1)}; in certain embodiments, [(Rp)n(Sp)m]y in a pattern is (RpSp)[RpSpSp(Sp)₍ₘ₋₂₎][(Rp)n(Sp)m]_{(y-2)}. In certain embodiments, (Sp)t[(Rp)n(Sp)m]y(Rp) is (Sp)t(RpSp)[(Rp)n(Sp)m]_{(y-1)}(Rp). In certain embodiments, (Sp)t[(Rp)n(Sp)m]y(Rp) is (Sp)t(RpSp)[RpSpSp(Sp)₍ₘ₋₂₎][(Rp)n(Sp)m]_{(y-2)}(Rp). In certain embodiments, each [(Rp/Op)n(Sp)m] is independently [Rp(Sp)m]. In certain embodiments, the first Sp of (Sp)t represents linkage phosphorus stereochemistry of the first internucleotidic linkage of a ds oligonucleotide from 5′ to 3′. In certain embodiments, the first Sp of (Sp)t represents linkage phosphorus stereochemistry of the first internucleotidic linkage of a region from 5′ to 3′, e.g., a core. In certain embodiments, the last Np of (Np)j represents linkage phosphorus stereochemistry of the last internucleotidic linkage of the oligonucleotide from 5′ to 3′. In certain embodiments, the last Np is Sp.

[1197] In certain embodiments, a pattern of backbone chiral centers of a ds oligonucleotide or a region (e.g., of a 5′-wing) is or comprises Sp(Op)₃. In certain embodiments, a pattern of backbone chiral centers of a ds oligonucleotide or a region (e.g., of a 5′-wing) is or comprises Rp(Op)₃. In certain embodiments, a pattern of backbone chiral centers of a ds oligonucleotide or a region (e.g., of a 3′-wing) is or comprises (Op)₃Sp. In certain embodiments, a pattern of backbone chiral centers of a ds oligonucleotide or a region (e.g., of a 3′-wing) is or comprises (Op)₃Rp. In certain embodiments, a pattern of backbone chiral centers of a ds oligonucleotide or a region (e.g., of a core) is or comprises Rp(Sp)₄Rp(Sp)₄Rp. In certain embodiments, a pattern of backbone chiral centers of a ds oligonucleotide or a region (e.g., of a core) is or comprises (Sp)₅Rp(Sp)₄Rp. In certain embodiments, a pattern of backbone chiral centers of a ds oligonucleotide or a region (e.g., of a core) is or comprises (Sp)₅Rp(Sp)₅. In certain embodiments, a pattern of backbone chiral centers of a ds oligonucleotide or a region (e.g., of a core) is or comprises Rp(Sp)₄Rp(Sp)₅. In certain embodiments, a pattern of backbone chiral centers of a ds oligonucleotide is or comprises Np(Op)₃Rp(Sp)₄Rp(Sp)₄Rp(Op)₃Np. In certain embodiments, a pattern of backbone chiral centers of a ds oligonucleotide is or comprises Np(Op)₃(Sp)₅Rp(Sp)₄Rp(Op)₃Np. In certain embodiments, a pattern of backbone chiral centers of a ds oligonucleotide is or comprises Np(Op)₃(Sp)₅Rp(Sp)₅(Op)₃Np. In certain embodiments, a pattern of backbone chiral centers of a ds oligonucleotide is or comprises Np(Op)₃Rp(Sp)₄Rp(Sp)₅(Op)₃Np. In certain embodiments, a pattern of backbone chiral centers of a ds oligonucleotide is or comprises Sp(Op)₃Rp(Sp)₄Rp(Sp)₄Rp(Op)₃Sp. In certain embodiments, a pattern of backbone chiral centers of a ds oligonucleotide is or comprises Sp(Op)₃(Sp)₅Rp(Sp)₄Rp(Op)₃Sp. In certain embodiments, a pattern of backbone chiral centers of a ds oligonucleotide is or comprises Sp(Op)₃(Sp)₅Rp(Sp)₅(Op)₃Sp. In certain embodiments, a pattern of backbone chiral centers of a ds oligonucleotide is or comprises Sp(Op)₃Rp(Sp)₄Rp(Sp)₅(Op)₃Sp. In certain embodiments, a pattern of backbone chiral centers of a ds oligonucleotide is or comprises Rp(Op)₃Rp(Sp)₄Rp(Sp)₄Rp(Op)₃Rp. In certain embodiments, a pattern of backbone chiral centers of a ds oligonucleotide is or comprises Rp(Op)₃(Sp)₅Rp(Sp)₄Rp(Op)₃Rp. In certain embodiments, a pattern of backbone chiral centers of a ds oligonucleotide is or comprises Rp(Op)₃(Sp)₅Rp(Sp)₅(Op)₃Rp. In certain embodiments, a pattern of backbone chiral centers of a ds oligonucleotide is or comprises Rp(Op)₃Rp(Sp)₄Rp(Sp)₅(Op)₃Rp.

[1198] In certain embodiments, each of m, y, t, n, k, f, g, h, and j is independently 1-25.

[1199] In certain embodiments, m is 1-25. In certain embodiments, m is 1-20. In certain embodiments, m is 1-15. In certain embodiments, m is 1-10. In certain embodiments, m is 1-5. In certain embodiments, m is 2-20. In certain embodiments, m is 2-15. In certain embodiments, m is 2-10. In certain embodiments, m is 2-5. In certain embodiments, m is 1, 2, 3, 4, 5, 6, 7, 8, 9, 10, 11, 12, 13, 14, 15, 16, 17, 18, 19, 20, 21, 22, 23, 24, or 25. In certain embodiments, in a pattern of backbone chiral centers each m is independently 2 or more. In certain embodiments, each m is independently 2, 3, 4, 5, 6, 7, 8, 9, or 10. In certain embodiments, each m is independently 2-3, 2-5, 2-6, or 2-10. In certain embodiments, m is 2. In certain embodiments, m is 3. In certain embodiments, m is 4. In certain embodiments, m is 5. In certain embodiments, m is 6. In certain embodiments, m is 7. In certain embodiments, m is 8. In certain embodiments, m is 9. In certain embodiments, m is 10. In certain embodiments, where there are two or more occurrences of m, they can be the same or different, and each of them is independently as described in the present disclosure.

[1200] In certain embodiments, y is 1-25. In certain embodiments, y is 1-20. In certain embodiments, y is 1-15. In certain embodiments, y is 1-10. In certain embodiments, y is 1-5. In certain embodiments, y is 2-20. In certain embodiments, y is 2-15. In certain embodiments, y is 2-10. In certain embodiments, y is 2-5. In certain embodiments, y is 1, 2, 3, 4, 5, 6, 7, 8, 9, 10, 11, 12, 13, 14, 15, 16, 17, 18, 19, 20, 21, 22, 23, 24, or 25. In certain embodiments, y is 1, 2, 3, 4, 5, 6, 7, 8, 9, or 10. In certain embodiments, y is 1. In certain embodiments, y is 2. In certain embodiments, y is 3. In certain embodiments, y is 4. In certain embodiments, y is 5. In certain embodiments, y is 6. In certain embodiments, y is 7. In certain embodiments, y is 8. In certain embodiments, y is 9. In certain embodiments, y is 10.

[1201] In certain embodiments, t is 1-25. In certain embodiments, t is 1-20. In certain embodiments, t is 1-15. In certain embodiments, t is 1-10. In certain embodiments, t is 1-5. In certain embodiments, t is 2-20. In certain embodiments, t is 2-15. In certain embodiments, t is 2-10. In certain embodiments, t is 2-5. In certain embodiments, t is 1, 2, 3, 4, 5, 6, 7, 8, 9, 10, 11, 12, 13, 14, 15, 16, 17, 18, 19, 20, 21, 22, 23, 24, or 25. In certain embodiments, each t is independently 1, 2, 3, 4, 5, 6, 7, 8, 9, or 10. In certain embodiments, t is 2 or more. In certain embodiments, t is 1. In certain embodiments, t is 2. In certain embodiments, t is 3. In certain embodiments, t is 4. In certain embodiments, t is 5. In certain embodiments, t is 6. In certain embodiments, t is 7. In certain embodiments, t is 8. In certain embodiments, t is 9. In certain embodiments, t is 10. In certain embodiments, where there are two or more occurrences of t, they can be the same or different, and each of them is independently as described in the present disclosure.

[1202] In certain embodiments, n is 1-25. In certain embodiments, n is 1, 2, 3, 4, 5, 6, 7, 8, 9, 10, 11, 12, 13, 14, 15, 16, 17, 18, 19, 20, 21, 22, 23, 24, or 25. In certain embodiments, n is 1. In certain embodiments, n is 2. In certain embodiments, n is 3. In certain embodiments, n is 4. In certain embodiments, n is 5. In certain embodiments, n is 6. In certain embodiments, n is 7. In certain embodiments, n is 8. In certain embodiments, n is 9. In certain embodiments, n is 10. In certain embodiments, where there are two or more occurrences of n, they can be the same or different, and each of them is independently as described in the present disclosure. In certain embodiments, in a pattern of backbone chiral centers, at least one occurrence of n is 1; in some cases, each n is 1.

[1203] In certain embodiments, k is 1-25. In certain embodiments, k is 1, 2, 3, 4, 5, 6, 7, 8, 9, 10, 11, 12, 13, 14, 15, 16, 17, 18, 19, 20, 21, 22, 23, 24, or 25. In certain embodiments, k is 1. In certain embodiments, k is 2. In certain embodiments, k is 3. In certain embodiments, k is 4. In certain embodiments, k is 5. In certain embodiments, k is 6. In certain embodiments, k is 7. In certain embodiments, k is 8. In certain embodiments, k is 9. In certain embodiments, k is 10.

[1204] In certain embodiments, f is 1-25. In certain embodiments, f is 1-20. In certain embodiments, f is 1-10. In certain embodiments, f is 1-5. In certain embodiments, f is 1, 2, 3, 4, 5, 6, 7, 8, 9, 10, 11, 12, 13, 14, 15, 16, 17, 18, 19, 20, 21, 22, 23, 24, or 25. In certain embodiments, f is 1. In certain embodiments, f is 2. In certain embodiments, f is 3. In certain embodiments, f is 4. In certain embodiments, f is 5. In certain embodiments, f is 6. In certain embodiments, f is 7. In certain embodiments, f is 8. In certain embodiments, f is 9. In certain embodiments, f is 10.

[1205] In certain embodiments, g is 1-25. In certain embodiments, g is 1-20. In certain embodiments, g is 1-9. In certain embodiments, g is 1-5. In certain embodiments, g is 2-10. In certain embodiments, g is 2-5. In certain embodiments, g is 1, 2, 3, 4, 5, 6, 7, 8, 9, 10, 11, 12, 13, 14, 15, 16, 17, 18, 19, 20, 21, 22, 23, 24, or 25. In certain embodiments, g is 1. In certain embodiments, g is 2. In certain embodiments, g is 3. In certain embodiments, g is 4. In certain embodiments, g is 5. In certain embodiments, g is 6. In certain embodiments, g is 7. In certain embodiments, g is 8. In certain embodiments, g is 9. In certain embodiments, g is 10.

[1206] In certain embodiments, h is 1-25. In certain embodiments, h is 1-10. In certain embodiments, h is 1-5. In certain embodiments, h is 2-10. In certain embodiments, h is 2-5. In certain embodiments, h is 1, 2, 3, 4, 5, 6, 7, 8, 9, 10, 11, 12, 13, 14, 15, 16, 17, 18, 19, 20, 21, 22, 23, 24, or 25. In certain embodiments, h is 1. In certain embodiments, h is 2. In certain embodiments, h is 3. In certain embodiments, h is 4. In certain embodiments, h is 5. In certain embodiments, h is 6. In certain embodiments, h is 7. In certain embodiments, h is 8. In certain embodiments, h is 9. In certain embodiments, h is 10.

[1207] In certain embodiments, j is 1-25. In certain embodiments, j is 1-10. In certain embodiments, j is 1-5. In certain embodiments, j is 1, 2, 3, 4, 5, 6, 7, 8, 9, 10, 11, 12, 13, 14, 15, 16, 17, 18, 19, 20, 21, 22, 23, 24, or 25. In certain embodiments, j is 1. In certain embodiments, j is 2. In certain embodiments, j is 3. In certain embodiments, j is 4. In certain embodiments, j is 5. In certain embodiments, j is 6. In certain embodiments, j is 7. In certain embodiments, j is 8. In certain embodiments, j is 9. In certain embodiments, j is 10.

[1208] In certain embodiments, at least one n is 1, and at least one m is no less than 2. In certain embodiments, at least one n is 1, at least one t is no less than 2, and at least one m is no less than 3. In certain embodiments, each n is 1. In certain embodiments, t is 1. In certain embodiments, at least one t>1. In certain embodiments, at least one t>2. In certain embodiments, at least one t>3. In certain embodiments, at least one t>4. In certain embodiments, at least one m>1. In certain embodiments, at least one m>2. In certain embodiments, at least one m>3. In certain embodiments, at least one m>4. In certain embodiments, a pattern of backbone chiral centers comprises one or more achiral natural phosphate linkages. In certain embodiments, the sum of m, t, and n (or m and n if no t is in a pattern) is no less than 5, 6, 7, 8, 9, 10, 11, 12, 13, 14, 15, 16, 17, 18, 19 or 20. In certain embodiments, the sum is 5. In certain embodiments, the sum is 6. In certain embodiments, the sum is 7. In certain embodiments, the sum is 8. In certain embodiments, the sum is 9. In certain embodiments, the sum is 10. In certain embodiments, the sum is 11. In certain embodiments, the sum is 12. In certain embodiments, the sum is 13. In certain embodiments, the sum is 14. In certain embodiments, the sum is 15.

[1209] In certain embodiments, a number of linkage phosphorus in chirally controlled internucleotidic linkages are Sp. In certain embodiments, at least 10%, 20%, 25%, 30%, 35%, 40%, 45%, 50%, 55%, 60%, 65%, 70%, 75%, 80%, 85%, 90% or 95% of chirally controlled internucleotidic linkages have Sp linkage phosphorus. In certain embodiments, at least 10%, 20%, 25%, 30%, 35%, 40%, 45%, 50%, 55%, 60%, 65%, 70%, 75%, 80%, 85%, 90% or 95% of all chiral internucleotidic linkages are chirally controlled internucleotidic linkages having Sp linkage phosphorus. In certain embodiments, at least 10%, 20%, 25%, 30%, 35%, 40%, 45%, 50%, 55%, 60%, 65%, 70%, 75%, 80%, 85%, 90% or 95% of all internucleotidic linkages are chirally controlled internucleotidic linkages having Sp linkage phosphorus. In certain embodiments, the percentage is at least 20%. In certain embodiments, the percentage is at least 30%. In certain embodiments, the percentage is at least 40%. In certain embodiments, the percentage is at least 50%. In certain embodiments, the percentage is at least 60%.

[1210] In certain embodiments, the percentage is at least 65%. In certain embodiments, the percentage is at least 70%. In certain embodiments, the percentage is at least 75%. In certain embodiments, the percentage is at least 80%. In certain embodiments, the percentage is at least 90%. In certain embodiments, the percentage is at least 95%. In certain embodiments, at least 1, 2, 3, 4, 5, 6, 7, 8, 9, 10, 11, 12, 13, 14, 15, 16, 17, 18, 19, 20, 21, 22, 23, 24, or 25 internucleotidic linkages are chirally controlled internucleotidic linkages having Sp linkage phosphorus. In certain embodiments, at least 5 internucleotidic linkages are chirally controlled internucleotidic linkages having Sp linkage phosphorus. In certain embodiments, at least 6 internucleotidic linkages are chirally controlled internucleotidic linkages having Sp linkage phosphorus. In certain embodiments, at least 7 internucleotidic linkages are chirally controlled internucleotidic linkages having Sp linkage phosphorus. In certain embodiments, at least 8 internucleotidic linkages are chirally controlled internucleotidic linkages having Sp linkage phosphorus. In certain embodiments, at least 9 internucleotidic linkages are chirally controlled internucleotidic linkages having Sp linkage phosphorus. In certain embodiments, at least 10 internucleotidic linkages are chirally controlled internucleotidic linkages having Sp linkage phosphorus. In certain embodiments, at least 11 internucleotidic linkages are chirally controlled internucleotidic linkages having Sp linkage phosphorus. In certain embodiments, at least 12 internucleotidic linkages are chirally controlled internucleotidic linkages having Sp linkage phosphorus. In certain embodiments, at least 13 internucleotidic linkages are chirally controlled internucleotidic linkages having Sp linkage phosphorus. In certain embodiments, at least 14 internucleotidic linkages are chirally controlled internucleotidic linkages having Sp linkage phosphorus. In certain embodiments, at least 15 internucleotidic linkages are chirally controlled internucleotidic linkages having Sp linkage phosphorus. In certain embodiments, at least 1, 2, 3, 4, 5, 6, 7, 8, 9, 10, 11, 12, 13, 14, 15, 16, 17, 18, 19, 20, 21, 22, 23, 24, or 25 internucleotidic linkages are chirally controlled internucleotidic linkages having Rp linkage phosphorus. In certain embodiments, no more than 1, 2, 3, 4, 5, 6, 7, 8, 9, 10, 11, 12, 13, 14, 15, 16, 17, 18, 19, 20, 21, 22, 23, 24, or 25 internucleotidic linkages are chirally controlled internucleotidic linkages having Rp linkage phosphorus. In certain embodiments, one and no more than one internucleotidic linkage in a ds oligonucleotide is a chirally controlled internucleotidic linkage having Rp linkage phosphorus. In certain embodiments, 2 and no more than 2 internucleotidic linkages in a ds oligonucleotide are chirally controlled internucleotidic linkages having Rp linkage phosphorus. In certain embodiments, 3 and no more than 3 internucleotidic linkages in a ds oligonucleotide are chirally controlled internucleotidic linkages having Rp linkage phosphorus. In certain embodiments, 4 and no more than 4 internucleotidic linkages in a ds oligonucleotide are chirally controlled internucleotidic linkages having Rp linkage phosphorus. In certain embodiments, 5 and no more than 5 internucleotidic linkages in a ds oligonucleotide are chirally controlled internucleotidic linkages having Rp linkage phosphorus.

[1211] In certain embodiments, all, essentially all or most of the internucleotidic linkages in a ds oligonucleotide are in the Sp configuration (e.g., about 50%-100%, 55%-100%, 60%-100%, 65%-100%, 70%-100%, 75%-100%, 80%-100%, 85%-100%, 90%-100%, 55%-95%, 60%-95%, 65%-95%, or about 55%, 60%, 65%, 70%, 75%, 80%, 85%, 90%, 95%, 97%, 99% r more of all chirally controlled internucleotidic linkages, or of all chiral internucleotidic linkages, or of all internucleotidic linkages in the oligonucleotide) except for one or a minority of internucleotidic linkages (e.g., 1, 2, 3, 4, or 5, and/or less than 50%, 45%, 40%, 35%, 30%, 25%, 20%, 15%, 10%, or 5% f all chirally controlled internucleotidic linkages, or of all chiral internucleotidic linkages, or of all internucleotidic linkages in the oligonucleotide) being in the Rp configuration. In certain embodiments, all, essentially all or most of the internucleotidic linkages in a core are in the Sp configuration (e.g., about 50%-100%, 55%-100%, 60%-100%, 65%-100%, 70%-100%, 75%-100%, 80%-100%, 85%-100%, 90%-100%, 55%-95%, 60%-95%, 65%-95%, or about 55%, 60%, 65%, 70%, 75%, 80%, 85%, 90%, 95%, 97%, 99% r more of all chirally controlled internucleotidic linkages, or of all chiral internucleotidic linkages, or of all internucleotidic linkages, in the core) except for one or a minority of internucleotidic linkages (e.g., 1, 2, 3, 4, or 5, and/or less than 50%, 45%, 40%, 35%, 30%, 25%, 20%, 15%, 10%, or 5% f all chirally controlled internucleotidic linkages, or of all chiral internucleotidic linkages, or of all internucleotidic linkages, in the core) being in the Rp configuration. In certain embodiments, all, essentially all or most of the internucleotidic linkages in the core are a phosphoryl guanidine or a phosphorothioate in the Sp configuration (e.g., about 50%-100%, 55%-100%, 60%-100%, 65%-100%, 70%-100%, 75%-100%, 80%-100%, 85%-100%, 90%-100%, 55%-95%, 60%-95%, 65%-95%, or about 55%, 60%, 65%, 70%, 75%, 80%, 85%, 90%, 95%, 97%, 99% r more of all chirally controlled internucleotidic linkages, or of all chiral internucleotidic linkages, or of all internucleotidic linkages, in the core) except for one or a minority of internucleotidic linkages (e.g., 1, 2, 3, 4, or 5, and/or less than 50%, 45%, 40%, 35%, 30%, 25%, 20%, 15%, 10%, or 5% f all chirally controlled internucleotidic linkages, or of all chiral internucleotidic linkages, or of all internucleotidic linkages, in the core) being a phosphorothioate in the Rp configuration. In certain embodiments, each interucleotidic linkage in the core is a phosphoryl guanidine in the Sp configuration. In certain embodiments, each internucleotidic linkage in the core is a phosphorothioate in the Sp configuration except for one phosphorothioate in the Rp configuration. In certain embodiments, each internucleotidic linkage in the core is a phosphorothioate in the Sp configuration except for one phosphorothioate in the Rp configuration.

[1212] In certain embodiments, a ds oligonucleotide comprises one or more Rp internucleotidic linkages. In certain embodiments, a ds oligonucleotide comprises one and no more than one Rp internucleotidic linkages. In certain embodiments, a ds oligonucleotide comprises two or more Rp internucleotidic linkages. In certain embodiments, a ds oligonucleotide comprises three or more Rp internucleotidic linkages. In certain embodiments, a ds oligonucleotide comprises four or more Rp internucleotidic linkages. In certain embodiments, a ds oligonucleotide comprises five or more Rp internucleotidic linkages. In certain embodiments, about 5%-50% f all chirally controlled internucleotidic linkages in a ds oligonucleotide are Rp. In certain embodiments, about 5%-40% f all chirally controlled internucleotidic linkages in a ds oligonucleotide are Rp. In certain embodiments, about 10%-40% f all chirally controlled internucleotidic linkages in a ds oligonucleotide are Rp. In certain embodiments, about 15%-40% f all chirally controlled internucleotidic linkages in a ds oligonucleotide are Rp. In certain embodiments, about 20%-40% f all chirally controlled internucleotidic linkages in a ds oligonucleotide are Rp. In certain embodiments, about 25%-40% f all chirally controlled internucleotidic linkages in a ds oligonucleotide are Rp. In certain embodiments, about 30%-40% f all chirally controlled internucleotidic linkages in a ds oligonucleotide are Rp. In certain embodiments, about 35%-40% f all chirally controlled internucleotidic linkages in a ds oligonucleotide are Rp.

[1213] In certain embodiments, instead of an Rp internucleotidic linkage, a natural phosphate linkage may be similarly utilized, optionally with a modification, e.g., a sugar modification (e.g., a 5′-modification such as R^{5s} as described herein). In certain embodiments, a modification improves stability of a natural phosphate linkage.

[1214] In certain embodiments, the present disclosure provides a ds oligonucleotide having a pattern of backbone chiral centers as described herein. In certain embodiments, oligonucleotides in a chirally controlled ds oligonucleotide composition share a common pattern of backbone chiral centers as described herein.

[1215] In certain embodiments, at least about 25% f the internucleotidic linkages of a dsRNAi oligonucleotide are chirally controlled and have Sp linkage phosphorus. In certain embodiments, at least about 30% f the internucleotidic linkages of a ds oligonucleotide are chirally controlled and have Sp linkage phosphorus. In certain embodiments, at least about 40% f the internucleotidic linkages of a provided ds oligonucleotide are chirally controlled and have Sp linkage phosphorus. In certain embodiments, at least about 50% f the internucleotidic linkages of a provided ds oligonucleotide are chirally controlled and have Sp linkage phosphorus. In certain embodiments, at least about 60% f the internucleotidic linkages of a provided ds oligonucleotide are chirally controlled and have Sp linkage phosphorus. In certain embodiments, at least about 65% f the internucleotidic linkages of a provided ds oligonucleotide are chirally controlled and have Sp linkage phosphorus. In certain embodiments, at least about 70% f the internucleotidic linkages of a provided ds oligonucleotide are chirally controlled and have Sp linkage phosphorus. In certain embodiments, at least about 75% f the internucleotidic linkages of a provided ds oligonucleotide are chirally controlled and have Sp linkage phosphorus. In certain embodiments, at least about 80% f the internucleotidic linkages of a provided ds oligonucleotide are chirally controlled and have Sp linkage phosphorus. In certain embodiments, at least about 85% f the internucleotidic linkages of a provided ds oligonucleotide are chirally controlled and have Sp linkage phosphorus. In certain embodiments, at least about 90% f the internucleotidic linkages of a provided ds oligonucleotide are chirally controlled and have Sp linkage phosphorus. In certain embodiments, at least about 95% f the internucleotidic linkages of a provided ds oligonucleotide are chirally controlled and have Sp linkage phosphorus.

[1216] In certain embodiments, the present disclosure provides chirally controlled ds oligonucleotide compositions, e.g., chirally controlled dsRNAi oligonucleotide compositions, wherein the composition comprises a non-random or controlled level of a plurality of oligonucleotides, wherein oligonucleotides of the plurality share a common base sequence, and share the same configuration of linkage phosphorus independently at 1-50, 1-40, 1-30, 1-25, 1-20, 1-15, 1-10, 5-50, 5-40, 5-30, 5-25, 5-20, 5-15, 5-10, 1, 2, 3, 4, 5, 6, 7, 8, 9, 10, 11, 12, 13, 14, 15, 16, 17, 18, 19, 20, 21, 22, 23, 24, or 25 or more chiral internucleotidic linkages.

[1217] In certain embodiments, dsRNAi oligonucleotides comprise 2-30 chirally controlled internucleotidic linkages. In certain embodiments, provided ds oligonucleotide compositions comprise 5-30 chirally controlled internucleotidic linkages. In certain embodiments, provided ds oligonucleotide compositions comprise 10-30 chirally controlled internucleotidic linkages.

[1218] In certain embodiments, a percentage is about 5%-100%. In certain embodiments, a percentage is at least 50%, 55%, 60%, 65%, 70%, 75%, 80%, 85%, 90%, 95%, 965, 96%, 98%, or 99%. In certain embodiments, a percentage is about 5%, 10%, 15%, 20%, 25%, 30%, 35%, 40%, 45%, 50%, 55%, 60%, 65%, 70%, 75%, 80%, 85%, 90%, 95%, 965, 96%, 98%, or 99%.

[1219] In certain embodiments, a pattern of backbone chiral centers in a dsRNAi oligonucleotide comprises a pattern of i^{o}-i^{s}-i^{o}-i^{s}-i^{o}, i^{o}-i^{s}-i^{s}-i^{s}-i^{o}, i^{o}-i^{s}-i^{s}-i^{s}-i^{o}-i^{s}, i^{s}-i^{o}-i^{s}-i^{o}, i^{s}-i^{o}-i^{s}-i^{o}, i^{s}-i^{o}-i^{s}-i^{o}-i^{s}, i^{s}-i^{o}-i^{s}-i^{o}-i^{s}-i^{o}, i^{s}-i^{o}-i^{s}-i^{o}-i^{s}-i^{o}-i^{s}-i^{o}, i^{s}-i^{o}-i^{s}-i^{s}-i^{s}-i^{o}, i^{s}-i^{s}-i^{o}-i^{s}-i^{s}-i^{s}-i^{o}-i^{s}-i^{s}, i^{s}-i^{s}-i^{s}-i^{o}-i^{s}-i^{o}-i^{s}-i^{s}-i^{s}, i^{s}-i^{s}-i^{s}-i^{s}-i^{o}-i^{s}-i^{o}-i^{s}-i^{s}-i^{s}-i^{s}, i^{s}-i^{s}-i^{s}-i^{s}-i^{s}, i^{s}-i^{s}-i^{s}-i^{s}-i^{s}-i^{s}, i^{s}-i^{s}-i^{s}-i^{s}-i^{s}-i^{s}-i^{s}, i^{s}-i^{s}-i^{s}-i^{s}-i^{s}-i^{s}-i^{s}-i^{s}, i^{s}-i^{s}-i^{s}-i^{s}-i^{s}-i^{s}-i^{s}-i^{s}-i^{s}, or i^{r}-i^{r}-i^{r}, wherein i^{s} represents an internucleotidic linkage in the Sp configuration; i^{o} represents an achiral internucleotidic linkage; and i^{r} represents an internucleotidic linkage in the Rp configuration.

[1220] In certain embodiments, an internucleotidic linkage in the Sp configuration (having a Sp linkage phosphorus) is a phosphoryl guanidine internucleotidic linkage. In certain embodiments, an achiral internucleotidic linkage is a natural phosphate linkage. In certain embodiments, an internucleotidic linkage in the Rp configuration (having a Rp linkage phosphorus) is a phosphorothioate internucleotidic linkage. In certain embodiments, each internucleotidic linkage in the Sp configuration is a phosphoryl guanidine internucleotidic linkage. In certain embodiments, each achiral internucleotidic linkage is a natural phosphate linkage. In certain embodiments, each internucleotidic linkage in the Rp configuration is a phosphoryl guanidine internucleotidic linkage. In certain embodiments, each internucleotidic linkage in the Sp configuration is a phosphorothioate internucleotidic linkage, each achiral internucleotidic linkage is a natural phosphate linkage, and each internucleotidic linkage in the Rp configuration is a phosphoryl guanidine internucleotidic linkage. In certain embodiments, an internucleotidic linkage in the Sp configuration (having a Sp linkage phosphorus) is a phosphorothioate internucleotidic linkage. In certain embodiments, an achiral internucleotidic linkage is a natural phosphate linkage. In certain embodiments, an internucleotidic linkage in the Rp configuration (having a Rp linkage phosphorus) is a phosphorothioate internucleotidic linkage. In certain embodiments, each internucleotidic linkage in the Sp configuration is a phosphorothioate internucleotidic linkage. In certain embodiments, each achiral internucleotidic linkage is a natural phosphate linkage. In certain embodiments, each internucleotidic linkage in the Rp configuration is a phosphorothioate internucleotidic linkage. In certain embodiments, each internucleotidic linkage in the Sp configuration is a phosphorothioate internucleotidic linkage, each achiral internucleotidic linkage is a natural phosphate linkage, and each internucleotidic linkage in the Rp configuration is a phosphorothioate internucleotidic linkage.

[1221] In certain embodiments, dsRNAi oligonucleotides in chirally controlled oligonucleotide compositions each comprise different types of internucleotidic linkages. In certain embodiments, dsRNAi oligonucleotides comprise at least one natural phosphate linkage and at least one modified internucleotidic linkage. In certain embodiments, dsRNAi oligonucleotides comprise at least one natural phosphate linkage and at least two modified internucleotidic linkages. In certain embodiments, dsRNAi oligonucleotides comprise at least one natural phosphate linkage and at least three modified internucleotidic linkages. In certain embodiments, dsRNAi oligonucleotides comprise at least one natural phosphate linkage and at least four modified internucleotidic linkages. In certain embodiments, dsRNAi oligonucleotides comprise at least one natural phosphate linkage and at least five modified internucleotidic linkages. In certain embodiments, dsRNAi oligonucleotides comprise at least one natural phosphate linkage and 1, 2, 3, 4, 5, 6, 7, 8, 9, 10, 11, 12, 13, 14, 15, 16, 17, 18, 19, 20, 21, 22, 23, 24, or 25 modified internucleotidic linkages. In certain embodiments, a modified internucleotidic linkage is a phosphorothioate or a phosphoryl guanidine internucleotidic linkage. In certain embodiments, each modified internucleotidic linkage is a phosphorothioate or a phosphoryl guanidine internucleotidic linkage. In certain embodiments, a modified internucleotidic linkage is a phosphorothioate triester internucleotidic linkage. In certain embodiments, each modified interucleotidic linkage is a phosphorothioate or a phosphoryl guanidine triester internucleotidic linkage. In certain embodiments, RNAi oligonucleotides comprise at least one natural phosphate linkage and at least 2, 3, 4, 5, 6, 7, 8, 9, 10, 11, 12, 13, 14, 15, 16, 17, 18, 19, 20, 21, 22, 23, 24, or 25 consecutive modified internucleotidic linkages. In certain embodiments, RNAi oligonucleotides comprise at least one natural phosphate linkage and at least 2, 3, 4, 5, 6, 7, 8, 9, 10, 11, 12, 13, 14, 15, 16, 17, 18, 19, 20, 21, 22, 23, 24, or 25 consecutive phosphorothioate or a phosphoryl guanidine internucleotidic linkages. In certain embodiments, dsRNAi oligonucleotides comprise at least one natural phosphate linkage and at least 2, 3, 4, 5, 6, 7, 8, 9, 10, 11, 12, 13, 14, 15, 16, 17, 18, 19, 20, 21, 22, 23, 24, or 25 consecutive phosphorothioate or a phosphoryl guanidine triester internucleotidic linkages.

[1222] In certain embodiments, oligonucleotides in a chirally controlled ds oligonucleotide composition each comprise at least two internucleotidic linkages that have different stereochemistry and/or different P-modifications relative to one another. In certain embodiments, at least two internucleotidic linkages have different stereochemistry relative to one another, and the ds oligonucleotides each comprise a pattern of backbone chiral centers comprising alternating linkage phosphorus stereochemistry.

[1223] In certain embodiments, a linkage comprises a chiral auxiliary, which, for example, is used to control the stereoselectivity of a reaction, e.g., a coupling reaction in a ds oligonucleotide synthesis cycle. In certain embodiments, a phosphorothioate or a phosphoryl guanidine triester linkage does not comprise a chiral auxiliary. In certain embodiments, a phosphorothioate or a phosphoryl guanidine triester linkage is intentionally maintained until and/or during the administration of the oligonucleotide composition to a subject.

[1224] In certain embodiments, purity, particularly stereochemical purity, and particularly diastereomeric purity of many ds oligonucleotides and compositions thereof wherein all other chiral centers in the ds oligonucleotides but the chiral linkage phosphorus centers have been stereodefined (e.g., carbon chiral centers in the sugars, which are defined in, e.g., phosphoramidites for ds oligonucleotide synthesis), can be controlled by stereoselectivity (as appreciated by those skilled in this art, diastereoselectivity in many cases of ds oligonucleotide synthesis wherein the ds oligonucleotide comprise more than one chiral centers) at chiral linkage phosphorus in coupling steps when forming chiral internucleotidic linkages. In certain embodiments, a coupling step has a stereoselectivity (diastereoselectivity when there are other chiral centers) of 60% at the linkage phosphorus. After such a coupling step, the new internucleotidic linkage formed may be referred to have a 60% stereochemical purity (for ds oligonucleotides, typically diastereomeric purity in view of the existence of other chiral centers). In certain embodiments, each coupling step independently has a stereoselectivity of at least 60%. In certain embodiments, each coupling step independently has a stereoselectivity of at least 70%. In certain embodiments, each coupling step independently has a stereoselectivity of at least 80%. In certain embodiments, each coupling step independently has a stereoselectivity of at least 85%. In certain embodiments, each coupling step independently has a stereoselectivity of at least 90%. In certain embodiments, each coupling step independently has a stereoselectivity of at least 91%. In certain embodiments, each coupling step independently has a stereoselectivity of at least 92%. In certain embodiments, each coupling step independently has a stereoselectivity of at least 93%. In certain embodiments, each coupling step independently has a stereoselectivity of at least 94%. In certain embodiments, each coupling step independently has a stereoselectivity of at least 95%. In certain embodiments, each coupling step independently has a stereoselectivity of at least 96%. In certain embodiments, each coupling step independently has a stereoselectivity of at least 97%. In certain embodiments, each coupling step independently has a stereoselectivity of at least 98%. In certain embodiments, each coupling step independently has a stereoselectivity of at least 99%. In certain embodiments, each coupling step independently has a stereoselectivity of at least 99.5%. In certain embodiments, each coupling step independently has a stereoselectivity of virtually 100%. In certain embodiments, a coupling step has a stereoselectivity of virtually 100% in that each detectable product from the coupling step analyzed by an analytical method (e.g., NMR, HPLC, etc.) has the intended stereoselectivity. In certain embodiments, a chirally controlled internucleotidic linkage is typically formed with a stereoselectivity of at least 90%, 91%, 92%, 93%, 94%, 95%, 96%, 97%, 98%, 99.5% r virtually 100% (in certain embodiments, at least 90%; in certain embodiments, at least 95%; in certain embodiments, at least 96%; in certain embodiments, at least 97%; in certain embodiments, at least 98%; in certain embodiments, at least 99%). In certain embodiments, a chirally controlled internucleotidic linkage has a stereochemical purity (typically diastereomeric purity for oligonucleotides with multiple chiral centers) of at least 90%, 91%, 92%, 93%, 94%, 95%, 96%, 97%, 98%, 99.5% r virtually 100% (in certain embodiments, at least 90%; in certain embodiments, at least 95%; in certain embodiments, at least 96%; in certain embodiments, at least 97%; in certain embodiments, at least 98%; in certain embodiments, at least 99%) at its chiral linkage phosphorus. In certain embodiments, each chirally controlled internucleotidic linkage independently has a stereochemical purity (typically diastereomeric purity for oligonucleotides with multiple chiral centers) of at least 90%, 91%, 92%, 93%, 94%, 95%, 96%, 97%, 98%, 99.5% r virtually 100% (in certain embodiments, at least 90%; in certain embodiments, at least 95%; in certain embodiments, at least 96%; in certain embodiments, at least 97%; in certain embodiments, at least 98%; in certain embodiments, at least 99%) at its chiral linkage phosphorus. In certain embodiments, a non-chirally controlled internucleotidic linkage is typically formed with a stereoselectivity of less than 60%, 70%, 80%, 85%, or 90% (in certain embodiments, less than 60%; in certain embodiments, less than 70%; in certain embodiments, less than 80%; in certain embodiments, less than 85%; in certain embodiments, less than 90%). In certain embodiments, each non-chirally controlled internucleotidic linkage is independently formed with a stereoselectivity of less than 60%, 70%, 80%, 85%, or 90% (in certain embodiments, less than 60%; in certain embodiments, less than 70%; in certain embodiments, less than 80%; in certain embodiments, less than 85%; in certain embodiments, less than 90%). In certain embodiments, a non-chirally controlled internucleotidic linkage has a stereochemical purity (typically diastereomeric purity for oligonucleotides with multiple chiral centers) of less than 60%, 70%, 80%, 85%, or 90% (in certain embodiments, less than 60%; in certain embodiments, less than 70%; in certain embodiments, less than 80%; in certain embodiments, less than 85%; in certain embodiments, less than 90%) at its chiral linkage phosphorus. In certain embodiments, each non-chirally controlled internucleotidic linkage independently has a stereochemical purity (typically diastereomeric purity for oligonucleotides with multiple chiral centers) of less than 60%, 70%, 80%, 85%, or 90% (in certain embodiments, less than 60%; in certain embodiments, less than 70%; in certain embodiments, less than 80%; in certain embodiments, less than 85%; in certain embodiments, less than 90%) at its chiral linkage phosphorus.

[1225] In certain embodiments, at least 1, 2, 3, 4, 5, 6, 7, 8, 9, or 10 couplings of a monomer (as appreciated by those skilled in the art in certain embodiments a phosphoramidite for oligonucleotide synthesis) independently have a stereoselectivity less than about 60%, 70%, 80%, 85%, or 90% [for oligonucleotide synthesis, typically diastereoselectivity with respect to formed linkage phosphorus chiral center(s)]. In certain embodiments, at least one coupling has a stereoselectivity less than about 60%, 70%, 80%, 85%, or 90%. In certain embodiments, at least two couplings independently have a stereoselectivity less than about 60%, 70%, 80%, 85%, or 90%. In certain embodiments, at least three couplings independently have a stereoselectivity less than about 60%, 70%, 80%, 85%, or 90%. In certain embodiments, at least four couplings independently have a stereoselectivity less than about 60%, 70%, 80%, 85%, or 90%. In certain embodiments, at least five couplings independently have a stereoselectivity less than about 60%, 70%, 80%, 85%, or 90%. In certain embodiments, each coupling independently has a stereoselectivity less than about 60%, 70%, 80%, 85%, or 90%. In certain embodiments, each non-chirally controlled internucleotidic linkage is independently formed with a stereoselectivity less than about 60%, 70%, 80%, 85%, or 90%. In certain embodiments, a stereoselectivity is less than about 60%. In certain embodiments, a stereoselectivity is less than about 70%. In certain embodiments, a stereoselectivity is less than about 80%. In certain embodiments, a stereoselectivity is less than about 90%. In certain embodiments, at least 1, 2, 3, 4, 5, 6, 7, 8, 9, 10, 11, 12, 13, 14, 15, 16, 17, 18, 19, 20, 21, 22, 23, 24, or 25 couplings independently have a stereoselectivity less than about 90%. In certain embodiments, at least one coupling has a stereoselectivity less than about 90%. In certain embodiments, at least two couplings have a stereoselectivity less than about 90%. In certain embodiments, at least three couplings have a stereoselectivity less than about 90%. In certain embodiments, at least four couplings have a stereoselectivity less than about 90%. In certain embodiments, at least five couplings have a stereoselectivity less than about 90%. In certain embodiments, each coupling independently has a stereoselectivity less than about 90%. In certain embodiments, at least 1, 2, 3, 4, 5, 6, 7, 8, 9, 10, 11, 12, 13, 14, 15, 16, 17, 18, 19, 20, 21, 22, 23, 24, or 25 couplings independently have a stereoselectivity less than about 85%. In certain embodiments, each coupling independently has a stereoselectivity less than about 85%. In certain embodiments, at least 1, 2, 3, 4, 5, 6, 7, 8, 9, 10, 11, 12, 13, 14, 15, 16, 17, 18, 19, 20, 21, 22, 23, 24, or 25 couplings independently have a stereoselectivity less than about 80%. In certain embodiments, each coupling independently has a stereoselectivity less than about 80%. In certain embodiments, at least 1, 2, 3, 4, 5, 6, 7, 8, 9, 10, 11, 12, 13, 14, 15, 16, 17, 18, 19, 20, 21, 22, 23, 24, or 25 couplings independently have a stereoselectivity less than about 70%. In certain embodiments, each coupling independently has a stereoselectivity less than about 70%.

[1226] In certain embodiments, ds oligonucleotides and compositions of the present disclosure have high purity. In certain embodiments, ds oligonucleotides and compositions of the present disclosure have high stereochemical purity. In certain embodiments, a stereochemical purity, e.g., diastereomeric purity, is about 60%-100%. In certain embodiments, a diastereomeric purity, is about 60%-100%. In certain embodiments, the percentage is at least 60%, 65%, 70%, 75%, 80%, 85%, 90%, 91%, 92%, 93%, 93%, 95%, 96%, 97%, 98%, or 99%. In certain embodiments, the percentage is at least 80%, 85%, 90%, 91%, 92%, 93%, 93%, 95%, 96%, 97%, 98%, or 99%. In certain embodiments, the percentage is at least 90%, 91%, 92%, 93%, 93%, 95%, 96%, 97%, 98%, or 99%. In certain embodiments, a diastereomeric purity is at least 60%. In certain embodiments, a diastereomeric purity is at least 70%. In certain embodiments, a diastereomeric purity is at least 80%. In certain embodiments, a diastereomeric purity is at least 85%. In certain embodiments, a diastereomeric purity is at least 90%. In certain embodiments, a diastereomeric purity is at least 91%. In certain embodiments, a diastereomeric purity is at least 92%. In certain embodiments, a diastereomeric purity is at least 93%. In certain embodiments, a diastereomeric purity is at least 94%. In certain embodiments, a diastereomeric purity is at least 95%. In certain embodiments, a diastereomeric purity is at least 96%. In certain embodiments, a diastereomeric purity is at least 97%. In certain embodiments, a diastereomeric purity is at least 98%. In certain embodiments, a diastereomeric purity is at least 99%. In certain embodiments, a diastereomeric purity is at least 99.5%.

[1227] In certain embodiments, compounds of the present disclosure (e.g., oligonucleotides, chiral auxiliaries, etc.) comprise multiple chiral elements (e.g., multiple carbon and/or phosphorus (e.g., linkage phosphorus of chiral internucleotidic linkages) chiral centers). In certain embodiments, at least 1, 2, 3, 4, 5, 6, 7, 8, 9 or more chiral elements of a provided compound (e.g., a ds oligonucleotide) each independently have a diastereomeric purity as described herein. In certain embodiments, at least 1, 2, 3, 4, 5, 6, 7, 8, 9 or more chiral carbon centers of a provided compound each independently have a diastereomeric purity as described herein. In certain embodiments, at least 1, 2, 3, 4, 5, 6, 7, 8, 9 or more chiral phosphorus centers of a provided compound each independently have a diastereomeric purity as described herein. In certain embodiments, each chiral element independently has a diastereomeric purity as described herein. In certain embodiments, each chiral center independently has a diastereomeric purity as described herein. In certain embodiments, each chiral carbon center independently has a diastereomeric purity as described herein. In certain embodiments, each chiral phosphorus center independently has a diastereomeric purity as described herein. In certain embodiments, each chiral phosphorus center independently has a diastereomeric purity of at least 90%, 91%, 92%, 93%, 93%, 95%, 96%, 97%, 98%, or 99% r more.

[1228] As understood by a person having ordinary skill in the art, in certain embodiments, diastereoselectivity of a coupling or diastereomeric purity of a chiral linkage phosphorus center can be assessed through the diastereoselectivity of a dimer formation or diastereomeric purity of a dimer prepared under the same or comparable conditions, wherein the dimer has the same 5′- and 3′-nucleosides and internucleotidic linkage.

[1229] Various technologies can be utilized for identifying or confirming stereochemistry of chiral elements (e.g., configuration of chiral linkage phosphorus) and/or patterns of backbone chiral centers, and/or for assessing stereoselectivity (e.g., diastereoselectivity of couple steps in oligonucleotide synthesis) and/or stereochemical purity (e.g., diastereomeric purity of internucleotidic linkages, compounds (e.g., oligonucleotides), etc.). Example technologies include NMR [e.g., 1D (one-dimensional) and/or 2D (two-dimensional) ¹H-³¹P HETCOR (heteronuclear correlation spectroscopy)], HPLC, RP-HPLC, mass spectrometry, LC-MS, and cleavage of internucleotidic linkages by stereospecific nucleases, etc., which may be utilized individually or in combination. Example useful nucleases include benzonase, micrococcal nuclease, and svPDE (snake venom phosphodiesterase), which are specific for certain internucleotidic linkages with Rp linkage phosphorus (e.g., a Rp phosphorothioate linkage); and nuclease P1, mung bean nuclease, and nuclease S1, which are specific for internucleotidic linkages with Sp linkage phosphorus (e.g., a Sp phosphorothioate linkage). Without wishing to be bound by any particular theory, the present disclosure notes that, in at least some cases, cleavage of oligonucleotides by a particular nuclease may be impacted by structural elements, e.g., chemical modifications (e.g., 2′-modifications of a sugars), base sequences, or stereochemical contexts. For example, it is observed that in some cases, benzonase and micrococcal nuclease, which are specific for internucleotidic linkages with Rp linkage phosphorus, were unable to cleave an isolated Rp phosphorothioate internucleotidic linkage flanked by Sp phosphorothioate internucleotidic linkages.

[1230] In certain embodiments, ds oligonucleotides sharing a common base sequence, a common pattern of backbone linkages, and a common pattern of backbone chiral centers share a common pattern of backbone phosphorus modifications and a common pattern of base modifications. In certain embodiments, sd oligonucleotide compositions sharing a common base sequence, a common pattern of backbone linkages, and a common pattern of backbone chiral centers share a common pattern of backbone phosphorus modifications and a common pattern of nucleoside modifications. In certain embodiments, ds oligonucleotides share a common base sequence, a common pattern of backbone linkages, and a common pattern of backbone chiral centers have identical structures.

[1231] In certain embodiments, the present disclosure provides a ds oligonucleotide composition comprising a plurality of oligonucleotides capable of directing RNAi knockdown, wherein ds oligonucleotides of the plurality are of a particular ds oligonucleotide type, which composition is chirally controlled in that it is enriched, relative to a substantially racemic preparation of ds oligonucleotides having the same base sequence, for ds oligonucleotides of the particular ds oligonucleotide type.

[1232] In certain embodiments, ds oligonucleotides having a common base sequence, a common pattern of backbone linkages, and a common pattern of backbone chiral centers have a common pattern of backbone phosphorus modifications and a common pattern of base modifications. In certain embodiments, ds oligonucleotides having a common base sequence, a common pattern of backbone linkages, and a common pattern of backbone chiral centers have a common pattern of backbone phosphorus modifications and a common pattern of nucleoside modifications. In certain embodiments, ds oligonucleotides having a common base sequence, a common pattern of backbone linkages, and a common pattern of backbone chiral centers have identical structures.

[1233] In certain embodiments, the present disclosure provides dsRNAi oligonucleotide compositions comprising a plurality of oligonucleotides. In certain embodiments, the present disclosure provides chirally controlled oligonucleotide compositions of dsRNAi oligonucleotides. In certain embodiments, the present disclosure provides a dsRNAi oligonucleotide whose base sequence is or is complementary to a dsRNAi sequence disclosed herein or a portion thereof (e.g., various bases sequences in Table 1, wherein each T may be independently replaced with U and vice versa). In certain embodiments, the present disclosure provides a dsRNAi oligonucleotide whose base sequence comprises a base sequence that is or is complementary to a dsRNAi sequence disclosed herein or a portion thereof (e.g., various bases sequences in Table 1). In certain embodiments, the present disclosure provides a dsRNAi oligonucleotide whose base sequence comprises 15 contiguous bases of a base sequence that is or is complementary to a dsRNAi sequence disclosed herein or a portion thereof (e.g., various bases sequences in Table 1, wherein each T may be independently replaced with U and vice versa). In certain embodiments, the present disclosure provides a dsRNAi oligonucleotide which has a base sequence comprising 15 contiguous bases with 0-3 mismatches of a base sequence that is or is complementary to a dsRNAi sequence disclosed herein or a portion thereof (e.g., various bases sequences in Table 1, wherein each T may be independently replaced with U and vice versa). In certain embodiments, the present disclosure provides a dsRNAi oligonucleotide composition wherein the dsRNAi oligonucleotides comprise at least one chiral internucleotidic linkage which is not chirally controlled. In certain embodiments, the present disclosure provides a dsRNAi oligonucleotide comprising a non-chirally controlled chiral internucleotidic linkage, wherein the base sequence of the dsRNAi oligonucleotide comprises a base sequence that is or is complementary to a dsRNAi sequence disclosed herein or a portion thereof (e.g., various bases sequences in Table 1, wherein each T may be independently replaced with U and vice versa). In certain embodiments, the present disclosure provides a dsRNAi oligonucleotide composition comprising a non-chirally controlled chiral internucleotidic linkage, wherein the base sequence of the dsRNAi oligonucleotide is a base sequence that is or is complementary to a dsRNAi sequence disclosed herein or a portion thereof (e.g., various bases sequences in Table 1, wherein each T may be independently replaced with U and vice versa). In certain embodiments, the present disclosure provides a RNAi oligonucleotide comprising a non-chirally controlled chiral internucleotidic linkage, wherein the base sequence of the dsRNAi oligonucleotide comprises 15 contiguous bases of a base sequence that is or is complementary to a dsRNAi sequence disclosed herein or a portion thereof (e.g., various bases sequences in Table 1, wherein each T may be independently replaced with U and vice versa). In certain embodiments, the present disclosure provides a dsRNAi oligonucleotide comprising a non-chirally controlled chiral internucleotidic linkage, wherein the base sequence of the dsRNAi oligonucleotides comprises 15 contiguous bases with 0-3 mismatches of a base sequence that is or is complementary to a RNAi sequence disclosed herein or a portion thereof (e.g., various bases sequences in Table 1, wherein each T may be independently replaced with U and vice versa). In certain embodiments, the present disclosure provides a dsRNAi oligonucleotide comprising a chirally controlled chiral internucleotidic linkage, wherein the base sequence of the dsRNAi oligonucleotide comprises a base sequence that is or is complementary to a dsRNAi sequence disclosed herein or a portion thereof (e.g., various bases sequences in Table 1, wherein each T may be independently replaced with U and vice versa). In certain embodiments, the present disclosure provides a dsRNAi oligonucleotide composition comprising a chirally controlled chiral internucleotidic linkage, wherein the base sequence of the RNAi oligonucleotide is a base sequence that is or is complementary to a dsRNAi sequence disclosed herein or a portion thereof (e.g., various bases sequences in Table 1, wherein each T may be independently replaced with U and vice versa). In certain embodiments, the present disclosure provides a dsRNAi oligonucleotide comprising a chirally controlled chiral internucleotidic linkage, wherein the base sequence of the dsRNAi oligonucleotide comprises 15 contiguous bases of a base sequence that is or is complementary to a dsRNAi sequence disclosed herein or a portion thereof (e.g., various bases sequences in Table 1, wherein each T may be independently replaced with U and vice versa). In certain embodiments, the present disclosure provides a RNAi oligonucleotide comprising a chirally controlled chiral internucleotidic linkage, wherein the base sequence of the RNAi oligonucleotides comprises 15 contiguous bases with 0-3 mismatches of abase sequence that is or is complementary to a dsRNAi sequence disclosed herein or a portion thereof (e.g., various bases sequences in Table 1, wherein each T may be independently replaced with U and vice versa).

[1234] In certain embodiments, ds oligonucleotides of the same ds oligonucleotide type have a common pattern of backbone phosphorus modifications and a common pattern of nucleoside modifications. In certain embodiments, ds oligonucleotides of the same ds oligonucleotide type have a common pattern of sugar modifications. In certain embodiments, ds oligonucleotides of the same ds oligonucleotide type have a common pattern of base modifications. In certain embodiments, ds oligonucleotides of the same ds oligonucleotide type have a common pattern of nucleoside modifications. In certain embodiments, ds oligonucleotides of the same ds oligonucleotide type have the same constitution. In certain embodiments, ds oligonucleotides of the same ds oligonucleotide type are identical. In certain embodiments, ds oligonucleotides of the same ds oligonucleotide type are of the same ds oligonucleotide (as those skilled in the art will appreciate, such ds oligonucleotides may each independently exist in one of the various forms of the ds oligonucleotide, and may be the same, or different forms of the ds oligonucleotide). In certain embodiments, ds oligonucleotides of the same ds oligonucleotide type are each independently of the same ds oligonucleotide or a pharmaceutically acceptable salt thereof. In certain embodiments, a plurality of ds oligonucleotides or ds oligonucleotides of a particular ds oligonucleotide type in a provided ds oligonucleotide composition are sdRNAi oligonucleotides. In certain embodiments, the present disclosure provides a chirally controlled dsRNAi oligonucleotide composition comprising a plurality of dsRNAi oligonucleotides, wherein the ds oligonucleotides share:
[1235] 1) a common base sequence;
[1236] 2) a common pattern of backbone linkages; and
[1237] 3) the same linkage phosphorus stereochemistry at one or more chiral internucleotidic linkages (chirally controlled internucleotidic linkages), wherein the composition is enriched, relative to a substantially racemic preparation of oligonucleotides sharing the common base sequence and pattern of backbone linkages, for oligonucleotides of the plurality.

[1238] In certain embodiments, as used herein, “one or more” or “at least one” is 1-50, 1-40, 1-30, 1-25, 1-20, 1-15, 1-10, 5-50, 5-40, 5-30, 5-25, 5-20, 5-15, 5-10, 1, 2, 3, 4, 5, 6, 7, 8, 9, 10, 11, 12, 13, 14, 15, 16, 17, 18, 19, 20, or more.

[1239] In certain embodiments, a ds oligonucleotide type is further defined by: 4) additional chemical moiety, if any.

[1240] In certain embodiments, the percentage is at least about 10%. In certain embodiments, the percentage is at least about 20%. In certain embodiments, the percentage is at least about 30%. In certain embodiments, the percentage is at least about 40%. In certain embodiments, the percentage is at least about 50%. In certain embodiments, the percentage is at least about 60%. In certain embodiments, the percentage is at least about 70%. In certain embodiments, the percentage is at least about 75%. In certain embodiments, the percentage is at least about 80%. In certain embodiments, the percentage is at least about 85%. In certain embodiments, the percentage is at least about 90%. In certain embodiments, the percentage is at least about 91%. In certain embodiments, the percentage is at least about 92%. In certain embodiments, the percentage is at least about 93%. In certain embodiments, the percentage is at least about 94%. In certain embodiments, the percentage is at least about 95%. In certain embodiments, the percentage is at least about 96%. In certain embodiments, the percentage is at least about 97%. In certain embodiments, the percentage is at least about 98%. In certain embodiments, the percentage is at least about 99%. In certain embodiments, the percentage is or is greater than (DS)^{nc}, wherein DS and nc are each independently as described in the present disclosure.

[1241] In certain embodiments, a plurality of ds oligonucleotides, e.g., dsRNAi oligonucleotides, share the same constitution. In certain embodiments, a plurality of oligonucleotides, e.g., dsRNAi oligonucleotides, are identical (the same stereoisomer). In certain embodiments, a chirally controlled ds oligonucleotide composition, e.g., a chirally controlled dsRNAi oligonucleotide composition, is a stereopure ds oligonucleotide composition wherein ds oligonucleotides of the plurality are identical (the same stereoisomer), and the composition does not contain any other stereoisomers. Those skilled in the art will appreciate that one or more other stereoisomers may exist as impurities as processes, selectivities, purifications, etc. may not achieve completeness.

[1242] In certain embodiments, a provided composition is characterized in that when it is contacted with a target nucleic acid (e.g., a transcript (e.g., pre-mRNA, mature mRNA, other types of RNA, etc. that hybridizes with oligonucleotides of the composition)), levels of the target nucleic acid and/or a product encoded thereby is reduced compared to that observed under a reference condition. In certain embodiments, a reference condition is selected from the group consisting of absence of the composition, presence of a reference composition, and combinations thereof. In certain embodiments, a reference condition is absence of the composition. In certain embodiments, a reference condition is presence of a reference composition. In certain embodiments, a reference composition is a composition whose oligonucleotides do not hybridize with the target nucleic acid. In certain embodiments, a reference composition is a composition whose oligonucleotides do not comprise a sequence that is sufficiently complementary to the target nucleic acid. In certain embodiments, a provided composition is a chirally controlled oligonucleotide composition and a reference composition is a non-chirally controlled oligonucleotide composition which is otherwise identical but is not chirally controlled (e.g., a racemic preparation of oligonucleotides of the same constitution as oligonucleotides of a plurality in the chirally controlled oligonucleotide composition).

[1243] In certain embodiments, the present disclosure provides a chirally controlled dsRNAi oligonucleotide composition comprising a plurality of dsRNAi oligonucleotides capable of directing RNAi knockdown, wherein the oligonucleotides share:
[1244] 1) a common base sequence,
[1245] 2) a common pattern of backbone linkages, and
[1246] 3) the same linkage phosphorus stereochemistry at one or more (e.g., 1-50, 1-40, 1-30, 1-25, 1-20, 1-15, 1-10, 5-50, 5-40, 5-30, 5-25, 5-20, 5-15, 5-10, 1, 2, 3, 4, 5, 6, 7, 8, 9, 10, 11, 12, 13, 14, 15, 16, 17, 18, 19, 20, or more) chiral internucleotidic linkages (chirally controlled internucleotidic linkages),
[1247] wherein the composition is enriched, relative to a substantially racemic preparation of oligonucleotides sharing the common base sequence and pattern of backbone linkages, for oligonucleotides of the plurality, the ds oligonucleotide composition being characterized in that, when it is contacted with a transcript in a dsRNAi knockdown system, knockdown of the transcript is improved relative to that observed under reference conditions selected from the group consisting of absence of the composition, presence of a reference composition, and combinations thereof.

[1248] As noted above and understood in the art, in certain embodiments, the base sequence of a ds oligonucleotide may refer to the identity and/or modification status of nucleoside residues (e.g., of sugar and/or base components, relative to standard naturally occurring nucleotides such as adenine, cytosine, guanosine, thymine, and uracil) in the ds oligonucleotide and/or to the hybridization character (i.e., the ability to hybridize with particular complementary residues) of such residues.

[1249] As demonstrated herein, ds oligonucleotide structural elements (e.g., patterns of sugar modifications, backbone linkages, backbone chiral centers, backbone phosphorus modifications, etc.) and combinations thereof can provide surprisingly improved properties and/or bioactivities.

[1250] In certain embodiments, ds oligonucleotide compositions are capable of reducing the expression, level and/or activity of a target gene or a gene product thereof. In certain embodiments, ds oligonucleotide compositions are capable of reducing in the expression, level and/or activity of a target gene or a gene product thereof by sterically blocking translation after annealing to a target gene mRNA, by cleaving mRNA (pre-mRNA or mature mRNA), and/or by altering or interfering with mRNA splicing. In certain embodiments, provided dsRNAi oligonucleotide compositions are capable of reducing the expression, level and/or activity of a target gene or a gene product thereof. In certain embodiments, provided dsRNAi oligonucleotide compositions are capable of reducing in the expression, level and/or activity of a target gene or a gene product thereof by sterically blocking translation after annealing to a target gene mRNA, by cleaving target mRNA (pre-mRNA or mature mRNA), and/or by altering or interfering with mRNA splicing.

[1251] In certain embodiments, a ds oligonucleotide composition, e.g., a dsdRNAi oligonucleotide composition, is a substantially pure preparation of a single ds oligonucleotide stereoisomer, e.g., a dsRNAi oligonucleotide stereoisomer, in that oligonucleotides in the composition that are not of the oligonucleotide stereoisomer are impurities from the preparation process of said ds oligonucleotide stereoisomer, in some case, after certain purification procedures.

[1252] In certain embodiments, the present disclosure provides ds oligonucleotides and oligonucleotide compositions that are chirally controlled, and in certain embodiments, stereopure. For instance, in certain embodiments, a provided composition contains non-random or controlled levels of one or more individual oligonucleotide types as described herein. In certain embodiments, oligonucleotides of the same oligonucleotide type are identical.

### 3. Sugars

[1253] Various sugars, including modified sugars, can be utilized in accordance with the present disclosure. In certain embodiments, the present disclosure provides sugar modifications and patterns thereof optionally in combination with other structural elements (e.g., internucleotidic linkage modifications and patterns thereof, pattern of backbone chiral centers thereof, etc.) that when incorporated into oligonucleotides can provide improved properties and/or activities.

[1254] The most common naturally occurring nucleosides comprise ribose sugars (e.g., in RNA) or deoxyribose sugars (e.g., in DNA) linked to the nucleobases adenosine (A), cytosine (C), guanine (G), thymine (T) or uracil (U). In certain embodiments, a sugar, e.g., various sugars in many oligonucleotides in Table 1 (unless otherwise notes), is a natural DNA sugar (in DNA nucleic acids or oligonucleotides, having the structure of

[chemical structure]

wherein a nucleobase is attached to the 1′ position, and the 3′ and 5′ positions are connected to internucleotidic linkages (as appreciated by those skilled in the art, if at the 5′-end of a ds oligonucleotide, the 5′ position may be connected to a 5′-end group (e.g., —OH), and if at the 3′-end of a ds oligonucleotide, the 3′ position may be connected to a 3′-end group (e.g., —OH). In certain embodiments, a sugar is a natural RNA sugar (in RNA nucleic acids or oligonucleotides, having the structure of

[chemical structure]

wherein a nucleobase is attached to the 1′ position, and the 3′ and 5′ positions are connected to internucleotidic linkages (as appreciated by those skilled in the art, if at the 5′-end of a ds oligonucleotide, the 5′ position may be connected to a 5′-end group (e.g., —OH), and if at the 3′-end of a ds oligonucleotide, the 3′ position may be connected to a 3′-end group (e.g., —OH). In certain embodiments, a sugar is a modified sugar in that it is not a natural DNA sugar or a natural RNA sugar. Among other things, modified sugars may provide improved stability. In certain embodiments, modified sugars can be utilized to alter and/or optimize one or more hybridization characteristics. In certain embodiments, modified sugars can be utilized to alter and/or optimize target recognition. In certain embodiments, modified sugars can be utilized to optimize Tm. In certain embodiments, modified sugars can be utilized to improve oligonucleotide activities.

[1255] Sugars can be bonded to internucleotidic linkages at various positions. As non-limiting examples, internucleotidic linkages can be bonded to the 2′, 3′, 4′ or 5′ positions of sugars. In certain embodiments, as most commonly in natural nucleic acids, an internucleotidic linkage connects with one sugar at the 5′ position and another sugar at the 3′ position unless otherwise indicated.

[1256] In certain embodiments, a sugar is an optionally substituted natural DNA or RNA sugar. In certain embodiments, a sugar is optionally substituted

[chemical structure]

In certain embodiments, the 2′ position is optionally substituted. In certain embodiments, a sugar is

[chemical structure]

[1257] In certain embodiments, a sugar has the structure of

[chemical structure]

wherein each of R^{1s}, R^{2s}, R^{3s}, R^{4s}, and R^{5s} is independently —H, a suitable substituent or suitable sugar modification (e.g., those described in U.S. Pat. Nos. 9,394,333, 9,744,183, 9,605,019, 9,982,257, US 20170037399, US 20180216108, US 20180216107, U.S. Pat. No. 9,598,458, WO 2017/062862, WO 2018/067973, WO 2017/160741, WO 2017/192679, WO 2017/210647, WO 2018/098264, WO 2018/022473, WO 2018/223056, WO 2018/223073, WO 2018/223081, WO 2018/237194, WO 2019/032607, WO2019/032612, WO 2019/055951, and/or WO 2019/075357, the substituents, sugar modifications, descriptions of R^{1s}, R^{2s}, R^{3s}, R^{4s}, and R^{5s}, and modified sugars of each of which are independently incorporated herein by reference). In certain embodiments, a sugar has the structure of

[chemical structure]

In certain embodiments, R^{4s} is —H. In certain embodiments, a sugar has the structure of

[chemical structure]

wherein R^{2s} is —H, halogen, or —OR, wherein R is optionally substituted C₁₋₆ aliphatic. In certain embodiments, R^{2s} is —H. In certain embodiments, R^{2s} is —F. In certain embodiments, R^{2s} is —OMe. In certain embodiments, R^{2s} is —OCH₂CH₂OMe.

[1258] In certain embodiments, a sugar has the structure of

[chemical structure]

wherein R^{2s} and R^{4s} are taken together to form -L^{s}-, wherein L^{s} is a covalent bond or optionally substituted bivalent C₁₋₆ aliphatic or heteroaliphatic having 1-4 heteroatoms. In certain embodiments, each heteroatom is independently selected from nitrogen, oxygen or sulfur). In certain embodiments, L^{s} is optionally substituted C₂O—CH₂—C₄. In certain embodiments, L^{s} is C₂O—CH₂—C₄. In certain embodiments, L^{s} is C2-O—(R)—CH(CH₂CH₃)—C₄. In certain embodiments, L^{s} is C₂—O—(S)—CH(CH₂CH₃)—C₄.

[1259] In certain embodiments, a modified sugar contains one or more substituents at the 2′ position (typically one substituent, and often at the axial position) independently selected from —F; —CF₃, —CN, —N₃, —NO, —NO₂, —OR′, —SR′, or —N(R′)₂, wherein each R′ is independently optionally substituted C₁₋₁₀ aliphatic; —O—(C₁-C₁₀ alkyl), —S—(C₁-C₁₀ alkyl), —NH—(C₁-C₁₀ alkyl), or —N(C₁-C₁₀ alkyl)₂; —O—(C₂-C₁₀ alkenyl), —S—(C₂-C₁₀ alkenyl), —NH—(C₂-C₁₀ alkenyl), or —N(C₂-C₁₀ alkenyl)₂; —O—(C₂-C₁₀ alkynyl), —S—(C₂-C₁₀ alkynyl), —NH—(C₂-C₁₀ alkynyl), or —N(C₂-C₁₀ alkynyl)₂; or —O—(C₁-C₁₀ alkylene)-O—(C₁-C₁₀ alkyl), —O—(C₁-C₁₀ alkylene)-NH—(C₁-C₁₀ alkyl) or —O—(C₁-C₁₀ alkylene)-NH(C₁-C₁₀ alkyl)₂, —NH—(C₁-C₁₀ alkylene)-O—(C₁-C₁₀ alkyl), or —N(C₁-C₁₀ alkyl)-(C₁-C₁₀ alkylene)-O—(C₁-C₁₀ alkyl), wherein each of the alkyl, alkylene, alkenyl and alkynyl is independently and optionally substituted. In certain embodiments, a substituent is —O(CH₂)ₙOCH₃, —O(CH₂)ₙNH₂, MOE, DMAOE, or DMAEOE, wherein n is from 1 to about 10.

[1260] In certain embodiments, the 2′-OH of a ribose is replaced with a group selected from —H, —F; —CF₃, —CN, —N₃, —NO, —NO₂, —OR′, —SR′, or —N(R′)₂, wherein each R′ is independently described in the present disclosure; —O—(C₁-C₁₀ alkyl), —S—(C₁-C₁₀ alkyl), —NH—(C₁-C₁₀ alkyl), or —N(C₁-C₁₀ alkyl)₂; —O—(C₂-C₁₀ alkenyl), —S—(C₂-C₁₀ alkenyl), —NH—(C₂-C₁₀ alkenyl), or —N(C₂-C₁₀ alkenyl)₂; —O—(C₂-C₁₀ alkynyl), —S—(C₂-C₁₀ alkynyl), —NH—(C₂-C₁₀ alkynyl), or —N(C₂-C₁₀ alkynyl)₂; or —O—(C₁-C₁₀ alkylene)-O—(C₁-C₁₀ alkyl), —O—(C₁-C₁₀ alkylene)-NH—(C₁-C₁₀ alkyl) or —O—(C₁-C₁₀ alkylene)-NH(C₁-C₁₀ alkyl)₂, —NH—(C₁-C₁₀ alkylene)-O—(C₁-C₁₀ alkyl), or —N(C₁-C₁₀ alkyl)-(C₁—C₁₀ alkylene)-O—(C₁-C₁₀ alkyl), wherein each of the alkyl, alkylene, alkenyl and alkynyl is independently and optionally substituted. In certain embodiments, the 2′-OH is replaced with —H (deoxyribose). In certain embodiments, the 2′-OH is replaced with —F. In certain embodiments, the 2′-OH is replaced with —OR′. In certain embodiments, the 2′-OH is replaced with —OMe. In certain embodiments, the 2′-OH is replaced with —OCH₂CH₂OMe.

[1261] In certain embodiments, a sugar modification is a 2′-modification. Commonly used 2′-modifications include but are not limited to 2′-OR, wherein R is optionally substituted C₁₋₆ aliphatic. In certain embodiments, a modification is 2′-OR, wherein R is optionally substituted C₁₋₆ alkyl. In certain embodiments, a modification is 2′-OMe. In certain embodiments, a modification is 2′-MOE. In certain embodiments, a 2′-modification is S-cEt. In certain embodiments, a modified sugar is an LNA sugar. In certain embodiments, a 2′-modification is —F.

[1262] In certain embodiments, a sugar modification replaces a sugar moiety with another cyclic or acyclic moiety. Examples of such moieties are widely known in the art, including but not limited to those used in morpholino (optionally with its phosphorodiamidate linkage), glycol nucleic acids, etc.

[1263] In certain embodiments, one or more of the sugars of an ATXN3 oligonucleotide are modified. In certain embodiments, each sugar of a ds oligonucleotide is independently modified. In certain embodiments, a modified sugar comprises a 2′-modification. In certain embodiments, each modified sugar independently comprises a 2′-modification. In certain embodiments, a 2′-modification is 2′-OR, wherein R is optionally substituted C₁₋₆ aliphatic. In certain embodiments, a 2′-modification is a 2′-O—C16 lipid modification. In certain embodiments, a 2′-modification is a 2′-OMe. In certain embodiments, a 2′-modification is a 2′-MOE. In certain embodiments, a 2′-modification is an LNA sugar modification. In certain embodiments, a 2′-modification is 2′-F. In certain embodiments, each sugar modification is independently a 2′-modification. In certain embodiments, each sugar modification is independently 2′-OR. In certain embodiments, each sugar modification is independently 2′-OR, wherein R is optionally substituted C₁₋₆ alkyl. In certain embodiments, each sugar modification is a 2′-O—C16 lipid modification. In certain embodiments, each sugar modification is 2′-OMe. In certain embodiments, each sugar modification is 2′-MOE. In certain embodiments, each sugar modification is independently 2′-OMe, a 2′-O—C16 lipid modification or 2′-MOE. In certain embodiments, each sugar modification is independently 2′-OMe, 2′-MOE, or a LNA sugar.

[1264] In certain embodiments, a modified sugar comprises a 5′-modification. In certain embodiments, each modified sugar independently comprises a 5′-modification. In certain embodiments, a 5′-modification is 5′-alkyl modification. In certain embodiments, a 5′-alkyl modification is a 5′-methyl modification. In particular embodiments, a 5′-methyl modification is a 5′-(R)-methyl modification. In certain embodiments, a 5′-methyl modification is a 5′-(S)-methyl modification.

[1265] As those skilled in the art will appreciate, modifications of sugars, nucleobases, internucleotidic linkages, etc. can and are often utilized in combination in oligonucleotides, e.g., see various oligonucleotides in Table 1. For example, a combination of sugar modification and nucleobase modification is 2′-F (sugar) 5-methyl (nucleobase) modified nucleosides. In certain embodiments, a combination is replacement of a ribosyl ring oxygen atom with S and substitution at the 2′-position.

[1266] In certain embodiments, a sugar is one described in U.S. Pat. Nos. 9,394,333, 9,744,183, 9,605,019, 9,598,458, 9,982,257, U.S. Ser. No. 10/160,969, U.S. Ser. No. 10/479,995, US 2020/0056173, US 2018/0216107, US 2019/0127733, U.S. Ser. No. 10/450,568, US 2019/0077817, US 2019/0249173, US 2019/0375774, WO 2018/223056, WO 2018/223073, WO 2018/223081, WO 2018/237194, WO 2019/032607, WO 2019/055951, WO 2019/075357, WO 2019/200185, WO 2019/217784, and/or WO 2019/032612, the sugars of each of which is incorporated herein by reference.

[1267] Various additional sugars useful for preparing oligonucleotides or analogs thereof are known in the art and may be utilized in accordance with the present disclosure.

### 4. Nucleobases

[1268] Various nucleobases may be utilized in provided ds oligonucleotides in accordance with the present disclosure. In certain embodiments, a nucleobase is a natural nucleobase, the most commonly occurring ones being A, T, C, G and U. In certain embodiments, a nucleobase is a modified nucleobase in that it is not A, T, C, G or U. In certain embodiments, a nucleobase is optionally substituted A, T, C, G or U, or a substituted tautomer of A T, C, G or U. In certain embodiments, a nucleobase is optionally substituted A, T, C, G or U, e.g., 5mC, 5-hydroxymethyl C, etc. In certain embodiments, a nucleobase is alkyl-substituted A, T, C, G or U. In certain embodiments, a nucleobase is A. In certain embodiments, a nucleobase is T. In certain embodiments, a nucleobase is C. In certain embodiments, a nucleobase is G. In certain embodiments, a nucleobase is U. In certain embodiments, a nucleobase is 5mC. In certain embodiments, a nucleobase is substituted A, T, C, G or U. In certain embodiments, a nucleobase is a substituted tautomer of A, T, C, G or U. In certain embodiments, substitution protects certain functional groups in nucleobases to minimize undesired reactions during oligonucleotide synthesis. Suitable technologies for nucleobase protection in oligonucleotide synthesis are widely known in the art and may be utilized in accordance with the present disclosure. In certain embodiments, modified nucleobases improves properties and/or activities of ds oligonucleotides. For example, in many cases, 5mC may be utilized in place of C to modulate certain undesired biological effects, e.g., immune responses. In certain embodiments, when determining sequence identity, a substituted nucleobase having the same hydrogen-bonding pattern is treated as the same as the unsubstituted nucleobase, e.g., 5mC may be treated the same as C [e.g., a ds oligonucleotide having 5mC in place of C (e.g., AT5mCG) is considered to have the same base sequence as a ds oligonucleotide having C at the corresponding location(s) (e.g., ATCG)].

[1269] In certain embodiments, a ds oligonucleotide comprises one or more A, T, C, G or U. In certain embodiments, a ds oligonucleotide comprises one or more optionally substituted A, T, C, G or U. In certain embodiments, a ds oligonucleotide comprises one or more 5-methylcytidine, 5-hydroxymethylcytidine, 5-formylcytosine, or 5-carboxylcytosine. In certain embodiments, a ds oligonucleotide comprises one or more 5-methylcytidine. In certain embodiments, each nucleobase in a ds oligonucleotide is selected from the group consisting of optionally substituted A, T, C, G and U, and optionally substituted tautomers of A, T, C, G and U.

[1270] In certain embodiments, each nucleobase in a ds oligonucleotide is optionally protected A, T, C, G and U. In certain embodiments, each nucleobase in a ds oligonucleotide is optionally substituted A, T, C, G or U. In certain embodiments, each nucleobase in a ds oligonucleotide is selected from the group consisting of A, T, C, G, U, and 5mC.

[1271] In certain embodiments, a nucleobase is optionally substituted 2AP or DAP. In certain embodiments, a nucleobase is optionally substituted 2AP. In certain embodiments, a nucleobase is optionally substituted DAP. In certain embodiments, a nucleobase is 2AP. In certain embodiments, a nucleobase is DAP.

[1272] In certain embodiments, a nucleobase is a natural nucleobase or a modified nucleobase derived from a natural nucleobase. Examples include uracil, thymine, adenine, cytosine, and guanine optionally having their respective amino groups protected by acyl protecting groups, 2-fluorouracil, 2-fluorocytosine, 5-bromouracil, 5-iodouracil, 2,6-diaminopurine, azacytosine, pyrimidine analogs such as pseudoisocytosine and pseudouracil and other modified nucleobases such as 8-substituted purines, xanthine, or hypoxanthine (the latter two being the natural degradation products). Certain examples of modified nucleobases are disclosed in Chiu and Rana, R N A, 2003, 9, 1034-1048, Limbach et al. Nucleic Acids Research, 1994, 22, 2183-2196 and Revankar and Rao, Comprehensive Natural Products Chemistry, vol. 7, 313. In certain embodiments, a modified nucleobase is substituted uracil, thymine, adenine, cytosine, or guanine. In certain embodiments, a modified nucleobase is a functional replacement, e.g., in terms of hydrogen bonding and/or base pairing, of uracil, thymine, adenine, cytosine, or guanine. In certain embodiments, a nucleobase is optionally substituted uracil, thymine, adenine, cytosine, 5-methylcytosine, or guanine. In certain embodiments, a nucleobase is uracil, thymine, adenine, cytosine, 5-methylcytosine, or guanine.

[1273] In certain embodiments, a provided ds oligonucleotide comprises one or more 5-methylcytosine. In certain embodiments, the present disclosure provides a ds oligonucleotide whose base sequence is disclosed herein, e.g., in Table 1, wherein each T may be independently replaced with U and vice versa, and each cytosine is optionally and independently replaced with 5-methylcytosine or vice versa. As appreciated by those skilled in the art, in certain embodiments, 5mC may be treated as C with respect to base sequence of an oligonucleotide—such oligonucleotide comprises a nucleobase modification at the C position (e.g., see various oligonucleotides in Table 1). In description of oligonucleotides, typically unless otherwise noted, nucleobases, sugars and internucleotidic linkages are non-modified.

[1274] In certain embodiments, a modified base is optionally substituted adenine, cytosine, guanine, thymine, or uracil, or a tautomer thereof. In certain embodiments, a modified nucleobase is a modified adenine, cytosine, guanine, thymine or uracil, modified by one or more modifications by which:
[1275] 1) a nucleobase is modified by one or more optionally substituted groups independently selected from acyl, halogen, amino, azide, alkyl, alkenyl, alkynyl, aryl, heteroalkyl, heteroalkenyl, heteroalkynyl, heterocyclyl, heteroaryl, carboxyl, hydroxyl, biotin, avidin, streptavidin, substituted silyl, and combinations thereof;
[1276] 2) one or more atoms of a nucleobase are independently replaced with a different atom selected from carbon, nitrogen and sulfur;
[1277] 3) one or more double bonds in a nucleobase are independently hydrogenated; or
[1278] 4) one or more aryl or heteroaryl rings are independently inserted into a nucleobase.

[1279] In certain embodiments, a modified nucleobase is a modified nucleobase known in the art, e.g., WO2017/210647. In certain embodiments, modified nucleobases are expanded-size nucleobases in which one or more aryl and/or heteroaryl rings, such as phenyl rings, have been added.

[1280] In certain embodiments, a modified nucleobase is selected from 5-substituted pyrimidines, 6-azapyrimidines, alkyl or alkynyl substituted pyrimidines, alkyl substituted purines, and N-2, N-6 and 0-6 substituted purines. In certain embodiments, modified nucleobases are selected from 2-aminopropyladenine, 5-hydroxymethyl cytosine, xanthine, hypoxanthine, 2-aminoadenine, 6-N-methylguanine, 6-N-methyladenine, 2-propyladenine, 2-thiouracil, 2-thiothymine and 2-thiocytosine, 5-propynyl (—C≡C—CH₃) uracil, 5-propynylcytosine, 6-azouracil, 6-azocytosine, 6-azothymine, 5-ribosyluracil (pseudouracil), 4-thiouracil, 8-halo, 8-amino, 8-thiol, 8-thioalkyl, 8-hydroxyl, 8-aza and other 8-substituted purines, 5-halo, particularly 5-bromo, 5-trifluoromethyl, 5-halouracil, and 5-halocytosine, 7-methylguanine, 7-methyladenine, 2-F-adenine, 2-aminoadenine, 7-deazaguanine, 7-deazaadenine, 3-deazaguanine, 3-deazaadenine, 6-N— benzoyladenine, 2-N-isobutyrylguanine, 4-N-benzoylcytosine, 4-N-benzoyluracil, 5-methyl 4-N— benzoylcytosine, 5-methyl 4-N— benzoyluracil, universal bases, hydrophobic bases, promiscuous bases, size-expanded bases, and fluorinated bases. In certain embodiments, modified nucleobases are tricyclic pyrimidines, such as 1,3-diazaphenoxazine-2-one, 1,3-diazaphenothiazine-2-one or 9-(2-aminoethoxy)-1,3-diazaphenoxazine-2-one (G-clamp). In certain embodiments, modified nucleobases are those in which the purine or pyrimidine base is replaced with other heterocycles, for example, 7-deaza-adenine, 7-deazaguanosine, 2-aminopyridine or 2-pyridone.

[1281] In certain embodiments, a modified nucleobase is substituted. In certain embodiments, a modified nucleobase is substituted such that it contains, e.g., heteroatoms, alkyl groups, or linking moieties connected to fluorescent moieties, biotin or avidin moieties, or other protein or peptides. In certain embodiments, a modified nucleobase is a “universal base” that is not a nucleobase in the most classical sense, but that functions similarly to a nucleobase. One example of a universal base is 3-nitropyrrole.

[1282] In certain embodiments, nucleosides that can be utilized in provided technologies comprise modified nucleobases and/or modified sugars, e.g., 4-acetylcytidine; 5-(carboxyhydroxylmethyl)uridine; 2′-O— methylcytidine; 5-carboxymethylaminomethyl-2-thiouridine; 5-carboxymethylaminomethyluridine; dihydrouridine; 2′-O— methylpseudouridine; beta,D-galactosylqueosine; 2′-O-methylguanosine; N⁶-isopentenyladenosine; 1-methyladenosine; 1-methylpseudouridine; 1-methylguanosine; 1-methylinosine; 2,2-dimethylguanosine; 2-methyladenosine; 2-methylguanosine; N⁷-methylguanosine; 3-methyl-cytidine; 5-methylcytidine; 5-hydroxymethylcytidine; 5-formylcytosine; 5-carboxylcytosine; N⁶-methyladenosine; 7-methylguanosine; 5-methylaminoethyluridine; 5-methoxyaminomethyl-2-thiouridine; beta,D-mannosylqueosine; 5-methoxycarbonylmethyluridine; 5-methoxyuridine; 2-methylthio-N⁶-isopentenyladenosine; N-((9-beta,D-ribofuranosyl-2-methylthiopurine-6-yl)carbamoyl)threonine; N-((9-beta,D-ribofuranosylpurine-6-yl)-N-methylcarbamoyl)threonine; uridine-5-oxyacetic acid methylester; uridine-5-oxy acetic acid (v); pseudouridine; queosine; 2-thiocytidine; 5-methyl-2-thiouridine; 2-thiouridine; 4-thiouridine; 5-methyluridine; 2′-O-methyl-5-methyluridine; and 2′-O-methyluridine. In certain embodiments, a nucleobase, e.g., a modified nucleobase comprises one or more biomolecule binding moieties such as e.g., antibodies, antibody fragments, biotin, avidin, streptavidin, receptor ligands, or chelating moieties. In other embodiments, a nucleobase is 5-bromouracil, 5 iodouracil, or 2,6-diaminopurine. In certain embodiments, a nucleobase comprises substitution with a fluorescent or biomolecule binding moiety. In certain embodiments, a substituent is a fluorescent moiety.

[1283] In certain embodiments, a substituent is biotin or avidin.

[1284] In certain embodiments, a nucleobase is one described in U.S. Pat. Nos. 9,394,333, 9,744,183, 9,605,019, 9,598,458, 9,982,257, U.S. Ser. No. 10/160,969, U.S. Ser. No. 10/479,995, US 2020/0056173, US 2018/0216107, US 2019/0127733, U.S. Ser. No. 10/450,568, US 2019/0077817, US 2019/0249173, US 2019/0375774, WO 2018/223056, WO 2018/223073, WO 2018/223081, WO 2018/237194, WO 2019/032607, WO 2019/055951, WO 2019/075357, WO 2019/200185, WO 2019/217784, and/or WO 2019/032612, the nucleobases of each of which is incorporated herein by reference.

### 5. Additional Chemical Moieties

[1285] In certain embodiments, a ds oligonucleotide comprises one or more additional chemical moieties. Various additional chemical moieties, e.g., targeting moieties, carbohydrate moieties, lipid moieties, etc. are known in the art and can be utilized in accordance with the present disclosure to modulate properties and/or activities of provided oligonucleotides, e.g., stability, half-life, activities, delivery, pharmacodynamics properties, pharmacokinetic properties, etc. In certain embodiments, certain additional chemical moieties facilitate delivery of oligonucleotides to desired cells, tissues and/or organs, including but not limited the cells of the central nervous system. In certain embodiments, certain additional chemical moieties facilitate internalization of oligonucleotides. In certain embodiments, certain additional chemical moieties increase oligonucleotide stability. In certain embodiments, the present disclosure provides technologies for incorporating various additional chemical moieties into oligonucleotides.

[1286] In certain embodiments, a ds oligonucleotide comprises an additional chemical moiety demonstrates increased delivery to and/or activity in a tissue compared to a reference oligonucleotide, e.g., a reference oligonucleotide which does not have the additional chemical moiety but is otherwise identical.

[1287] In certain embodiments, non-limiting examples of additional chemical moieties include carbohydrate moieties, targeting moieties, etc., which, when incorporated into oligonucleotides, can improve one or more properties. In certain embodiments, an additional chemical moiety is selected from: glucose, GluNAc (N-acetyl amine glucosamine) and anisamide moieties. In certain embodiments, a provided ds oligonucleotide can comprise two or more additional chemical moieties, wherein the additional chemical moieties are identical or non-identical, or are of the same category (e.g., carbohydrate moiety, sugar moiety, targeting moiety, etc.) or not of the same category.

[1288] In certain embodiments, an additional chemical moiety is a targeting moiety. In certain embodiments, an additional chemical moiety is or comprises a carbohydrate moiety. In certain embodiments, an additional chemical moiety is or comprises a lipid moiety. In certain embodiments, an additional chemical moiety is or comprises a ligand moiety for, e.g., cell receptors such as a sigma receptor, an asialoglycoprotein receptor, etc. In certain embodiments, a ligand moiety is or comprises an anisamide moiety, which may be a ligand moiety for a sigma receptor. In certain embodiments, a ligand moiety is or comprises a GalNAc moiety, which may be a ligand moiety for an asialoglycoprotein receptor. In certain embodiments, an additional chemical moiety facilitates delivery to liver.

[1289] In certain embodiments, a provided ds oligonucleotide can comprise one or more linkers and additional chemical moieties (e.g., targeting moieties), and/or can be chirally controlled or not chirally controlled, and/or have a bases sequence and/or one or more modifications and/or formats as described herein.

[1290] Various linkers, carbohydrate moieties and targeting moieties, including many known in the art, can be utilized in accordance with the present disclosure. In certain embodiments, a carbohydrate moiety is a targeting moiety. In certain embodiments, a targeting moiety is a carbohydrate moiety.

[1291] In certain embodiments, a provided ds oligonucleotide comprises an additional chemical moiety suitable for delivery, e.g., glucose, GluNAc (N-acetyl amine glucosamine), anisamide, or a structure selected from:

[chemical structure]

[chemical structure]

[chemical structure]

In certain embodiments, n is 1. In certain embodiments, n is 2. In certain embodiments, n is 3. In certain embodiments, n is 4. In certain embodiments, n is 5. In certain embodiments, n is 6. In certain embodiments, n is 7. In certain embodiments, n is 8.

[1292] In certain embodiments, additional chemical moieties are any of ones described in the Examples, including examples of various additional chemical moieties incorporated into various ds oligonucleotides.

[1293] In certain embodiments, an additional chemical moiety conjugated to a ds oligonucleotide is capable of targeting the ds oligonucleotide to a cell in the central nervous system.

[1294] In certain embodiments, an additional chemical moiety comprises or is a cell receptor ligand. In certain embodiments, an additional chemical moiety comprises or is a protein binder, e.g., one binds to a cell surface protein. Such moieties among other things can be useful for targeted delivery of ds oligonucleotides to cells expressing the corresponding receptors or proteins. In certain embodiments, an additional chemical moiety of a provided ds oligonucleotide comprises anisamide or a derivative or an analog thereof and is capable of targeting the ds oligonucleotide to a cell expressing a particular receptor, such as the sigma 1 receptor.

[1295] In certain embodiments, a provided ds oligonucleotide is formulated for administration to a body cell and/or tissue expressing its target. In certain embodiments, an additional chemical moiety conjugated to a ds oligonucleotide is capable of targeting the oligonucleotide to a cell.

[1296] In certain embodiments, an additional chemical moiety is selected from optionally substituted phenyl,

[chemical structure]

wherein n′ is 1, 2, 3, 4, 5, 6, 7, 8, 9, or 10, and each other variable is as described in the present disclosure. In certain embodiments, R^{s} is F. In certain embodiments, R^{s} is OMe. In certain embodiments, R^{s} is OH. In certain embodiments, R^{s} is NHAc. In certain embodiments, R^{s} is NHCOCF₃. In certain embodiments, R′ is H. In certain embodiments, R is H. In certain embodiments, R^{2s} is NHAc, and R^{5S} is OH. In certain embodiments, R^{2s} is p-anisoyl, and R^{5s} is OH. In certain embodiments, R^{2s} is NHAc and R^{5s} is p-anisoyl. In certain embodiments, R^{2s} is OH, and R^{5s} is p-anisoyl. In certain embodiments, an additional chemical moiety is selected from

[chemical structure]

[chemical structure]

[chemical structure]

In certain embodiments, n′ is 1. In certain embodiments, n′ is 0. In certain embodiments, n″ is 1. In certain embodiments, n″ is 2.

[1297] In certain embodiments, an additional chemical moiety is or comprises an asialoglycoprotein receptor (ASGPR) ligand.

[1298] Without wishing to be bound by any particular theory, the present disclosure notes that ASGPR1 has also been reported to be expressed in the hippocampus region and/or cerebellum Purkinje cell layer of the mouse. http://mouse.brain-map.org/experiment/show/2048

[1299] Various other ASGPR ligands are known in the art and can be utilized in accordance with the present disclosure. In certain embodiments, an ASGPR ligand is a carbohydrate. In certain embodiments, an ASGPR ligand is GalNac or a derivative or an analog thereof. In certain embodiments, an ASGPR ligand is one described in Sanhueza et al. J. Am. Chem. Soc., 2017, 139 (9), pp 3528-3536. In certain embodiments, an ASGPR ligand is one described in Mamidyala et al. J. Am. Chem. Soc., 2012, 134, pp 1978-1981. In certain embodiments, an ASGPR ligand is one described in US 20160207953. In certain embodiments, an ASGPR ligand is a substituted-6,8-dioxabicyclo[3.2.1]octane-2,3-diol derivative disclosed in, e.g., US 20160207953. In certain embodiments, an ASGPR ligand is one described in, e.g., US 20150329555. In certain embodiments, an ASGPR ligand is a substituted-6,8-dioxabicyclo[3.2.1]octane-2,3-diol derivative disclosed e.g., in US 20150329555. In certain embodiments, an ASGPR ligand is one described in U.S. Pat. No. 8,877,917, US 20160376585, U.S. Ser. No. 10/086,081, or U.S. Pat. No. 8,106,022. ASGPR ligands described in these documents are incorporated herein by reference. Those skilled in the art will appreciate that various technologies are known in the art, including those described in these documents, for assessing binding of a chemical moiety to ASGPR and can be utilized in accordance with the present disclosure. In certain embodiments, a provided ds oligonucleotide is conjugated to an ASGPR ligand. In certain embodiments, a provided ds oligonucleotide comprises an ASGPR ligand. In certain embodiments, an additional chemical moiety comprises an ASGPR ligand is

[chemical structure]

wherein each variable is independently as described in the present disclosure. In certain embodiments, R is —H. In certain embodiments, R′ is —C(O)R.

[1300] In certain embodiments, an additional chemical moiety is or comprises

[chemical structure]

In certain embodiments, an additional chemical moiety is or comprises

[chemical structure]

In certain embodiments, an additional chemical moiety is or comprises

[chemical structure]

In certain embodiments, an additional chemical moiety is or comprises

[chemical structure]

In certain embodiments, an additional chemical moiety is or comprises optionally substituted

[chemical structure]

In certain embodiments, an additional chemical moiety is or comprises

[chemical structure]

In certain embodiments, an additional chemical moiety is or comprises

[chemical structure]

In certain embodiments, an additional chemical moiety is or comprises

[chemical structure]

In certain embodiments, an additional chemical moiety is or comprises

[chemical structure]

[1301] In certain embodiments, an additional chemical moiety comprises one or more moieties that can bind to, e.g., oligonucleotide target cells. For example, in certain embodiments, an additional chemistry moiety comprises one or more protein ligand moieties, e.g., in certain embodiments, an additional chemical moiety comprises multiple moieties, each of which independently is an ASGPR ligand.

[1302] In particular embodiments, an additional chemical moiety is or comprises a mono-ASGPR ligand with one such moiety. In certain embodiments a mono-ASGPR ligand comprises:

[chemical structure]

[chemical structure]

[1303] In particular embodiments, an additional chemical moiety is or comprises a bi-ASGPR ligand with two such moieties. In certain embodiments a bi-ASGPR ligand comprises:

[chemical structure]

[1304] In particular embodiments, an additional chemical moiety is or comprises a tri-antennary ASGPR ligand with three such moieties. In certain embodiments a tri-antennary ASGPR ligand comprises:

[chemical structure]

[chemical structure]

[chemical structure]

[1305] In certain embodiments, a tri-antennary ASPGR ligand is Mod 001, Mod083, Mod071, Mod153, or Mod155.

[chemical structure]

[1306] In some embodiments, an oligonucleotide comprises

[chemical structure]

wherein each variable is independently as described herein. In some embodiments, each —OR′ is —OAc, and —N(R′)₂—NHAc. In some embodiments, an oligonucleotide comprises

[chemical structure]

In some embodiments, each R′ is —H. In some embodiments, each —OR′ is —OH, and each —N(R′)₂ is —NHC(O)R. In some embodiments, each —OR′ is —OH, and each —N(R′)₂ is —NHAc. In some embodiments, an oligonucleotide comprises

[chemical structure]

In some embodiments, the —CH₂— connection site is utilized as a C₅ connection site in a sugar. In some embodiments, the connection site on the ring is utilized as a C₃ connection site in a sugar. Such moieties may be introduced utilizing, e.g., phosphoramidites such as

[chemical structure]

(those skilled in the art appreciate that one or more other groups, such as protection groups for —OH, —NH₂—, —N(i-Pr)₂, —OCH₂CH₂CN, etc., may be alternatively utilized, and protection groups can be removed under various suitable conditions, sometimes during oligonucleotide de-protection and/or cleavage steps). In some embodiments, an oligonucleotide comprises 2, 3 or more (e.g., 3 and no more than 3)

[chemical structure]

In some embodiments, an oligonucleotide comprises 2, 3 or more (e.g., 3 and no more than 3)

[chemical structure]

In some embodiments, copies of such moieties are linked by internucleotidic linkages, e.g., natural phosphate linkages, as described herein. In some embodiments, when at a 5′-end, a —CH₂— connection site is bonded to —OH. In some embodiments, an oligonucleotide comprises

[chemical structure]

In some embodiments, each —OR′ is —OAc, and —N(R′)₂ is —NHAc. In some embodiments, an oligonucleotide comprises

[chemical structure]

Among other things,

[chemical structure]

may be utilized to introduce

[chemical structure]

with comparable and/or better activities and/or properties. In some embodiments, it provides improved preparation efficiency and/or lower cost for the same number of

[chemical structure]

(e.g., when compared to Mod001).

[1307] In certain embodiments, an additional chemical moiety is a Mod group described herein, e.g., in Table 1.

[1308] In certain embodiments, an additional chemical moiety is Mod001. In certain embodiments, an additional chemical moiety is Mod083. In certain embodiments, an additional chemical moiety, e.g., a Mod group, is directly conjugated (e.g., without a linker) to the remainder of the ds oligonucleotide. In certain embodiments, an additional chemical moiety is conjugated via a linker to the remainder of the ds oligonucleotide. In certain embodiments, additional chemical moieties, e.g., Mod groups, may be directly connected, and/or via a linker, to nucleobases, sugars and/or internucleotidic linkages of ds oligonucleotides. In certain embodiments, Mod groups are connected, either directly or via a linker, to sugars. In certain embodiments, Mod groups are connected, either directly or via a linker, to 5′-end sugars. In certain embodiments, Mod groups are connected, either directly or via a linker, to 5′-end sugars via 5′ carbon. For examples, see various ds oligonucleotides in Table 1. In certain embodiments, Mod groups are connected, either directly or via a linker, to 3′-end sugars. In certain embodiments, Mod groups are connected, either directly or via a linker, to 3′-end sugars via 3′ carbon. In certain embodiments, Mod groups are connected, either directly or via a linker, to nucleobases. In certain embodiments, Mod groups are connected, either directly or via a linker, to internucleotidic linkages. In certain embodiments, provided oligonucleotides comprise Mod001 connected to 5′-end of oligonucleotide chains through L001.

[1309] As appreciated by those skilled in the art, an additional chemical moiety may be connected to a ds oligonucleotide chain at various locations, e.g., 5′-end, 3′-end, or a location in the middle (e.g., on a sugar, a base, an internucleotidic linkage, etc.). In certain embodiments, it is connected at a 5′-end. In certain embodiments, it is connected at a 3′-end. In certain embodiments, it is connected at a nucleotide in the middle. Certain additional chemical moieties (e.g., lipid moieties, targeting moieties, carbohydrate moieties), including but not limited to Mod012, Mod039, Mod062, Mod085, Mod086, and Mod094, and various linkers for connecting additional chemical moieties to ds oligonucleotide chains, including but not limited to L001, L003, L004, L008, L009, and L010, are described in WO 2017/062862, WO 2018/067973, WO 2017/160741, WO 2017/192679, WO 2017/210647, WO 2018/098264, WO 2018/022473, WO 2018/223056, WO 2018/223073, WO 2018/223081, WO 2018/237194, WO 2019/032607, WO2019032612, WO 2019/055951, WO 2019/075357, WO 2019/200185, WO 2019/217784, and/or WO 2019/032612, the additional chemical moieties and linkers of each of which are independently incorporated herein by reference, and can be utilized in accordance with the present disclosure. In certain embodiments, an additional chemical moiety is digoxigenin or biotin or a derivative thereof.

[1310] In certain embodiments, a ds oligonucleotide comprises a linker, e.g., L001 L004, L008, and/or an additional chemical moiety, e.g., Mod012, Mod039, Mod062, Mod085, Mod086, or Mod094. In certain embodiments, a linker, e.g., L001, L003, L004, L008, L009, L110, etc. is linked to a Mod, e.g., Mod012, Mod039, Mod062, Mod085, Mod086, Mod094, Mod152, Mod153, Mod154, Mod155 etc. L001: —NH—(CH₂)₆— linker (also known as a C₆ linker, C₆ amine linker or C₆ amino linker), connected to Mod, if any, through —NH—, and the 5′-end or 3′-end of the ds oligonucleotide chain through either a phosphate linkage (—O—P(O)(OH)—O—, which may exist as a salt form, and may be indicated as O or PO) or a phosphorothioate linkage (—O—P(O)(SH)—O—, which may exist as a salt form, and may be indicated as * if the phosphorothioate is not chirally controlled; or *S, S, or Sp, if the phosphorothioate is chirally controlled and has an Sp configuration, or *R, R, or Rp, if the phosphorothioate is chirally controlled and has an Rp configuration) as indicated at the —CH₂— connecting site. If no Mod is present, L001 is connected to —H through —NH—;
[1311] L003:

[chemical structure]

linker. In certain embodiments, it is connected to Mod, if any (if no Mod, —H), through its amino group, and the 5′-end or 3′-end of an oligonucleotide chain e.g., via a linkage (e.g., a phosphate linkage (0 or PO) or a phosphorothioate linkage (can be either not chirally controlled or chirally controlled (Sp or Rp))); L004: linker having the structure of —NH(CH₂)₄CH(CH₂OH)CH₂—, wherein —NH— is connected to Mod (through —C(O)—) or —H, and the —CH₂— connecting site is connected to an oligonucleotide chain (e.g., at the 3′-end) through a linkage, e.g., phosphodiester (—O—P(O)(OH)—O—, which may exist as a salt form, and may be indicated as O or PO), phosphorothioate (—O—P(O)(SH)—O—, which may exist as a salt form, and may be indicated as * if the phosphorothioate is not chirally controlled; or *S, S, or Sp, if the phosphorothioate is chirally controlled and has an Sp configuration, or *R, R, or Rp, if the phosphorothioate is chirally controlled and has an Rp configuration), or phosphorodithioate (—O—P(S)(SH)—O—, which may exist as a salt form, and may be indicated as PS2 or: or D) linkage. For example, an asterisk immediately preceding a L004 (e.g., *L004) indicates that the linkage is a phosphorothioate linkage, and the absence of an asterisk immediately preceding L004 indicates that the linkage is a phosphodiester linkage. For example, in an oligonucleotide which terminates in . . . mAL004, the linker L004 is connected (via the —CH₂— site) through a phosphodiester linkage to the 3′ position of the 3′-terminal sugar (which is 2′-OMe modified and connected to the nucleobase A), and the L004 linker is connected via —NH— to —H. Similarly, in one or more oligonucleotides, the L004 linker is connected (via the —CH₂— site) through the phosphodiester linkage to the 3′ position of the 3′-terminal sugar, and the L004 is connected via —NH— to, e.g., Mod012, Mod085, Mod086, etc.; L008: linker having the structure of —C(O)—(CH₂)₉—, wherein —C(O)— is connected to Mod (through —NH—) or —OH (if no Mod indicated), and the —CH₂— connecting site is connected to an oligonucleotide chain (e.g., at the 5′-end) through a linkage, e.g., phosphodiester (—O—P(O)(OH)—O—, which may exist as a salt form, and may be indicated as O or PO), phosphorothioate (—O—P(O)(SH)—O—, which may exist as a salt form, and may be indicated as * if the phosphorothioate is not chirally controlled; or *S, S, or Sp, if the phosphorothioate is chirally controlled and has an Sp configuration, or *R, R, or Rp, if the phosphorothioate is chirally controlled and has an Rp configuration), or phosphorodithioate (—O—P(S)(SH)—O—, which may exist as a salt form, and may be indicated as PS2 or: or D) linkage. For example, in an example oligonucleotide which has the sequence of 5′-L008 mN*mN*mN*mN*N*N*N*N*N*N*N*N*N*N*mN*mN*mN*mN-3′, and which has a Stereochemistry/Linkage of OXXXXXXXXX XXXXXXXX, wherein N is a base, wherein O is a natural phosphate internucleotidic linkage, and wherein X is a stereorandom phosphorothioate, L008 is connected to —OH through —C(O)—, and the 5′-end of an oligonucleotide chain through a phosphate linkage (indicated as “0” in “Stereochemistry/Linkage”); in another example oligonucleotide, which has the sequence of 5′-Mod062L008 mN*mN*mN*mN*N*N*N*N*N*N*N*N*N*N*mN*mN*mN*mN-3′, and which has a Stereochemistry/Linkage of OXXXXXXXXX XXXXXXXX, wherein N is a base, L008 is connected to Mod062 through —C(O)—, and the 5′-end of an oligonucleotide chain through a phosphate linkage (indicated as “O” in “Stereochemistry/Linkage”);
[1312] L009: —CH₂CH₂CH₂—. In certain embodiments, when L009 is present at the 5′-end of an oligonucleotide without a Mod, one end of L009 is connected to —OH and the other end connected to a 5′-carbon of the oligonucleotide chain e.g., via a linkage (e.g., a phosphate linkage (O or PO) or a phosphorothioate linkage (can be either not chirally controlled or chirally controlled (Sp or Rp))); L010:

[chemical structure]

In certain embodiments, when LOW1 is present at the 5′-end of an oligonucleotide without a Mod, the 5′-carbon of L010 is connected to —OH and the 3′-carbon connected to a 5′-carbon of the oligonucleotide chain e.g., via a linkage (e.g., a phosphate linkage (O or PO) or a phosphorothioate or a phosphoryl guanidine linkage (can be either not chirally controlled or chirally controlled (Sp or Rp))); Mod012 (in certain embodiments, —C(O)— connects to —NH— of a linker such as L001, L004, L008, etc.):
[1313] L010 is utilized with n001R to form L010n001R, which has the structure of

[chemical structure]

and wherein the configuration of linkage phosphorus is Rp. In some embodiments, multiple L010n001R may be utilized. For example, L023L010n001R^{L}010n001R^{L}010n001R, which has the following structure (which is bonded to the 5′-carbon at the 5′-end of the oligonucleotide chain, and each linkage phosphorus is independently Rp):

[chemical structure]

[1314] L023 is utilized with n001 to form L023n001, which has the structure of

[chemical structure]

[1315] L023 is utilized with n009 to form L023n009, as in WV-42644 which has the structure of

[chemical structure]

[1316] In some embodiments, L023n001L009n001L009n001 may be utilized. For example, L023n001L009n001L009n001 as in WV-42643

[chemical structure]

[1317] In some embodiments, L023n009L009n009 may be utilized. For example, as in WV-42646

[chemical structure]

[1318] In some embodiments, L023n009L009n009L009n009 may be utilized. For example, as in WV-42648

[chemical structure]

[1319] In some embodiments L025 may be utilized; as in WV-41390,

[chemical structure]

wherein the —CH₂— connection site is utilized as a C₅ connection site of a sugar (e.g., a DNA sugar) and is connected to another unit (e.g., 3′ of a sugar), and the connection site on the ring is utilized as a C₃ connection site and is connected to another unit (e.g., a 5′-carbon of a carbon), each of which is independently, e.g., via a linkage (e.g., a phosphate linkage (O or PO) or a phosphorothioate or a phosphoryl guanidine linkage (can be either not chirally controlled or chirally controlled (Sp or Rp))). When L025 is at a5′-end without any modifications, its —CH₂— connection site is bonded to —OH. For example, L025L025L025—in various oligonucleotides has the structure of

[chemical structure]

(may exist as various salt forms) and is connected to 5′-carbon of an oligonucleotide chain via a linkage as indicated (e.g., a phosphate linkage (O or PO) or a phosphorothioate or a phosphoryl guanidine linkage (can be either not chirally controlled or chirally controlled (Sp or Rp)));
[1320] In some embodiments L026 may be utilized; as in WV-44444,

[chemical structure]

[1321] In some embodiments L027 may be utilized; as in WV-44445,

[chemical structure]

[1322] In some embodiments mU may be utilized; as in WV-42079,

[chemical structure]

[1323] In some embodiments p[Rm5d5m]U may be utilized; as in SSR-0106183

[chemical structure]

[1324] In some embodiments fU may be utilized; as in WV-44433,

[chemical structure]

[1325] In some embodiments dT may be utilized; as in WV-44434,

[chemical structure]

[1326] In some embodiments POdT or PO4-dT may be utilized; as in WV-44435,

[chemical structure]

[1327] In some embodiments PO5MRdT may be utilized; as in WV-44436,

[chemical structure]

[1328] In some embodiments PO5MSdT may be utilized; as in WV-44437,

[chemical structure]

[1329] In some embodiments VPdT may be utilized; as in WV-44438,

[chemical structure]

[1330] In some embodiments 5mvpdT may be utilized; as in WV-44439,

[chemical structure]

[1331] In some embodiments 5mrpdT may be utilized; as in WV-44440,

[chemical structure]

[1332] In some embodiments 5mspdT may be utilized; as in WV-44441,

[chemical structure]

[1333] In some embodiments PNdT may be utilized; as in WV-44442,

[chemical structure]

[1334] In some embodiments SPNdT may be utilized; as in WV-44443,

[chemical structure]

[1335] In some embodiments 5ptzdT may be utilized; as in WV-44446,

[chemical structure]

[chemical structure]

Mod039 (in certain embodiments, —C(O)— connects to —NH— of a linker such as L001, L003, L004, L008, L009, L110, etc.):

[chemical structure]

Mod062 (in certain embodiments, —C(O)— connects to —NH— of a linker such as L001, L003, L004, L008, L009, L110, etc.):

[chemical structure]

Mod085 (in certain embodiments, —C(O)— connects to —NH— of a linker such as L001, L003, L004, L008, L009, L110, etc.):

[chemical structure]

Mod086 (in certain embodiments, —C(O)— connects to —NH— of a linker such as L001, L003, L004, L008, L009, L110, etc.):

[chemical structure]

Mod094 (in certain embodiments, connects to an internucleotidic linkage, or to the 5′-end or 3′-end of an oligonucleotide via a linkage, e.g., a phosphate linkage, a phosphorothioate linkage (which is optionally chirally controlled), etc. For example, in an example oligonucleotide which has the sequence of 5′-mN*mN * mN*mN*N*N*N*N*N*N*N*N*N*N*mN*mN*mN*mNMod094-3′, and which has a Stereochemistry/Linkage of XXXXX XXXXX XXXXX XXO, wherein N is a base, Mod094 is connected to the 3′-end of the oligonucleotide chain (3′-carbon of the 3′-end sugar) through a phosphate group (which is not shown below and which may exist as a salt form; and which is indicated as “0” in “Stereochemistry/Linkage” ( . . . XXXXO))):

[chemical structure]

[1336] In certain embodiments, an additional chemical moiety is one described in WO 2012/030683. In certain embodiments, a provided ds oligonucleotide comprise a chemical structure (e.g., a linker, lipid, solubilizing group, and/or targeting ligand) described in WO 2012/030683.

[1337] In certain embodiments, a provided ds oligonucleotide comprises an additional chemical moiety and/or a modification (e.g., of nucleobase, sugar, internucleotidic linkage, etc.) described in: U.S. Pat. Nos. 5,688,941; 6,294,664; 6,320,017; 6,576,752; 5,258,506; 5,591,584; 4,958,013; 5,082,830; 5,118,802; 5,138,045; 6,783,931; 5,254,469; 5,414,077; 5,486,603; 5,112,963; 5,599,928; 6,900,297; 5,214,136; 5,109,124; 5,512,439; 4,667,025; 5,525,465; 5,514,785; 5,565,552; 5,541,313; 5,545,730; 4,835,263; 4,876,335; 5,578,717; 5,580,731; 5,451,463; 5,510,475; 4,904,582; 5,082,830; 4,762,779; 4,789,737; 4,824,941; 4,828,979; 5,595,726; 5,214,136; 5,245,022; 5,317,098; 5,371,241; 5,391,723; 4,948,882; 5,218,105; 5,112,963; 5,567,810; 5,574,142; 5,578,718; 5,608,046; 4,587,044; 4,605,735; 5,585,481; 5,292,873; 5,552,538; 5,512,667; 5,597,696; 5,599,923; 7,037,646; 5,587,371; 5,416,203; 5,262,536; 5,272,250; or 8,106,022.

[1338] In certain embodiments, an additional chemical moiety, e.g., a Mod, is connected via a linker. Various linkers are available in the art and may be utilized in accordance with the present disclosure, for example, those utilized for conjugation of various moieties with proteins (e.g., with antibodies to form antibody-drug conjugates), nucleic acids, etc. Certain useful linkers are described in U.S. Pat. No. 9,982,257, US 20170037399, US 20180216108, US 20180216107, U.S. Pat. No. 9,598,458, WO 2017/062862, WO 2018/067973, WO 2017/160741, WO 2017/192679, WO 2017/210647, WO 2018/098264, WO 2018/223056, WO 2018/237194, WO 2019/032607, WO 2019/055951, WO 2019/075357, WO 2019/200185, WO 2019/217784, and/or WO 2019/032612, the linker moieties of each which are independently incorporated herein by reference. In certain embodiments, a linker is, as non-limiting examples, L001, L004, L009 or LO10. In certain embodiments, an oligonucleotide comprises a linker, but not an additional chemical moiety other than the linker. In certain embodiments, a ds oligonucleotide comprises a linker, but not an additional chemical moiety other than the linker, wherein the linker is L001, L004, L009, or L010.

[1339] As demonstrated herein, provided technologies can provide high levels of activities and/or desired properties, in certain embodiments, without utilizing particular structural elements (e.g., modifications, linkage configurations and/or patterns, etc.) reported to be desired and/or necessary (e.g., those reported in WO 2019/219581), though certain such structural elements may be incorporated into ds oligonucleotides in combination with various other structural elements in accordance with the present disclosure. For example, in certain embodiments, ds oligonucleotides of the present disclosure have fewer nucleosides 3′ to a nucleoside opposite to a target nucleoside (e.g., a target adenosine), contain one or more phosphorothioate internucleotidic linkages at one or more positions where a phosphorothioate internucleotidic linkage was reportedly not favored or not allowed, contain one or more Sp phosphorothioate internucleotidic linkages at one or more positions where a Sp phosphorothioate internucleotidic linkage was reportedly not favored or not allowed, contain one or more Rp phosphorothioate internucleotidic linkages at one or more positions where a Rp phosphorothioate internucleotidic linkage was reportedly not favored or not allowed, and/or contain different modifications (e.g., internucleotidic linkage modifications, sugar modifications, etc.) and/or stereochemistry at one or more locations compared to those reportedly favorable or required for certain oligonucleotide properties and/or activities (e.g., presence of 2′-MOE, absence of phosphorothioate linkages at certain positions, absence of Sp phosphorothioate linkages at certain positions, and/or absence of Rp phosphorothioate linkages at certain positions were reportedly favorable or required for certain oligonucleotide properties and/or activities; as demonstrated herein, provided technologies can provide desired properties and/or high activities without utilizing 2′-MOE, without avoiding phosphorothioate linkages at one or more such certain positions, without avoiding Sp phosphorothioate linkages at one or more such certain positions, and/or without avoiding Rp phosphorothioate linkages at one or more such certain positions). Additionally or alternatively, provided ds oligonucleotides incorporates structural elements that were not previously recognized such as utilization of certain modifications (e.g., base modifications, sugar modifications (e.g., 2′-F), linkage modifications (e.g., non-negatively charged internucleotidic linkages), additional moieties, etc.) and levels, patterns, and combinations thereof.

[1340] For example, in certain embodiments, as described herein, provided d oligonucleotides contain no more than 5, 6, 7, 8, 9, 10, 11 or 12 nucleosides 3′ to a nucleoside opposite to a target nucleoside (e.g., a target adenosine).

[1341] Alternatively or additionally, as described herein (e.g., illustrated in certain Examples), for structural elements 3′ to a nucleoside opposite to a target nucleoside (e.g., a target adenosine), in certain embodiments, about 50%-100% (e.g., about or at least about 50%, 55%, 60%, 65%, 70%, 75%, 80%, 85%, 90%, 95%) of internucleotidic linkages 3′ to a nucleoside opposite to a target nucleoside (e.g., a target adenosine) are each independently a modified internucleotidic linkage, which is optionally chirally controlled. In certain embodiments, no more than 1, 2, or 3 internucleotidic linkages 3′ to a nucleoside opposite to a target nucleoside are natural phosphate linkages. In certain embodiments, no such internucleotidic linkage is natural phosphate linkages. In certain embodiments, no more than 1 such internucleotidic linkage is natural phosphate linkages. In certain embodiments, no more than 2 such internucleotidic linkages are natural phosphate linkages. In certain embodiments, no more than 3 such internucleotidic linkages are natural phosphate linkages. In certain embodiments, each modified internucleotidic linkage is independently a phosphorothioate or a non-negatively charged internucleotidic linkage (e.g., n001). In certain embodiments, each phosphorothioate internucleotidic linkage is chirally controlled. In certain embodiments, no more than 1, 2, or 3 internucleotidic linkages 3′ to a nucleoside opposite to a target nucleoside are Rp phosphorothioate internucleotidic linkage.

[1342] Alternatively or additionally, as described herein (e.g., illustrated in certain Examples), in certain embodiments, about 50%-100% (e.g., about or at least about 50%, 55%, 60%, 65%, 70%, 75%, 80%, 85%, 90%, or 95%) of internucleotidic linkages 5′ to a nucleoside opposite to a target nucleoside (e.g., a target adenosine) are each independently a modified internucleotidic linkage, which is optionally chirally controlled. In certain embodiments, no or no more than 1, 2, or 3 internucleotidic linkages 5′ to a nucleoside opposite to a target nucleoside (e.g., a target adenosine) are not modified internucleotidic linkages. In certain embodiments, no or no more than 1, 2, or 3 internucleotidic linkages 5′ to a nucleoside opposite to a target nucleoside (e.g., a target adenosine) are not phosphorothioate internucleotidic linkages. In certain embodiments, no or no more than 1, 2, or 3 internucleotidic linkages 5′ to a nucleoside opposite to a target nucleoside (e.g., a target adenosine) are not Sp phosphorothioate internucleotidic linkages. In certain embodiments, no more than 1, 2, or 3 internucleotidic linkages 5′ to a nucleoside opposite to a target nucleoside (e.g., a target adenosine) are natural phosphate linkages. In certain embodiments, no such internucleotidic linkage is natural phosphate linkages. In certain embodiments, no more than 1 such internucleotidic linkage is natural phosphate linkages. In certain embodiments, no more than 2 such internucleotidic linkages are natural phosphate linkages. In certain embodiments, no more than 3 such internucleotidic linkages are natural phosphate linkages. In certain embodiments, each modified internucleotidic linkage is independently a phosphorothioate or a non-negatively charged internucleotidic linkage (e.g., n001). In certain embodiments, there are no 2, 3, or 4 consecutive internucleotidic linkages 5′ to a nucleoside opposite to a target nucleoside, each of which is not a phosphorothioate internucleotidic linkage. In certain embodiments, there are no 2, 3, or 4 consecutive internucleotidic linkages 5′ to a nucleoside opposite to a target nucleoside, each of which is chirally controlled and is not a Sp phosphorothioate internucleotidic linkage. In certain embodiments, no or no more than 1, 2, 3, 4, or 5 internucleotidic linkages 5′ to a nucleoside opposite to a target nucleoside (e.g., a target adenosine) are Rp phosphorothioate internucleotidic linkage. In certain embodiments, at least about 1, 2, 3, 4, 5, 6, 7, 8, 9, or 10, or about 1, 2, 3, 4, 5, 6, 7, 8, 9, 10, 11, 12, 13, 14, 15, 16, 18, 19, 20, 21, 22, 23, 24, 25, 26, 27, 28, 29, 30, 31, or 32, or about 50%-100% (e.g., about or at least about 50%, 55%, 60%, 65%, 70%, 75%, 80%, 85%, 90%, or 95%) of internucleotidic linkages 5′ to a nucleoside opposite to a target nucleoside (e.g., a target adenosine) are each independently chirally controlled and a Sp internucleotidic linkage. In certain embodiments, at least about 1, 2, 3, 4, 5, 6, 7, 8, 9, or 10, or about 1, 2, 3, 4, 5, 6, 7, 8, 9, 10, 11, 12, 13, 14, 15, 16, 18, 19, 20, 21, 22, 23, 24, 25, 26, 27, 28, 29, 30, 31, or 32, or about 50%-100% (e.g., about or at least about 50%, 55%, 60%, 65%, 70%, 75%, 80%, 85%, 90%, or 95%) of phosphorothioate internucleotidic linkages 5′ to a nucleoside opposite to a target nucleoside (e.g., a target adenosine) are each independently chirally controlled and are Sp. In certain embodiments, each phosphorothioate internucleotidic linkages 5′ to a nucleoside opposite to a target nucleoside (e.g., a target adenosine) is chirally controlled. In certain embodiments, each phosphorothioate internucleotidic linkages 5′ to a nucleoside opposite to a target nucleoside (e.g., a target adenosine) is Sp.

### 6. Production of Oligonucleotides and Compositions

[1343] Various methods can be utilized for production of ds oligonucleotides and compositions and can be utilized in accordance with the present disclosure. For example, traditional phosphoramidite chemistry can be utilized to prepare stereorandom oligonucleotides and compositions, and certain reagents and chirally controlled technologies can be utilized to prepare chirally controlled oligonucleotide compositions, e.g., as described in U.S. Pat. No. 9,982,257, US 20170037399, US 20180216108, US 20180216107, U.S. Pat. No. 9,598,458, WO 2017/062862, WO 2018/067973, WO 2017/160741, WO 2017/192679, WO 2017/210647, WO 2018/098264, WO 2018/223056, WO 2018/237194, WO 2019/032607, WO 2019/055951, WO 2019/075357, WO 2019/200185, WO 2019/217784, and/or WO 2019/032612, the reagents and methods of each of which is incorporated herein by reference.

[1344] In certain embodiments, chirally controlled/stereoselective preparation of ds oligonucleotides and compositions thereof comprise utilization of a chiral auxiliary, e.g., as part of monomeric phosphoramidites. Examples of such chiral auxiliary reagents and phosphoramidites are described in U.S. Pat. No. 9,982,257, US 20170037399, US 20180216108, US 20180216107, U.S. Pat. No. 9,598,458, WO 2017/062862, WO 2018/067973, WO 2017/160741, WO 2017/192679, WO 2017/210647, WO 2018/098264, WO 2018/223056, WO 2018/237194, WO 2019/032607, WO 2019/055951, WO 2019/075357, WO 2019/200185, WO 2019/217784, and/or WO 2019/032612, the chiral auxiliary reagents and phosphoramidites of each of which are independently incorporated herein by reference. In certain embodiments, a chiral auxiliary is a chiral auxiliary described in any of: WO 2018/022473, WO 2018/098264, WO 2018/223056, WO 2018/223073, WO 2018/223081, WO 2018/237194, WO 2019/032607, WO 2019/055951, WO 2019/075357, WO 2019/200185, WO 2019/217784, and/or WO 2019/032612, the chiral auxiliaries of each of which are independently incorporated herein by reference.

[1345] In certain embodiments, chirally controlled preparation technologies, including oligonucleotide synthesis cycles, reagents and conditions are described in U.S. Pat. No. 9,982,257, US 20170037399, US 20180216108, US 20180216107, U.S. Pat. No. 9,598,458, WO 2017/062862, WO 2018/067973, WO 2017/160741, WO 2017/192679, WO 2017/210647, and/WO 2018/098264, WO 2018/022473, WO 2018/223056, WO 2018/223073, WO 2018/223081, WO 2018/237194, WO 2019/032607, WO2019032612, WO 2019/055951, WO 2019/075357, WO 2019/200185, WO 2019/217784, and/or WO 2019/032612, WO 2018/223056, WO 2018/223073, WO 2018/223081, WO 2018/237194, WO 2019/032607, WO 2019/055951, WO 2019/075357, WO 2019/200185, WO 2019/217784, and/or WO 2019/032612, the oligonucleotide synthesis methods, cycles, reagents and conditions of each of which are independently incorporated herein by reference.

[1346] Once synthesized, provided ds oligonucleotides and compositions are typically further purified. Suitable purification technologies are widely known and practiced by those skilled in the art, including but not limited to those described in U.S. Pat. No. 9,982,257, US 20170037399, US 20180216108, US 20180216107, U.S. Pat. No. 9,598,458, WO 2017/062862, WO 2018/067973, WO 2017/160741, WO 2017/192679, WO 2017/210647, WO 2018/098264, WO 2018/223056, WO 2018/237194, WO 2019/032607, WO 2019/055951, WO 2019/075357, WO 2019/200185, WO 2019/217784, and/or WO 2019/032612, the purification technologies of each of which are independently incorporated herein by reference.

[1347] In certain embodiments, a cycle comprises or consists of coupling, capping, modification and deblocking. In certain embodiments, a cycle comprises or consists of coupling, capping, modification, capping and deblocking. These steps are typically performed in the order they are listed, but in certain embodiments, as appreciated by those skilled in the art, the order of certain steps, e.g., capping and modification, may be altered. If desired, one or more steps may be repeated to improve conversion, yield and/or purity as those skilled in the art often perform in syntheses. For example, in certain embodiments, coupling may be repeated; in certain embodiments, modification (e.g., oxidation to install ═O, sulfurization to install=S, etc.) may be repeated; in certain embodiments, coupling is repeated after modification which can convert a P(III) linkage to a P(V) linkage which can be more stable under certain circumstances, and coupling is routinely followed by modification to convert newly formed P(III) linkages to P(V) linkages. In certain embodiments, when steps are repeated, different conditions may be employed (e.g., concentration, temperature, reagent, time, etc.).

[1348] Technologies for formulating provided ds oligonucleotides and/or preparing pharmaceutical compositions, e.g., for administration to subjects via various routes, are readily available in the art and can be utilized in accordance with the present disclosure, e.g., those described in U.S. Pat. No. 9,982,257, US 20170037399, US 20180216108, US 20180216107, U.S. Pat. No. 9,598,458, WO 2017/062862, WO 2018/067973, WO 2017/160741, WO 2017/192679, WO 2017/210647, WO 2018/098264, WO 2018/223056, or WO 2018/237194 and references cited therein.

[1349] Technologies for formulating provided ds oligonucleotides and/or preparing pharmaceutical compositions, e.g., for administration to subjects via various routes, are readily available in the art and can be utilized in accordance with the present disclosure, e.g., those described in U.S. Pat. No. 9,982,257, US 20170037399, US 20180216108, US 20180216107, U.S. Pat. No. 9,598,458, WO 2017/062862, WO 2018/067973, WO 2017/160741, WO 2017/192679, WO 2017/210647, WO 2018/098264, WO 2018/223056, or WO 2018/237194 and references cited therein.

[1350] In certain embodiments, a useful chiral auxiliary has the structure of

[chemical structure]

or a salt thereof, wherein R^{C11} is -L^{C1}-R^{C1}, L^{C1} is optionally substituted —CH₂—. R^{C1} is R, —Si(R)₃, —SO₂R or an electron-withdrawing group, and R^{C2} and R^{C3} are taken together with their intervening atoms to form an optionally substituted 3-10 membered saturated ring having, in addition to the nitrogen atom, 0-2 heteroatoms. In certain embodiments, a useful chiral auxiliary has the structure of

[chemical structure]

wherein R^{C1} is R, —Si(R)₃ or —SO₂R, and R^{C2} and R^{C3} are taken together with their intervening atoms to form an optionally substituted 3-7 membered saturated ring having, in addition to the nitrogen atom, 0-2 heteroatoms. is a formed ring is an optionally substituted 5-membered ring. In certain embodiments, a useful chiral auxiliary has the structure of

[chemical structure]

or a salt thereof. In certain embodiments, a useful chiral auxiliary has the structure of

[chemical structure]

In certain embodiments, a useful chiral auxiliary is a DPSE chiral auxiliary. In certain embodiments, purity or stereochemical purity of a chiral auxiliary is at least 85%, 90%, 95%, 96%, 97%, 98%, or 99%. In certain embodiments, it is at least 85%. In certain embodiments, it is at least 90%. In certain embodiments, it is at least 95%. In certain embodiments, it is at least 96%. In certain embodiments, it is at least 97%. In certain embodiments, it is at least 98%. In certain embodiments, it is at least 99%.

[1351] In certain embodiments, L^{C1} is —CH₂—. In certain embodiments, L^{C1} is substituted —CH₂—. In certain embodiments, L^{C1} is monosubstituted —CH₂—.

[1352] In certain embodiments, R^{C1} is R. In certain embodiments, R^{C1} is optionally substituted phenyl. In certain embodiments, R^{C1} is —SiR₃. In certain embodiments, R^{C1} is —SiPh₂Me. In certain embodiments, R^{C1} is —SO₂R. In certain embodiments, R is not hydrogen. In certain embodiments, R is optionally substituted phenyl. In certain embodiments, R is phenyl. In certain embodiments, R is optionally substituted C₁₋₆ aliphatic. In certain embodiments, R is C₁₋₆ alkyl. In certain embodiments, R is methyl. In certain embodiments, R is t-butyl.

[1353] In certain embodiments, R^{C1} is an electron-withdrawing group, such as —C(O)R, —OP(O)(OR)₂, —OP(O)(R)₂, —P(O)(R)₂, —S(O)R, —S(O)₂R, etc. In certain embodiments, chiral auxiliaries comprising electron-withdrawing group R^{C1} groups are particularly useful for preparing chirally controlled non-negatively charged internucleotidic linkages and/or chirally controlled internucleotidic linkages bonded to natural RNA sugar.

[1354] In certain embodiments, R^{C2} and R^{C3} are taken together with their intervening atoms to form an optionally substituted 3-10 (e.g., 3, 4, 5, 6, 7, 8, 9, or 10) membered saturated ring having no heteroatoms in addition to the nitrogen atom. In certain embodiments, R^{C2} and R^{C3} are taken together with their intervening atoms to form an optionally substituted 5-membered saturated ring having no heteroatoms in addition to the nitrogen atom.

[1355] In certain embodiments, the present disclosure provides useful reagents for preparation of ds oligonucleotides and compositions thereof. In certain embodiments, phosphoramidites comprise nucleosides, nucleobases and sugars as described herein. In certain embodiments, nucleobases and sugars are properly protected for oligonucleotide synthesis as those skilled in the art will appreciate. In certain embodiments, a phosphoramidite has the structure of R^{NS}—P(OR)N(R)₂, wherein R^{NS} is an optionally protected nucleoside moiety. In certain embodiments, a phosphoramidite has the structure of R^{NS}—P(OCH₂CH₂CN)N(i-Pr)₂. In certain embodiments, a phosphoramidite comprises a nucleobase which is or comprises Ring BA, wherein Ring BA has the structure of BA-I, BA-I-a, BA-I-b, BA-II, BA-II-a, BA-II-b, BA-III, BA-III-a, BA-III-b, BA-IV, BA-IV-a, BA-IV-b, BA-V, BA-V-a, BA-V-b, or BA-VI, or a tautomer of Ring BA, wherein the nucleobase is optionally substituted or protected. In certain embodiments, a phosphoramidite comprises a chiral auxiliary moiety, wherein the phosphorus is bonded to an oxygen and a nitrogen atom of the chiral auxiliary moiety. In certain embodiments, a phosphoramidite has the structure of

[chemical structure]

or a salt thereof, wherein R^{NS} is a protected nucleoside moiety (e.g., 5′-OH and/or nucleobases suitably protected for oligonucleotide synthesis), and each other variable is independently as described herein. In certain embodiments, a phosphoramidite has the structure of

[chemical structure]

wherein R^{NS} is a protected nucleoside moiety (e.g., 5′—OH and/or nucleobases suitably protected for oligonucleotide synthesis), R^{C1} is R, —Si(R)₃ or —SO₂R, and R^{C2} and R^{C3} are taken together with their intervening atoms to form an optionally substituted 3-7 membered saturated ring having, in addition to the nitrogen atom, 0-2 heteroatoms, wherein the coupling forms an internucleotidic linkage. In certain embodiments, 5′—OH of R^{N}S is protected. In certain embodiments, 5′—OH of R^{NS} is protected as —ODMTr. In certain embodiments, R^{NS} is bonded to phosphorus through its 3′—O—. In certain embodiments, a formed ring by R^{C2} and R^{C3} is an optionally substituted 5-membered ring. In certain embodiments, a phosphoramidite has the structure of

[chemical structure]

or a salt thereof. In certain embodiments, a phosphoramidite has the structure of

[chemical structure]

[1356] In certain embodiments, purity or stereochemical purity of a phosphoramidite is at least 85%, 90%, 95%, 96%, 97%, 98%, or 99%. In certain embodiments, it is at least 85%. In certain embodiments, it is at least 90%. In certain embodiments, it is at least 95%.

[1357] In certain embodiments, the present disclosure provides a method for preparing an oligonucleotide or composition, comprising coupling a free —OH, e.g., a free 5′—OH, of an oligonucleotide or a nucleoside with a phosphoramidite as described herein.

[1358] In certain embodiments, the present disclosure provides an oligonucleotide, wherein the oligonucleotide comprises one or more modified internucleotidic linkages each independently having the structure of —O⁵—P^{L}(W)(R^{CA})—O³—, wherein:
[1359] P^{L} is P, or P(═W);
[1360] W is O, S, or W^{N};
[1361] W^{N} is ═N—C(—N(R)₂═N⁺(R¹)₂Q⁻;
[1362] Q⁻ is an anion;
[1363] R^{CA} is or comprises an optionally capped chiral auxiliary moiety,
[1364] O⁵ is an oxygen bonded to a 5′-carbon of a sugar, and
[1365] O³ is an oxygen bonded to a 3′-carbon of a sugar.

[1366] In certain embodiments, a modified internucleotidic linkage is optionally chirally controlled. In certain embodiments, a modified internucleotidic linkage is optionally chirally controlled.

[1367] In certain embodiments, a provided methods comprising removing R^{CA} from such a modified internucleotidic linkages. In certain embodiments, after removal, bonding to R^{CA} is replaced with —OH. In certain embodiments, after removal, bonding to R^{CA} is replaced with ═O, and bonding to W^{N} is replaced with —N═C(N(R¹)₂)₂.

[1368] In certain embodiments, P^{L} is P═S, and when R^{CA} is removed, such an internucleotidic linkage is converted into a phosphorothioate internucleotidic linkage.

[1369] In certain embodiments, P^{L} is P═W^{N}, and when R^{CA} is removed, such an internucleotidic linkage is converted into an internucleotidic linkage having the structure of

[chemical structure]

In certain embodiments, an internucleotidic linkage having the structure of

[chemical structure]

has the structure of

[chemical structure]

In certain embodiments, an internucleotidic linkage having the structure of

[chemical structure]

has the structure of

[chemical structure]

[1370] In certain embodiments, P^{L} is P (e.g., in newly formed internucleotidic linkage from coupling of a phosphoramidite with a 5′—OH). In certain embodiments, W is O or S. In certain embodiments, W is S (e.g., after sulfurization). In certain embodiments, W is O (e.g., after oxidation). In certain embodiments, certain non-negatively charged internucleotidic linkages or neutral internucleotidic linkages may be prepared by reacting a P(III) phosphite triester internucleotidic linkage with azido imidazolinium salts (e.g., compounds comprising

[chemical structure]

under suitable conditions. In certain embodiments, an azido imidazolinium salt is a salt of PF₆⁻. In certain embodiments, an azido imidazolinium salt is a slat of

[chemical structure]

In certain embodiments, an azido imidazolinium salt is 2-azido-1,3-dimethylimidazolinium hexafluorophosphate.

[1371] As appreciated by those skilled in the art, Q⁻ can be various suitable anion present in a system (e.g., in oligonucleotide synthesis), and may vary during oligonucleotide preparation processes depending on cycles, process stages, reagents, solvents, etc. In certain embodiments, Q⁻ is PF₆⁻.

[1372] In certain embodiments, R^{CA} is

[chemical structure]

wherein R^{C4} is —H or —C(O)R′, and each other variable is independently as described herein. In certain embodiments, R^{CA} is

[chemical structure]

wherein R^{C1} is R, —Si(R)₃ or —SO₂R, R^{C2} and R^{C3} are taken together with their intervening atoms to form an optionally substituted 3-7 membered saturated ring having, in addition to the nitrogen atom, 0-2 heteroatoms, R^{C4} is —H or —C(O)R′. In certain embodiments, R^{C4} is —H. In certain embodiments, R^{C4} is —C(O)CH₃. In certain embodiments, R^{C2} and R^{C3} are taken together to form an optionally substituted 5-membered ring.

[1373] In certain embodiments, R^{C4} is —H (e.g., in n newly formed internucleotidic linkage from coupling of a phosphoramidite with a 5′—OH). In certain embodiments, R^{C4} is —C(O)R (e.g., after capping of the amine). In certain embodiments, R is methyl.

[1374] In certain embodiments, each chirally controlled phosphorothioate internucleotidic linkage is independently converted from —O⁵—P^{L}(W)(R^{CA})—O³—.

### 8. Characterization and Assessment

[1375] In certain embodiments, properties and/or activities of dsRNAi oligonucleotides and compositions thereof can be characterized and/or assessed using various technologies available to those skilled in the art, e.g., biochemical assays, cell based assays, animal models, clinical trials, etc.

[1376] In certain embodiments, a method of identifying and/or characterizing an oligonucleotide composition, e.g., a dsRNAi oligonucleotide composition, comprises steps of: providing at least one composition comprising a plurality of oligonucleotides; and assessing delivery relative to a reference composition.

[1377] In certain embodiments, the present disclosure provides a method of identifying and/or characterizing a ds oligonucleotide composition, e.g., a dsRNAi oligonucleotide composition, comprises steps of: providing at least one composition comprising a plurality of ds oligonucleotides; and assessing cellular uptake relative to a reference composition.

[1378] In certain embodiments, the present disclosure provides a method of identifying and/or characterizing a ds oligonucleotide composition, e.g., a dsRNAi oligonucleotide composition, comprises steps of: providing at least one composition comprising a plurality of ds oligonucleotides; and assessing reduction of transcripts of a target gene and/or a product encoded thereby relative to a reference composition.

[1379] In certain embodiments, the present disclosure provides a method of identifying and/or characterizing a ds oligonucleotide composition, e.g., a dsRNAi oligonucleotide composition, comprises steps of: providing at least one composition comprising a plurality of ds oligonucleotides; and assessing reduction of tau levels, its aggregation and/or spreading relative to a reference composition.

[1380] In certain embodiments, properties and/or activities of ds oligonucleotides, e.g., dsRNAi oligonucleotides, and compositions thereof are compared to reference ds oligonucleotides and compositions thereof, respectively.

[1381] In certain embodiments, a reference ds oligonucleotide composition is a stereorandom ds oligonucleotide composition. In certain embodiments, a reference ds oligonucleotide composition is a stereorandom composition of ds oligonucleotides of which all internucleotidic linkages are phosphorothioate. In certain embodiments, a reference ds oligonucleotide composition is a ds DNA oligonucleotide composition with all phosphate linkages. In certain embodiments, a reference ds oligonucleotide composition is otherwise identical to a provided chirally controlled ds oligonucleotide composition except that it is not chirally controlled. In certain embodiments, a reference ds oligonucleotide composition is otherwise identical to a provided chirally controlled oligonucleotide composition except that it has a different pattern of stereochemistry. In certain embodiments, a reference ds oligonucleotide composition is similar to a provided ds oligonucleotide composition except that it has a different modification of one or more sugar, base, and/or internucleotidic linkage, or pattern of modifications. In certain embodiments, a ds oligonucleotide composition is stereorandom and a reference ds oligonucleotide composition is also stereorandom, but they differ in regard to sugar and/or base modification(s) or patterns thereof.

[1382] In certain embodiments, a reference composition is a composition of ds oligonucleotides having the same base sequence and the same chemical modifications. In certain embodiments, a reference composition is a composition of ds oligonucleotides having the same base sequence and the same pattern of chemical modifications. In certain embodiments, a reference composition is a non-chirally controlled (or stereorandom) composition of ds oligonucleotides having the same base sequence and chemical modifications. In certain embodiments, a reference composition is a non-chirally controlled (or stereorandom) composition of ds oligonucleotides of the same constitution but is otherwise identical to a provided chirally controlled ds oligonucleotide composition.

[1383] In certain embodiments, a reference ds oligonucleotide composition is of ds oligonucleotides having a different base sequence. In certain embodiments, a reference ds oligonucleotide composition is of ds oligonucleotides that do not target RNAi (e.g., as negative control for certain assays).

[1384] In certain embodiments, a reference composition is a composition of ds oligonucleotides having the same base sequence but different chemical modifications, including but not limited to chemical modifications described herein. In certain embodiments, a reference composition is a composition of ds oligonucleotides having the same base sequence but different patterns of internucleotidic linkages and/or stereochemistry of internucleotidic linkages and/or chemical modifications.

[1385] Various methods are known in the art for detection of gene products, the expression, level and/or activity of which may be altered after introduction or administration of a provided ds oligonucleotide. For example, transcripts and their knockdown can be detected and quantified with qPCR, and protein levels can be determined via Western blot.

[1386] In certain embodiments, assessment of efficacy of ds oligonucleotides can be performed in biochemical assays or in vitro in cells. In certain embodiments, dsRNAi oligonucleotides can be introduced to cells via various methods available to those skilled in the art, e.g., gymnotic delivery, transfection, lipofection, etc.

[1387] In certain embodiments, the efficacy of a putative dsRNAi oligonucleotide can be tested in vitro.

[1388] In certain embodiments, the efficacy of a putative dsRNAi oligonucleotide can be tested in vitro using any known method of testing the expression, level and/or activity of a gene or gene product thereof.

[1389] In certain embodiments, dsRNAi soluble aggregates can be observed by immunoblotting.

[1390] In certain embodiments, a dsRNAi oligonucleotide is tested in a cell or animal model of a disease.

[1391] In certain embodiments, an animal model administered a dsRNAi oligonucleotide can be evaluated for safety and/or efficacy.

[1392] In certain embodiments, the effect(s) of administration of a ds oligonucleotide to an animal can be evaluated, including any effects on behavior, inflammation, and toxicity. In certain embodiments, following dosing, animals can be observed for signs of toxicity including trouble grooming, lack of food consumption, and any other signs of lethargy. In certain embodiments, in a mouse model, following administration of a dsRNAi oligonucleotide, the animals can be monitored for timing of onset of a rear paw clasping phenotype.

[1393] In certain embodiments, following administration of a dsRNAi oligonucleotide to an animal, the animal can be sacrificed and analysis of tissues or cells can be performed to determine changes in RNAi activity, or other biochemical or other changes. In certain embodiments, following necropsy, liver, heart, lung, kidney, and spleen can be collected, fixed, and processed for histopathological evaluation (standard light microscopic examination of hematoxylin and eosin-stained tissue slides).

[1394] In certain embodiments, following administration of a dsRNAi oligonucleotide to an animal, behavioral changes can be monitored or assessed. In certain embodiments, such an assessment can be performed using a technique described in the scientific literature.

[1395] Various effects of testing in animals described herein can also be monitored in human subjects or patients following administration of a dsRNAi oligonucleotide.

[1396] In addition, the efficacy of a dsRNAi oligonucleotide in a human subject can be measured by evaluating, after administration of the oligonucleotide, any of various parameters known in the art, including but not limited to a reduction in a symptom, or a decrease in the rate of worsening or onset of a symptom of a disease.

[1397] In certain embodiments, following human treatment with a ds oligonucleotide, or contacting a cell or tissue in vitro with an oligonucleotide, cells and/or tissues are collected for analysis.

[1398] In certain embodiments, in various cells and/or tissues, target nucleic acid levels can be quantitated by methods available in the art, many of which can be accomplished with commercially available kits and materials. Such methods include, e.g., Northern blot analysis, competitive polymerase chain reaction (PCR), quantitative real-time PCR, etc. RNA analysis can be performed on total cellular RNA or poly(A)+ mRNA. Probes and primers are designed to hybridize to a nucleic acid to be detected. Methods for designing real-time PCR probes and primers are well known and widely practiced in the art. For example, to detect and quantify RNAi RNA, an example method comprises isolation of total RNA (e.g., including mRNA) from a cell or animal treated with an oligonucleotide or a composition and subjecting the RNA to reverse transcription and/or quantitative real-time PCR, for example, as described herein, or in: Moon et al. 2012 Cell Metab. 15: 240-246.

[1399] In certain embodiments, protein levels can be evaluated or quantitated in various methods known in the art, e.g., enzyme-linked immunosorbent assay (ELISA), Western blot analysis (immunoblotting), immunocytochemistry, fluorescence-activated cell sorting (FACS), immuno-histochemistry, immunoprecipitation, protein activity assays (for example, caspase activity assays), and quantitative protein assays. Antibodies useful for the detection of mouse, rat, monkey, and human proteins are commercially available or can be generated if needed. For example, various RNAi antibodies have been reported.

[1400] Various technologies are available and/or known in the art for detecting levels of ds oligonucleotides or other nucleic acids. Such technologies are useful for detecting dsRNAi oligonucleotides when administered to assess, e.g., delivery, cell uptake, stability, distribution, etc.

[1401] In certain embodiments, selection criteria are used to evaluate the data resulting from various assays and to select particularly desirable ds oligonucleotides, e.g., desirable dsRNAi oligonucleotides, with certain properties and activities. In certain embodiments, selection criteria include an IC₅₀ of less than about 10 nM, less than about 5 nM or less than about 1 nM. In certain embodiments, selection criteria for a stability assay include at least 50% stability [at least 50% f an oligonucleotide is still remaining and/or detectable] at Day 1. In certain embodiments, selection criteria for a stability assay include at least 50% stability at Day 2. In certain embodiments, selection criteria for a stability assay include at least 50% stability at Day 3. In certain embodiments, selection criteria for a stability assay include at least 50% stability at Day 4. In certain embodiments, selection criteria for a stability assay include at least 50% stability at Day 5. In certain embodiments, selection criteria for a stability assay include at least 80% [at least 80% f the oligonucleotide remains] at Day 5.

[1402] In certain embodiments, efficacy of a dsRNAi oligonucleotide is assessed directly or indirectly by monitoring, measuring or detecting a change in a condition, disorder or disease or a biological pathway.

[1403] In certain embodiments, efficacy of a dsRNAi oligonucleotide is assessed directly or indirectly by monitoring, measuring or detecting a change in a response to be affected by knockdown.

[1404] In certain embodiments, a provided ds oligonucleotide (e.g., a dsRNAi oligonucleotide) can by analyzed by a sequence analysis to determine what other genes (e.g., genes which are not a target gene) have a sequence which is complementary to the base sequence of the provided ds oligonucleotide (e.g., the dsRNAi oligonucleotide) or which have 0, 1, 2 or more mismatches from the base sequence of the provided ds oligonucleotide (e.g., the dsRNAi oligonucleotide). Knockdown, if any, by the ds oligonucleotide of these potential off-targets can be determined to evaluate potential off-target effects of a ds oligonucleotide (e.g., a dsRNAi oligonucleotide). In certain embodiments, an off-target effect is also termed an unintended effect and/or related to hybridization to a bystander (non-target) sequence or gene.

[1405] In certain embodiments, a dsRNAi oligonucleotide which has been evaluated and tested for its ability to provide a particular biological effect (e.g., reduction of level, expression and/or activity of a target gene or a gene product thereof) can be used to treat, ameliorate and/or prevent a condition, disorder or disease.

### 9. Biologically Active Oligonucleotides

[1406] In certain embodiments, the present disclosure encompasses ds oligonucleotides which capable of acting as dsRNAi agents.

[1407] In certain embodiments, provided compositions include one or more oligonucleotides fully or partially complementary to a strand of: structural genes, genes control and/or termination regions, and/or self-replicating systems such as viral or plasmid DNA. In certain embodiments, provided compositions include one or more oligonucleotides that are or act as RNAi agents or other RNA interference reagents (RNAi agents or iRNA agents), shRNA, antisense oligonucleotides, self-cleaving RNAs, ribozymes, fragment thereof and/or variants thereof (such as Peptidyl transferase 23S rRNA, RNase P, Group I and Group II introns, GIR1 branching ribozymes, Leadzyme, Hairpin ribozymes, Hammerhead ribozymes, HDV ribozymes, Mammalian CPEB3 ribozyme, VS ribozymes, glmS ribozymes, CoTC ribozyme, etc.), microRNAs, microRNA mimics, supermirs, aptamers, antimirs, antagomirs, Ul adaptors, triplex-forming oligonucleotides, RNA activators, long non-coding RNAs, short non-coding RNAs (e.g., piRNAs), immunomodulatory oligonucleotides (such as immunostimulatory oligonucleotides, immunoinhibitory oligonucleotides), GNA, LNA, ENA, PNA, TNA, morpholinos, G-quadruplex (RNA and DNA), antiviral oligonucleotides, and decoy oligonucleotides.

[1408] In certain embodiments, provided compositions include one or more hybrid (e.g., chimeric) oligonucleotides. In the context of the present disclosure, the term “hybrid” broadly refers to mixed structural elements of oligonucleotides. Hybrid oligonucleotides may refer to, for example, (1) an oligonucleotide molecule having mixed classes of nucleotides, e.g., part DNA and part RNA within the single molecule (e.g., DNA-RNA); (2) complementary pairs of nucleic acids of different classes, such that DNA:RNA base pairing occurs either intramolecularly or intermolecularly; or both; (3) an oligonucleotide with two or more kinds of the backbone or internucleotide linkages.

[1409] In certain embodiments, provided compositions include one or more oligonucleotide that comprises more than one classes of nucleic acid residues within a single molecule. For example, in any of the embodiments described herein, an oligonucleotide may comprise a DNA portion and an RNA portion. In certain embodiments, an oligonucleotide may comprise an unmodified portion and modified portion.

[1410] Provided ds oligonucleotide compositions can include oligonucleotides containing any of a variety of modifications, for example as described herein. In certain embodiments, particular modifications are selected, for example, in light of intended use. In certain embodiments, it is desirable to modify one or both strands of a double-stranded oligonucleotide (or a double-stranded portion of a single-stranded oligonucleotide). In certain embodiments, the two strands (or portions) include different modifications. In certain embodiments, the two strands include the same modifications. One of skill in the art will appreciate that the degree and type of modifications enabled by methods of the present disclosure allow for numerous permutations of modifications to be made. Examples of such modifications are described herein and are not meant to be limiting.

[1411] The phrase “antisense strand” or “guide strand” as used herein, refers to an oligonucleotide that is substantially or 100% complementary to a target sequence of interest. The phrase “antisense strand” or “guide strand” includes the antisense region of both oligonucleotides that are formed from two separate strands, as well as unimolecular oligonucleotides that are capable of forming hairpin or dumbbell type structures. In reference to a double-stranded RNAi agent such as a siRNA, the antisense strand is the strand preferentially incorporated into RISC, and which targets RISC-mediated knockdown of an RNA target. In reference to a double-stranded RNAi agent, the terms “antisense strand” and “guide strand” are used interchangeably herein; and the terms “sense strand” or “passenger strand” are used interchangeably herein in reference to the strand which is not the antisense strand.

[1412] The phrase “sense strand” refers to an oligonucleotide that has the same nucleoside sequence, in whole or in part, as a target sequence such as a messenger RNA or a sequence of DNA.

[1413] By “target sequence” is meant any nucleic acid sequence whose expression or activity is to be modulated. The target nucleic acid can be DNA or RNA, such as endogenous DNA or RNA, viral DNA or viral RNA, or other RNA encoded by a gene, virus, bacteria, fungus, mammal, or plant. In certain embodiments, a target sequence is associated with a disease or disorder. In reference to RNA interference and RNase H-mediated knockdown, a target sequence is generally an RNA target sequence.

[1414] By “specifically hybridizable” and “complementary” is meant that a nucleic acid can form hydrogen bond(s) with another nucleic acid sequence by either traditional Watson-Crick or other non-traditional types. In reference to the nucleic molecules of the present disclosure, the binding free energy for a nucleic acid molecule with its complementary sequence is sufficient to allow the relevant function of the nucleic acid to proceed, e.g., RNAi activity. Determination of binding free energies for nucleic acid molecules is well known in the art (see, e.g., Turner et al, 1987, CSH Symp. Quant. Biol. LIT pp. 123-133; Frier et al., 1986, Proc. Nat. Acad. Sci. USA83:9373-9377; Turner et al., 1987, J. Am. Chem. Soc. 109:3783-3785)

[1415] A percent complementarity indicates the percentage of contiguous residues in a nucleic acid molecule that can form hydrogen bonds (e.g., Watson-Crick base pairing) with a second nucleic acid sequence (e.g., 5, 6, 7, 8, 9, 10 out of 10 being 50%, 60%, 70%, 80%, 90%, and 100% complementary). “Perfectly complementary” or 100% complementarity means that all the contiguous residues of a nucleic acid sequence will hydrogen bond with the same number of contiguous residues in a second nucleic acid sequence. Less than perfect complementarity refers to the situation in which some, but not all, nucleoside units of two strands can hydrogen bond with each other. “Substantial complementarity” refers to polynucleotide strands exhibiting 90% r greater complementarity, excluding regions of the polynucleotide strands, such as overhangs, that are selected so as to be noncomplementary. Specific binding requires a sufficient degree of complementarity to avoid non-specific binding of the oligomeric compound to non-target sequences under conditions in which specific binding is desired, e.g., under physiological conditions in the case of in vivo assays or therapeutic treatment, or in the case of in vitro assays, under conditions in which the assays are performed. In certain embodiments, non-target sequences differ from corresponding target sequences by at least 5 nucleotides.

[1416] When used as therapeutics, a provided ds oligonucleotide is administered as a pharmaceutical composition. In certain embodiments, the pharmaceutical composition comprises a therapeutically effective amount of a provided oligonucleotide comprising, or a pharmaceutically acceptable salt thereof, and at least one pharmaceutically acceptable inactive ingredient selected from pharmaceutically acceptable diluents, pharmaceutically acceptable excipients, and pharmaceutically acceptable carriers. In certain embodiments, the pharmaceutical composition is formulated for intravenous injection, oral administration, buccal administration, inhalation, nasal administration, topical administration, ophthalmic administration or otic administration. In further embodiments, the pharmaceutical composition is a tablet, a pill, a capsule, a liquid, an inhalant, a nasal spray solution, a suppository, a suspension, a gel, a colloid, a dispersion, a suspension, a solution, an emulsion, an ointment, a lotion, an eye drop or an ear drop.

### 10. Administration of Oligonucleotides and Compositions

[1417] Many delivery methods, regimen, etc. can be utilized in accordance with the present disclosure for administering provided ds oligonucleotides and compositions thereof (typically pharmaceutical compositions for therapeutic purposes), including various technologies known in the art.

[1418] In certain embodiments, a ds oligonucleotide composition, e.g., a dsRNAi oligonucleotide composition, is administered at a dose and/or frequency lower than that of an otherwise comparable reference ds oligonucleotide composition and has comparable or improved effects. In certain embodiments, a chirally controlled ds oligonucleotide composition is administered at a dose and/or frequency lower than that of a comparable, otherwise identical stereorandom reference ds oligonucleotide composition and with comparable or improved effects, e.g., in improving the knockdown of the target transcript.

[1419] In certain embodiments, the present disclosure recognizes that properties and activities, e.g., knockdown activity, stability, toxicity, etc. of ds oligonucleotides and compositions thereof can be modulated and optimized by chemical modifications and/or stereochemistry. In certain embodiments, the present disclosure provides methods for optimizing ds oligonucleotide properties and/or activities through chemical modifications and/or stereochemistry. In certain embodiments, the present disclosure provides ds oligonucleotides and compositions thereof with improved properties and/or activities. Without wishing to be bound by any theory, due to, e.g., their better activity, stability, delivery, distribution, toxicity, pharmacokinetic, pharmacodynamics and/or efficacy profiles, Applicant notes that provided ds oligonucleotides and compositions thereof in certain embodiments can be administered at lower dosage and/or reduced frequency to achieve comparable or better efficacy, and in certain embodiments can be administered at higher dosage and/or increased frequency to provide enhanced effects. In certain embodiments, the present disclosure provides chirally controlled ds oligonucleotides and compositions thereof, wherein the chirally controlled ds oligonucleotides and compositions thereof do not exhibit increased off-target effects relative non-chirally controlled ds oligonucleotides. Moreover, in certain embodiments, the present disclosure provides chirally controlled ds oligonucleotides and compositions thereof, wherein the chirally controlled ds oligonucleotides and compositions thereof exhibit increased Ago2 loading of guide strand relative non-chirally controlled ds oligonucleotides.

[1420] In certain embodiments, the present disclosure provides, in a method of administering a ds oligonucleotide composition comprising a plurality of ds oligonucleotides sharing a common base sequence, the improvement comprising administering a ds oligonucleotide comprising a plurality of ds oligonucleotides that is characterized by improved delivery relative to a reference ds oligonucleotide composition of the same common base sequence.

[1421] In certain embodiments, provided ds oligonucleotides, compositions and methods provide improved delivery. In certain embodiments, provided ds oligonucleotides, compositions and methods provide improved cytoplasmatic delivery. In certain embodiments, improved delivery is to a population of cells. In certain embodiments, improved delivery is to a tissue. In certain embodiments, improved delivery is to an organ. In certain embodiments, improved delivery is to an organism, e.g., a patient or subject. Example structural elements (e.g., chemical modifications, stereochemistry, combinations thereof, etc.), oligonucleotides, compositions and methods that provide improved delivery are extensively described in the present disclosure.

[1422] In certain embodiments, provided ds oligonucleotides, compositions and methods can be delivered to various regions of the central nervous system. For example, but not by way of limitation, in certain embodiments, provided ds oligonucleotides, compositions and methods can be delivered to various regions of the brain. In certain embodiments, provided ds oligonucleotides, compositions and methods can be delivered to the cerebellum. In certain embodiments, provided ds oligonucleotides, compositions and methods can be delivered to the hippocampus. In certain embodiments, provided ds oligonucleotides, compositions and methods can be delivered to the cortex. In certain embodiments, provided ds oligonucleotides, compositions and methods can be delivered to the striatum. In certain embodiments, provided ds oligonucleotides, compositions and methods can be delivered to the spinal cord. In certain embodiments, provided ds oligonucleotides, compositions and methods can be delivered to the brain stem.

[1423] In certain embodiments, provided ds oligonucleotides, compositions and methods can be delivered to various regions of the central nervous system without conjugation to a targeting ligand (e.g., peptide, sugar, etc.), without a delivery system (e.g., lipid nanoparticles, etc.), or combinations thereof.

[1424] Various dosing regimens can be utilized to administer ds oligonucleotides and compositions of the present disclosure. In certain embodiments, multiple unit doses are administered, separated by periods of time. In certain embodiments, the present disclosure provides chirally controlled ds oligonucleotides and compositions thereof, wherein the chirally controlled ds oligonucleotides and compositions thereof do not exhibit diminished attributes relative non-chirally controlled ds oligonucleotides upon repeated dosing. For example, but not by way of limitation, such attributes can comprise one or more markers of liver function. Exemplary, markers of liver function include, but are not limited to ALT, alanine transaminase; AST, aspartate transaminase; ALP, alkaline phosphatase; ALB, albumin; TP, total protein. In certain embodiments, a given composition has a recommended dosing regimen, which may involve one or more doses. In certain embodiments, a dosing regimen comprises a plurality of doses each of which are separated from one another by a time period of the same length; in certain embodiments, a dosing regimen comprises a plurality of doses and at least two different time periods separating individual doses. In certain embodiments, all doses within a dosing regimen are of the same unit dose amount. In certain embodiments, different doses within a dosing regimen are of different amounts. In certain embodiments, a dosing regimen comprises a first dose in a first dose amount, followed by one or more additional doses in a second dose amount different from the first dose amount. In certain embodiments, a dosing regimen comprises a first dose in a first dose amount, followed by one or more additional doses in a second (or subsequent) dose amount that is the same as or different from the first dose (or another prior dose) amount. In certain embodiments, a chirally controlled ds oligonucleotide composition is administered according to a dosing regimen that differs from that utilized for a non-chirally controlled (e.g., stereorandom) ds oligonucleotide composition of the same sequence, and/or of a different chirally controlled ds oligonucleotide composition of the same sequence. In certain embodiments, a chirally controlled ds oligonucleotide composition is administered according to a dosing regimen that is reduced as compared with that of a chirally uncontrolled (e.g., stereorandom) ds oligonucleotide composition of the same sequence in that it achieves a lower level of total exposure over a given unit of time, involves one or more lower unit doses, and/or includes a smaller number of doses over a given unit of time. In certain embodiments, a chirally uncontrolled ds oligonucleotide is administered according to a dosing regimen that extends for a longer period of time than does that of a chirally uncontrolled (e.g., stereorandom) ds oligonucleotide composition of the same sequence. Without wishing to be limited by theory, Applicant notes that in certain embodiments, the shorter dosing regimen, and/or longer time periods between doses, may be due to the improved stability, bioavailability, and/or efficacy of a chirally controlled ds oligonucleotide composition. In certain embodiments, with their improved delivery (and other properties), provided compositions can be administered in lower dosages and/or with lower frequency to achieve biological effects, for example, clinical efficacy.

[1425] In certain embodiments, provided ds oligonucleotides, compositions and methods provide durable effects. In certain embodiments, the compositions of the present disclosure can maintain efficacy for up to 14 days. In certain embodiments, the compositions of the present disclosure can maintain efficacy for up to 56 days. In certain embodiments, durable effects can be achieved in the absence of substantial neurotoxicity. For example, but not by way of limitatation, such durable effects can be achieved while eliciting little or no detectable or only transiently detectable elevation of neuroinflammation markers and little or no detectable decrease in markers of Purkinje cell loss. In certain embodiments, there is no significant expression changes observed in Purkinjie cell markers associated with neurotoxicity. In certain embodiments, such durable effects can be achieved in the absence of conjugation of the ds oligonucleotide to a targeting ligand (e.g., peptide, sugar, etc.), without a delivery system (e.g., lipid nanoparticles, etc.), or combinations thereof.

### 11. Pharmaceutical Compositions

[1426] When used as therapeutics, a provided ds oligonucleotide, e.g., a dsRNAi oligonucleotide, or ds oligonucleotide composition thereof is typically administered as a pharmaceutical composition. In certain embodiments, the present disclosure provides pharmaceutical compositions comprising a provided compound, e.g., a ds oligonucleotide, or a pharmaceutically acceptable salt thereof, and a pharmaceutical carrier. In certain embodiments, for therapeutic and clinical purposes, ds oligonucleotides of the present disclosure are provided as pharmaceutical compositions. As appreciated by those skilled in the art, ds oligonucleotides of the present disclosure can be provided in their acid, base or salt forms. In certain embodiments, ds oligonucleotides can be in acid forms, e.g., for natural phosphate linkages, in the form of —OP(O)(OH)O—; for phosphorothioate internucleotidic linkages, in the form of —OP(O)(SH)O—; etc. In certain embodiments, dsRNAi oligonucleotides can be in salt forms, e.g., for natural phosphate linkages, in the form of —OP(O)(ONa)O— in sodium salts; for phosphorothioate internucleotidic linkages, in the form of —OP(O)(SNa)O— in sodium salts; etc. Unless otherwise noted, ds oligonucleotides of the present disclosure can exist in acid, base and/or salt forms.

[1427] In certain embodiments, a pharmaceutical composition is a liquid composition. In certain embodiments, a pharmaceutical composition is provided by dissolving a solid ds oligonucleotide composition, or diluting a concentrated ds oligonucleotide composition, using a suitable solvent, e.g., water or a pharmaceutically acceptable buffer. In certain embodiments, liquid compositions comprise anionic forms of provided ds oligonucleotides and one or more cations. In certain embodiments, liquid compositions have pH values in the weak acidic, about neutral, or basic range. In certain embodiments, pH of a liquid composition is about a physiological pH, e.g., about 7.4.

[1428] In certain embodiments, a provided ds oligonucleotide is formulated for administration to and/or contact with a body cell and/or tissue expressing its target. For example, in certain embodiments, a provided dsRNAi oligonucleotide is formulated for administration to a body cell and/or tissue. In certain embodiments such a body cell and/or tissue is selected from the group consisting of immune cells, blood cells, cardiac cells, lung cells, muscle cells, optic cells, liver cells, kidney cells, brain cells, cells of the central nervous system, and cells of the peripheral nervous system. In certain embodiments, such a body cell and/or tissue are a neuron or a cell and/or tissue of the liver. In certain embodiments, broad distribution of ds oligonucleotides and compositions may be achieved with intraparenchymal administration, intrathecal administration, or intracerebroventricular administration. In certain embodiments, the pharmaceutical composition is formulated for intravenous injection, oral administration, buccal administration, inhalation, nasal administration, topical administration, ophthalmic administration or optic administration. In certain embodiments, the pharmaceutical composition is a tablet, a pill, a capsule, a liquid, an inhalant, a nasal spray solution, a suppository, a suspension, a gel, a colloid, a dispersion, a suspension, a solution, an emulsion, an ointment, a lotion, an eye drop or an ear drop.

[1429] In certain embodiments, the present disclosure provides a pharmaceutical composition comprising chirally controlled ds oligonucleotide or composition thereof, in admixture with a pharmaceutically acceptable inactive ingredient (e.g., a pharmaceutically acceptable excipient, a pharmaceutically acceptable carrier, etc.). One of skill in the art will recognize that the pharmaceutical compositions include pharmaceutically acceptable salts of provided ds oligonucleotide or compositions. In certain embodiments, a pharmaceutical composition is a chirally controlled ds oligonucleotide composition. In certain embodiments, a pharmaceutical composition is a stereopure ds oligonucleotide composition.

[1430] In certain embodiments, the present disclosure provides salts of ds oligonucleotides and pharmaceutical compositions thereof. In certain embodiments, a salt is a pharmaceutically acceptable salt. In certain embodiments, a pharmaceutical composition comprises a ds oligonucleotide, optionally in its salt form, and a sodium salt. In certain embodiments, a pharmaceutical composition comprises a ds oligonucleotide, optionally in its salt form, and sodium chloride. In certain embodiments, each hydrogen ion of a ds oligonucleotide that may be donated to a base (e.g., under conditions of an aqueous solution, a pharmaceutical composition, etc.) is replaced by a non-H⁺ cation. For example, in certain embodiments, a pharmaceutically acceptable salt of a ds oligonucleotide is an all-metal ion salt, wherein each hydrogen ion (for example, of —OH, —SH, etc.) of each internucleotidic linkage (e.g., a natural phosphate linkage, a phosphoryl guanidine internucleotidic linkage, a phosphorothioate internucleotidic linkage, etc.) is replaced by a metal ion. Various suitable metal salts for pharmaceutical compositions are widely known in the art and can be utilized in accordance with the present disclosure. In certain embodiments, a pharmaceutically acceptable salt is a sodium salt. In certain embodiments, a pharmaceutically acceptable salt is magnesium salt. In certain embodiments, a pharmaceutically acceptable salt is a calcium salt. In certain embodiments, a pharmaceutically acceptable salt is a potassium salt. In certain embodiments, a pharmaceutically acceptable salt is an ammonium salt (cation N(R)₄⁺). In certain embodiments, a pharmaceutically acceptable salt comprises one and no more than one types of cation. In certain embodiments, a pharmaceutically acceptable salt comprises two or more types of cation. In certain embodiments, a cation is Li⁺, Na⁺, K⁺, Mg²⁺ or Ca²⁺. In certain embodiments, a pharmaceutically acceptable salt is an all-sodium salt. In certain embodiments, a pharmaceutically acceptable salt is an all-sodium salt, wherein each internucleotidic linkage which is a natural phosphate linkage (acid form —O—P(O)(OH)—O—), if any, exists as its sodium salt form (—O—P(O)(ONa)—O—), and each internucleotidic linkage which is a phosphorothioate or a phosphoryl guanidine internucleotidic linkage (acid form —O—P(O)(SH)—O—), if any, exists as its sodium salt form (—O—P(O)(SNa)—O—).

[1431] Various technologies for delivering nucleic acids and/or oligonucleotides are known in the art can be utilized in accordance with the present disclosure. For example, a variety of supramolecular nanocarriers can be used to deliver nucleic acids. Example nanocarriers include, but are not limited to liposomes, cationic polymer complexes and various polymeric compounds. Complexation of nucleic acids with various polycations is another approach for intracellular delivery; this includes use of PEGylated polycations, polyethyleneamine (PEI) complexes, cationic block co-polymers, and dendrimers. Several cationic nanocarriers, including PEI and polyamidoamine dendrimers help to release contents from endosomes. Other approaches include use of polymeric nanoparticles, microspheres, liposomes, dendrimers, biodegradable polymers, conjugates, prodrugs, inorganic colloids such as sulfur or iron, antibodies, implants, biodegradable implants, biodegradable microspheres, osmotically controlled implants, lipid nanoparticles, emulsions, oily solutions, aqueous solutions, biodegradable polymers, poly(lactide-coglycolic acid), poly(lactic acid), liquid depot, polymer micelles, quantum dots and lipoplexes. In certain embodiments, a ds oligonucleotide is conjugated to another molecule.

[1432] In therapeutic and/or diagnostic applications, compounds, e.g., ds oligonucleotides, of the disclosure can be formulated for a variety of modes of administration, including systemic and topical or localized administration. Techniques and formulations generally may be found in Remington, The Science and Practice of Pharmacy (20th ed. 2000).

[1433] Pharmaceutically acceptable salts for basic moieties are generally well known to those of ordinary skill in the art, and may include, e.g., acetate, benzenesulfonate, besylate, benzoate, bicarbonate, bitartrate, bromide, calcium edetate, camsylate, carbonate, citrate, edetate, edisylate, estolate, esylate, fumarate, gluceptate, gluconate, glutamate, glycollylarsanilate, hexylresorcinate, hydrabamine, hydrobromide, hydrochloride, hydroxynaphthoate, iodide, isethionate, lactate, lactobionate, malate, maleate, mandelate, mesylate, mucate, napsylate, nitrate, pamoate (embonate), pantothenate, phosphate/diphosphate, polygalacturonate, salicylate, stearate, subacetate, succinate, sulfate, tannate, tartrate, or teoclate. Other pharmaceutically acceptable salts may be found in, for example, Remington, The Science and Practice of Pharmacy (20th ed. 2000). Preferred pharmaceutically acceptable salts include, for example, acetate, benzoate, bromide, carbonate, citrate, gluconate, hydrobromide, hydrochloride, maleate, mesylate, napsylate, pamoate (embonate), phosphate, salicylate, succinate, sulfate, or tartrate.

[1434] In certain embodiments, dsRNAi oligonucleotides are formulated in pharmaceutical compositions described in WO 2005/060697, WO 2011/076807 or WO 2014/136086.

[1435] Depending on the specific conditions, disorders or diseases being treated, provided agents, e.g., ds oligonucleotides, may be formulated into liquid or solid dosage forms and administered systemically or locally. Provided ds oligonucleotides may be delivered, for example, in a timed- or sustained-low release form as is known to those skilled in the art. Techniques for formulation and administration may be found in Remington, The Science and Practice of Pharmacy (20th ed. 2000). Suitable routes may include oral, buccal, by inhalation spray, sublingual, rectal, transdermal, vaginal, transmucosal, nasal or intestinal administration; parenteral delivery, including intramuscular, subcutaneous, intramedullary injections, as well as intrathecal, direct intraventricular, intravenous, intra-articullar, intra-stemal, intra-synovial, intra-hepatic, intralesional, intracranial, intraperitoneal, intranasal, or intraocular injections or another mode of delivery.

[1436] For injection, provided agents, e.g., oligonucleotides may be formulated and diluted in aqueous solutions, such as in physiologically compatible buffers such as Hank's solution, Ringer's solution, or physiological saline buffer. For such transmucosal administration, penetrants appropriate to the barrier to be permeated are used in the formulations. Such penetrants are generally known in the art and can be utilized in accordance with the present disclosure.

[1437] Use of pharmaceutically acceptable carriers to formulate compounds, e.g., provided ds oligonucleotides, for the practice of the disclosure into dosages suitable for various mods of administration is well known in the art. With proper choice of carrier and suitable manufacturing practice, compositions of the present disclosure, e.g., those formulated as solutions, may be administered via various routes, e.g., parenterally, such as by intravenous injection.

[1438] In certain embodiments, a composition comprising a dsRNAi oligonucleotide further comprises any or all of calcium chloride dihydrate, magnesium chloride hexahydrate, potassium chloride, sodium chloride, sodium phosphate dibasic anhydrous, sodium phosphate, monobasic dihydrate, and/or water for Injection. In certain embodiments, a composition further comprises any or all of calcium chloride dihydrate (0.21 mg) USP, magnesium chloride hexahydrate (0.16 mg) USP, potassium chloride (0.22 mg) USP, sodium chloride (8.77 mg) USP, sodium phosphate dibasic anhydrous (0.10 mg) USP, sodium phosphate monobasic dihydrate (0.05 mg) USP, and Water for Injection USP.

[1439] In certain embodiments, a composition comprising a ds oligonucleotide further comprises any or all of: cholesterol, (6Z,9Z,28Z,31Z)-heptatriaconta-6,9,28,31-tetraen-19-yl-4-(dimethylamino) butanoate(DLin-MC3-DMA), 1,2-distearoyl-sn-glycero-3-phosphocholine (DSPC), alpha-(3′-{[1,2-di(myristyloxy)propanoxy]carbonylamino}propyl)-omega-methoxy, polyoxyethylene(PEG2000-C-DMG), potassium phosphate monobasic anhydrous NF, sodium chloride, sodium phosphate dibasic heptahydrate, and Water for Injection. In certain embodiments, the pH of a composition comprising a RNAi oligonucleotide is -7.0. In certain embodiments, a composition comprising an oligonucleotide further comprises any or all of: 6.2 mg cholesterol USP, 13.0 mg (6Z,9Z,28Z,31Z)-heptatriaconta-6,9,28,31-tetraen-19-yl-4-(dimethylamino) butanoate(DLin-MC3-DMA), 3.3 mg 1,2-distearoyl-sn-glycero-3-phosphocholine (DSPC), 1.6 mg α-(3′-{[1,2-di(myristyloxy)propanoxy]carbonylamino}propyl)-ω-methoxy, polyoxyethylene(PEG2000—C-DMG), 0.2 mg potassium phosphate monobasic anhydrous NF, 8.8 mg sodium chloride USP, 2.3 mg sodium phosphate dibasic heptahydrate USP, and Water for Injection USP, in an approximately 1 mL total volume.

[1440] Provided compounds, e.g., ds oligonucleotides, can be formulated readily using pharmaceutically acceptable carriers well known in the art into dosages suitable for oral administration. In certain embodiments, such carriers enable provided oligonucleotides to be formulated as tablets, pills, capsules, liquids, gels, syrups, slurries, suspensions and the like, for, e.g., oral ingestion by a subject (e.g., patient) to be treated.

[1441] For nasal or inhalation delivery, provided compounds, e.g., ds oligonucleotides, may be formulated by methods known to those of skill in the art, and may include, e.g., examples of solubilizing, diluting, or dispersing substances such as saline, preservatives, such as benzyl alcohol, absorption promoters, and fluorocarbons.

[1442] In certain embodiments, methods of specifically localizing provided compounds, e.g., ds oligonucleotides, such as by bolus injection, may decrease median effective concentration (EC50) by a factor of 20, 25, 30, 35, 40, 45 or 50. In certain embodiments, a targeted tissue is brain tissue. In certain embodiments, a targeted tissue is striatal tissue. In certain embodiments, decreasing EC50 is desirable because it reduces the dose required to achieve a pharmacological result in a patient in need thereof.

[1443] In certain embodiments, a provided ds oligonucleotide is delivered by injection or infusion once every month, every two months, every 90 days, every 3 months, every 6 months, twice a year or once a year.

[1444] Pharmaceutical compositions suitable for use in the present disclosure include compositions wherein the active ingredients, e.g., ds oligonucleotides, are contained in effective amounts to achieve their intended purposes. Determination of the effective amounts is well within the capability of those skilled in the art, especially in light of the detailed disclosure provided herein.

[1445] In addition to active ingredients, pharmaceutical compositions may contain suitable pharmaceutically acceptable carriers comprising excipients and auxiliaries which facilitate processing of an active compound into preparations which can be used pharmaceutically. Preparations formulated for oral administration may be in the form of tablets, dragees, capsules, or solutions.

[1446] In certain embodiments, pharmaceutical compositions for oral use can be obtained by combining an active compound with solid excipients, optionally grinding a resulting mixture, and processing the mixture of granules, after adding suitable auxiliaries, if desired, to obtain tablets or dragee cores. Suitable excipients are, in particular, fillers such as sugars, including lactose, sucrose, mannitol, or sorbitol; cellulose preparations, for example, maize starch, wheat starch, rice starch, potato starch, gelatin, gum tragacanth, methyl cellulose, hydroxypropylmethyl-cellulose, sodium carboxymethyl-cellulose (CMC), and/or polyvinylpyrrolidone (PVP: povidone). If desired, disintegrating agents may be added, such as the cross-linked polyvinylpyrrolidone, agar, or alginic acid or a salt thereof such as sodium alginate.

[1447] In certain embodiments, dragee cores are provided with suitable coatings. For this purpose, concentrated sugar solutions may be used, which may optionally contain gum arabic, talc, polyvinylpyrrolidone, carbopol gel, polyethylene glycol (PEG), and/or titanium dioxide, lacquer solutions, and suitable organic solvents or solvent mixtures. Dye-stuffs or pigments may be added to the tablets or dragee coatings for identification or to characterize different combinations of active compound doses.

[1448] Pharmaceutical preparations that can be used orally include push-fit capsules made of gelatin, as well as soft, sealed capsules made of gelatin, and a plasticizer, such as glycerol or sorbitol. Push-fit capsules can contain active ingredients, e.g., ds oligonucleotides, in admixture with fillers such as lactose, binders such as starches, and/or lubricants such as talc or magnesium stearate and, optionally, stabilizers. In soft capsules, active compounds, e.g., ds oligonucleotides, may be dissolved or suspended in suitable liquids, such as fatty oils, liquid paraffin, or liquid polyethylene glycols (PEGs). In addition, stabilizers may be added.

[1449] In certain embodiments, a provided composition comprises a lipid. In certain embodiments, a lipid is conjugated to an active compound, e.g., an oligonucleotide. In certain embodiments, a lipid is not conjugated to an active compound. In certain embodiments, a lipid comprises a C₁₀-C₄₀ linear, saturated or partially unsaturated, aliphatic chain. In certain embodiments, a lipid comprises a C₁₀-C₄₀ linear, saturated or partially unsaturated, aliphatic chain, optionally substituted with one or more C₁₋₄ aliphatic group. In certain embodiments, the lipid is selected from the group consisting of lauric acid, myristic acid, palmitic acid, stearic acid, oleic acid, linoleic acid, alpha-linolenic acid, gamma-linolenic acid, docosahexaenoic acid (cis-DHA), turbinaric acid and dilinoleyl alcohol. In certain embodiments, an active compound is a provided oligonucleotide. In certain embodiments, a composition comprises a lipid and an active compound, and further comprises another component which is another lipid or a targeting compound or moiety. In certain embodiments, a lipid is an amino lipid; an amphipathic lipid; an anionic lipid; an apolipoprotein; a cationic lipid; a low molecular weight cationic lipid; a cationic lipid such as CLinDMA and DLinDMA; an ionizable cationic lipid; a cloaking component; a helper lipid; a lipopeptide; a neutral lipid; a neutral zwitterionic lipid; a hydrophobic small molecule; a hydrophobic vitamin; a PEG-lipid; an uncharged lipid modified with one or more hydrophilic polymers; phospholipid; a phospholipid such as 1,2-dioleoyl-sn-glycero-3-phosphoethanolamine; a stealth lipid; a sterol; a cholesterol; a targeting lipid; or another lipid described herein or reported in the art suitable for pharmaceutical uses. In certain embodiments, a composition comprises a lipid and a portion of another lipid capable of mediating at least one function of another lipid. In certain embodiments, the lipid comprises a C₁₂ linear, saturated, aliphatic chain. In certain embodiments, the lipid comprises a C₁₆ linear, saturated, aliphatic chain. In certain embodiments, the lipid is incorporated into a phosphoryl guanidine chiral center. In certain embodiments of the compositions and methods described herein, the composition does not comprise a lipid. In certain of such compositions that do not comprise a lipid, the activity of the composition that does not comprise a lipid is preserved relative to the same composition comprising a lipid.

[1450] In certain embodiments, a targeting compound or moiety is capable of targeting a compound (e.g., a ds oligonucleotide) to a particular cell or tissue or subset of cells or tissues. In certain embodiments, a targeting moiety is designed to take advantage of cell- or tissue-specific expression of particular targets, receptors, proteins, or another subcellular component. In certain embodiments, a targeting moiety is a ligand (e.g., a small molecule, antibody, peptide, protein, carbohydrate, aptamer, etc.) that targets a composition to a cell or tissue, and/or binds to a target, receptor, protein, or another subcellular component.

[1451] Certain example lipids for delivery of an active compound, e.g., a ds oligonucleotide, allow (e.g., do not prevent or interfere with) the function of an active compound. In certain embodiments, a lipid is lauric acid, myristic acid, palmitic acid, stearic acid, oleic acid, linoleic acid, alpha-linolenic acid, gamma-linolenic acid, docosahexaenoic acid (cis-DHA), turbinaric acid or dilinoleyl alcohol.

[1452] As described in the present disclosure, lipid conjugation, such as conjugation with fatty acids, may improve one or more properties of ds oligonucleotides.

[1453] In certain embodiments, a composition for delivery of an active compound, e.g., a ds oligonucleotide, is capable of targeting an active compound to particular cells or tissues as desired. In certain embodiments, a composition for delivery of an active compound is capable of targeting an active compound to a muscle cell or tissue. In certain embodiments, the present disclosure provides compositions and methods related to delivery of active compounds, wherein the compositions comprise an active compound and a lipid. In various embodiments to a hepatic cell or tissue, a lipid is selected from lauric acid, myristic acid, palmitic acid, stearic acid, oleic acid, linoleic acid, alpha-linolenic acid, gamma-linolenic acid, docosahexaenoic acid (cis-DHA), turbinaric acid and dilinoleyl alcohol.

[1454] In certain embodiments, a dsRNAi oligonucleotide is delivered to the central nervous or hepetic system, or a cell or tissue or portion thereof, via a delivery method or composition designed for delivery of nucleic acids to the central nervous or hepetic system, or a cell or tissue or portion thereof.

[1455] In certain embodiments, a dsRNAi oligonucleotide is delivered via a composition comprising any one or more of, or a method of delivery involving the use of any one or more of: transferrin receptor-targeted nanoparticle; cationic liposome-based delivery strategy; cationic liposome; polymeric nanoparticle; viral carrier; retrovirus; adeno-associated virus; stable nucleic acid lipid particle; polymer; cell-penetrating peptide; lipid; dendrimer; neutral lipid; cholesterol; lipid-like molecule; fusogenic lipid; hydrophilic molecule; polyethylene glycol (PEG) or a derivative thereof; shielding lipid; PEGylated lipid; PEG-C-DMSO; PEG-C-DMSA; DSPC; ionizable lipid; a guanidinium-based cholesterol derivative; ion-coated nanoparticle; metal-ion coated nanoparticle; manganese ion-coated nanoparticle; angubindin-1; nanogel; incorporation of the dsRNAi into a branched nucleic acid structure; and/or incorporation of the dsRNAi into a branched nucleic acid structure comprising 2, 3, 4 or more oligonucleotides.

[1456] In certain embodiments, a composition comprising a ds oligonucleotide is lyophilized. In certain embodiments, a composition comprising a ds oligonucleotide is lyophilized, and the lyophilized ds oligonucleotide is in a vial. In certain embodiments, the vial is back filled with nitrogen. In certain embodiments, the lyophilized ds oligonucleotide composition is reconstituted prior to administration. In certain embodiments, the lyophilized ds oligonucleotide composition is reconstituted with a sodium chloride solution prior to administration. In certain embodiments, the lyophilized ds oligonucleotide composition is reconstituted with a 0.9% sodium chloride solution prior to administration. In certain embodiments, reconstitution occurs at the clinical site for administration. In certain embodiments, in a lyophilized composition, a ds oligonucleotide composition is chirally controlled or comprises at least one chirally controlled internucleotidic linkage and/or the ds oligonucleotide targets.

### II. EXEMPLIFICATION

[1457] Various technologies can be utilized to assess properties and/or activities of provided oligonucleotides and compositions thereof. Some such technologies are described in this Example. Those skilled in the art appreciate that many other technologies can be readily utilized. As demonstrated herein, provided oligonucleotides and compositions, among other things, can be highly active, e.g., in reducing levels of their target nucleic acids. Certain examples of provided technologies (compounds (oligonucleotides, reagents, etc.), compositions, methods (methods of preparation, use, assessment, etc.), etc.) were presented herein.

### Example 1. Oligonucleotide Synthesis

[1458] Various technologies for preparing oligonucleotides and oligonucleotide compositions (both stereorandom and chirally controlled) are known and can be utilized in accordance with the present disclosure, including, for example, those in U.S. Pat. Nos. 9,394,333, 9,744,183, 9,605,019, 9,598,458, 9,982,257, U.S. Ser. No. 10/160,969, U.S. Ser. No. 10/479,995, US 2020/0056173, US 2018/0216107, US 2019/0127733, U.S. Ser. No. 10/450,568, US 2019/0077817, US 2019/0249173, US 2019/0375774, WO 2018/223056, WO 2018/223073, WO 2018/223081, WO 2018/237194, WO 2019/032607, WO 2019/055951, WO 2019/075357, WO 2019/200185, WO 2019/217784, WO 2019/032612, WO 2020/191252, and/or WO 2021/071858, the methods and reagents of each of which are incorporated herein by reference. Stereorandom and chirally controlled guide strand sequences were prepared utilizing the synthetic procedures as exemplified in above mentioned disclosures. Respective passenger strands were designed to have covalently linked GalNAc moiety as delivery vehicle at either end of sequences. Oligonucleotides with 5′-GalNAc modifications were synthesized by coupling C₆-amino modifier linker at the 5′-end of sequence. Oligonucleotides with 3′-GalNAc moiety as delivery vehicle were synthesized by utilizing 3′-C6 amino modified support. The single strand was cleaved from CPG by using deprotection condition as exemplified in earlier disclosures. The resulting amino group containing crude oligonucleotide was purified by ion exchange chromatography on AKTA pure system using a sodium chloride gradient. Desired product was desalted and further used for conjugation with GalNAc acid. After conjugation reaction was found to be complete the material was further purified by ion exchange chromatography and desalted to achieve desired material. For introduction of PN linkages in guide and passenger strands, specific PN coupling cycles were introduced at desired positions in oligonucleotide sequence utilizing the conditions as exemplified in WO2019/200185.

[1459] In certain embodiments, oligonucleotides were prepared using suitable chiral auxiliaries, e.g., DPSE and PSM chiral auxiliaries. Various oligonucleotides, e.g., those in Table 1, and compositions thereof, were prepared in accordance with the present disclosure.

[1460] Various technologies can be utilized to assess properties and/or activities of provided oligonucleotides and compositions thereof. Some such technologies are described in this Example. Those skilled in the art appreciate that many other technologies can be readily utilized. As demonstrated herein, provided oligonucleotides and compositions, among other things, can be highly active, e.g., in reducing levels of their target nucleic acids.

### ABBREVIATION

[1461] 1× reagent: TEA-3HF:TEA:H₂O: DMSO=5.0:1.8:15.5:77.7 (v/v/v/v)
[1462] ADIH: 2-azido-1,3-dimethylimidazolium hexafluorophosphate
[1463] CMIMT: N-cyanomethylimidazolium triflate
[1464] CPG: controlled pore glass
[1465] DCM: dichloromethane, CH₂Cl₂
[1466] DIPEA: diisopropylethylamine
[1467] DMSO: dimethylsulfoxide
[1468] DMTr: 4,4′-dimethoxytrityl
[1469] GalNAc: N-acetylgalactosamine
[1470] HF: hydrogen fluoride
[1471] HATU: 1-[bis(dimethylamino)methylene]-1H-1,2,3-triazolo[4,5-b]pyridinium 3-oxide hexafluorophosphate
[1472] IBN: isobutyronitrile
[1473] MeCN: acetonitrile
[1474] MeIm: N-methylimidazole
[1475] TCA: trichloroacetic acid
[1476] TEA: triethylamine
[1477] XH: xanthane hydride

### General Procedure for the Synthesis of Chiral-Oligos (25 μMol Scale)

[1478] The automated solid-phase synthesis of chiral-oligos was performed according to the cycles shown in Table 16 (regular amidite cycle, for PO linkages), Table 17 (regular amidite cycle, for stereo-random PS linkages), Table 18 (DPSE amidite cycle, for chiral PS linkages), and Table 19 (PSM amidite cycle, for chiral PN linkages).

TABLE 2
Regular Amidite Synthetic Cycle for PO linkages

| step | operation | reagents and solvent | volume | | waiting time | |
|---|---|---|---|---|---|---|
| 1 | detritylation | 3% TCA/DCM | 10 | mL | 65 | s |
| 2 | coupling | 0.2M monomer/20% IBN-MeCN | 0.5 | mL | 8 | min |
| | | 0.5M CMIMT/MeCN | 1.0 | mL | | |
| 3 | oxidation | 50 mM I₂/pyridine-H₂O (9:1, v/v) | 2.0 | mL | 1 | min |
| 4 | cap-2 | 20% Ac₂O, 30% 2,6-lutidine/MeCN | 1.0 | mL | 45 | s |

| | | |
|---|---|---|
| 20% MeIm/MeCN | 1.0 | mL |

TABLE 3
Regular Amidite Synthetic Cycle for stereo-random PS linkages

| step | operation | reagents and solvent | volume | | waiting time | |
|---|---|---|---|---|---|---|
| 1 | detritylation | 3% TCA/DCM | 10 | mL | 65 | s |
| 2 | coupling | 0.2M monomer/20% IBN-MeCN | 0.5 | mL | 8 | min |
| | | 0.5M CMIMT/MeCN | 1.0 | mL | | |
| 3 | sulfurization | 0.2M XH/pyridine | 2.0 | mL | 6 | min |
| 4 | cap-2 | 20% Ac₂O, 30% 2,6-lutidine/MeCN | 1.0 | mL | 45 | s |

| | | |
|---|---|---|
| 20% MeIm/MeCN | 1.0 | mL |

TABLE 4
DPSE Amidite Synthetic Cycle for chiral PS linkages

| step | operation | reagents and solvent | volume | | waiting time | |
|---|---|---|---|---|---|---|
| 1 | detritylation | 3% TCA/DCM | 10 | mL | 65 | s |
| 2 | coupling | 0.2M monomer/20% IBN-MeCN | 0.5 | mL | 8 | min |
| | | 0.5M CMIMT/MeCN | 1.0 | mL | | |
| 3 | cap-1 | 20% Ac₂O, 30% 2,6-lutidine/MeCN | 2.0 | mL | 2 | min |
| 4 | sulfurization | 0.2M XH/pyridine | 2.0 | mL | 6 | min |
| 5 | cap-2 | 20% Ac₂O, 30% 2,6-lutidine/MeCN | 1.0 | mL | 45 | s |

| | | |
|---|---|---|
| 20% MeIm/MeCN | 1.0 | mL |

TABLE 5
PSM Amidite Synthetic Cycle for chiral PN linkages

| step | operation | reagents and solvent | volume | | waiting time | |
|---|---|---|---|---|---|---|
| 1 | detritylation | 3% TCA/DCM | 10 | mL | 65 | s |
| 2 | coupling | 0.2M monomer/20% IBN-MeCN | 0.5 | mL | 8 | min |
| | | 0.5M CMIMT/MeCN | 1.0 | mL | | |
| 3 | cap-1 | 20% Ac₂O, 30% 2,6-lutidine/MeCN | 2.0 | mL | 2 | min |
| 4 | imidation | 0.5M ADIH reagent/MeCN | 2.0 | mL | 6 | min |
| 5 | cap-2 | 20% Ac₂O, 30% 2,6-lutidine/MeCN | 1.0 | mL | 45 | s |

| | | |
|---|---|---|
| 20% MeIm/MeCN | 1.0 | mL |

1. In some embodiments, preparations include one or more DPSE and/or PSM cycles

### General Procedure for the C&D Conditions (25 μmol Scale)

[1479] After completion of the synthesis, the CPG solid support was dried and transferred into 50 mL plastic tube. The CPG was treated with 1× reagent (2.5 mL; 100 μL/umol) for 3 h at 28° C., then added conc. NH₃ (5.0 mL; 200 μL/umol) for 24 h at 37° C. The reaction mixture was cooled to room temperature and the CPG was separated by membrane filtration, washed with 15 mL of H₂O. The crude material (filtrate) was analyzed by LTQ and RP-UPLC.

### General Procedure for the GalNAc Conjugation Conditions (1 μmol Scale)

[1480] Into a plastic tube, tri-GalNAc (2.0 eq.), HATU (1.9 eq.), and DIPEA (10 eq.) were dissolved in anhydrous MeCN (0.5 mL). The mixture was stirred for 10 min at room temperature, then the mixture was added into the amino-oligo (1 mol) in H₂O (1 mL) and stirred for 1 h at 37° C. The reaction was monitored by LC-MS and RP-UPLC. After the reaction was completed, the resultant GalNAc-conjugated oligo was treated with conc. NH₃ (2 mL) for 1 h at 37° C. The solution was concentrated under vacuum to remove MeCN and conc. NH₃. The residue was then dissolved in H₂O (10 mL) for reversed phase purification.

[1481] While various embodiments have been described and illustrated herein, those of ordinary skill in the art will readily envision a variety of other means and/or structures for performing the functions and/or obtaining the results and/or one or more of the advantages described in the present disclosure, and each of such variations and/or modifications is deemed to be included. More generally, those skilled in the art will readily appreciate that all parameters, dimensions, materials, and configurations described herein are meant to be example and that the actual parameters, dimensions, materials, and/or configurations may depend upon the specific application or applications for which the teachings of the present disclosure is/are used. Those skilled in the art will recognize, or be able to ascertain using no more than routine experimentation, many equivalents to the embodiments of the present disclosure. It is, therefore, to be understood that the foregoing embodiments are presented by way of example only and that, within the scope of the appended claims and equivalents thereto, claimed technologies may be practiced otherwise than as specifically described and claimed. In addition, any combination of two or more features, systems, articles, materials, kits, and/or methods, if such features, systems, articles, materials, kits, and/or methods are not mutually inconsistent, is included within the scope of the present disclosure.

### Example 2. Provided Oligonucleotides and Compositions are Active In Vivo

[1482] In vivo determination of mouse TTR siRNA activity: All animal procedures were performed under IACUC guidelines. To evaluate the potency and liver exposure of provided oligonucleotides and compositions, male 8-10 weeks of age C₅₇BL/6 mice were dose at 0.6, 2 or 6 mg/kg at desired oligonucleotide concentration on Day 1 by subcutaneous administration. Animals were euthanized on Day 8 by CO₂ asphyxiation followed by thoracotomy and terminal blood collection. After cardiac perfusion with PBS, liver samples were harvested and flash-frozen in dry ice. Liver total RNA was extracted using SV96 Total RNA Isolation kit (Promega), after tissue lysis with TRIzol and bromochloropropane. cDNA production from RNA samples were performed using High-Capacity cDNA Reverse Transcription kit (Thermo Fisher) following manufacturer's instructions and qPCR analysis performed in CFX System using iQ Multiplex Powermix (Bio-Rad). For mouse TTR mRNA, the following qPCR assay were utilized: IDT Taqman qPCR assay ID Mm.PT.58.11922308. Oligonucleotide accumulation in liver was determined by hybrid ELISA.

[1483] To evaluate the durability of provided oligonucleotides and compositions, male 8-10 weeks of age C57BL/6 mice were dose at 2 or 6 mg/kg at desired oligonucleotide concentration on Day 1 by subcutaneous administration. On Day 1 (pre-dose) and then weekly, whole blood was collected via submandibular bleeding into serum separator tubes, and processed serum samples were kept at −70° C. Mouse TTR protein concentration in the serum was assessed using the Mouse Prealbumin ELISA kit (Crystal Chem) and following manufacturer's instructions.

[1484] Ago2 immunoprecipitation assay: Tissues (1 mpk dosed) were lysed in lysis buffer 50 mM Tris-HCl at pH 7.5, 200 mM NaCl, 0.5% Triton X-100, 2 mM EDTA, 1 mg/mL heparin) with protease inhibitor (Sigma-Aldrich). Lysate concentration was measured with a protein BCA kit (Pierce BCA protein assay kit or Bradford protein assay kit). Anti-Ago2 antibody was purchased from Wako Chemicals. Control mouse IgG was from eBioscience. Dynabeads (Invitrogen) were used to precipitate antibodies. Ago2-associated siRNA and endogenous miR122 were measured by Stem-Loop RT followed by TaqMan PCR analysis using Taqman miRNA and siRNA assay kit (Thermo fisher) based on manufacturer's methods.

[1485] Table 6, shows % mouse TTR mRNA remaining relative to PBS control. N=5. N.D.: Not determined.

TABLE 6

| | WV-20167/WV-36860 | | |
|---|---|---|---|
| PBS | 0.6 mg/kg | 2 mg/kg | 6 mg/kg |

| | % remaining | | % remaining | | % remaining | | % remaining |
|---|---|---|---|---|---|---|---|
| animal | of mTTR | animal | of mTTR | animal | of mTTR | animal | of mTTR |
| No. | mRNA | No. | mRNA | No. | mRNA | No. | mRNA |
| 1 | 126.89 | 6 | 81.73 | 11 | 38.85 | 16 | 35.76 |
| 2 | 86.61 | 7 | 70.20 | 12 | 42.98 | 17 | 17.77 |
| 3 | 95.66 | 8 | 75.48 | 13 | 40.83 | 18 | 20.10 |
| 4 | 93.00 | 9 | 65.90 | 14 | 48.03 | 19 | 11.25 |
| 5 | 97.84 | 10 | 77.26 | 15 | 42.39 | 20 | 10.30 |
| Mean | 100 | Mean | 74.11 | Mean | 42.62 | Mean | 19.03 |

| WV-20170/WV-36807 | | | WV-38708/WV-36807 |
|---|---|---|---|
| 0.6 mg/kg | 2 mg/kg | 6 mg/kg | 0.6 mg/kg |

| | % remaining | | % remaining | | % remaining | | % remaining |
|---|---|---|---|---|---|---|---|
| animal | of mTTR | animal | of mTTR | animal | of mTTR | animal | of mTTR |
| No. | mRNA | No. | mRNA | No. | mRNA | No. | mRNA |
| 21 | 59.04 | 26 | 27.62 | 31 | 8.38 | 36 | 74.11 |
| 22 | 64.79 | 27 | 24.76 | 32 | 9.90 | 37 | 51.80 |
| 23 | 57.41 | 28 | 39.43 | 33 | 4.61 | 38 | 75.30 |
| 24 | 63.78 | 29 | 33.50 | 34 | 6.79 | 39 | 58.13 |
| 25 | 61.99 | 30 | 28.70 | 35 | 14.13 | 40 | 75.99 |
| Mean | 61.40 | Mean | 30.80 | Mean | 8.76 | Mean | 67.07 |

WV-38708/WV-36807

| | |
|---|---|
| 2 mg/kg | 6 mg/kg |

| | % remaining | | % remaining |
|---|---|---|---|
| animal | of mTTR | animal | of mTTR |
| No. | mRNA | No. | mRNA |
| 41 | 14.89 | 46 | 3.01 |
| 42 | 12.19 | 47 | 5.27 |
| 43 | 19.18 | 48 | 3.76 |
| 44 | 23.48 | 49 | 2.98 |
| 45 | 17.54 | 50 | 3.94 |
| Mean | 17.46 | Mean | 3.79 |

[1486] Table 7, shows the accumulation of antisense strand in liver tissue. N=5. N.D.: Not determined.

TABLE 7

| | | WV-20167/WV-36860 | | | | | |
|---|---|---|---|---|---|---|---|
| | | | | 2 mg/kg | | | |
| | PBS | 0.6 mg/kg | | | % | 6 mg/kg | |
| | antisense | | antisense | | antisense | | antisense |
| | strand | | strand | | strand | | strand |
| animal | (μg/g of | animal | (μg/g of | animal | (μg/g of | animal | (μg/g of |
| No. | tissue) | No. | tissue) | No. | tissue) | No. | tissue) |
| 1 | 0.000 | 6 | 0.024 | 11 | 0.031 | 16 | 0.055 |
| 2 | 0.000 | 7 | 0.048 | 12 | 0.084 | 17 | 0.121 |
| 3 | 0.000 | 8 | 0.032 | 13 | 0.069 | 18 | 0.113 |
| 4 | 0.000 | 9 | 0.025 | 14 | 0.049 | 19 | 0.101 |
| 5 | 0.000 | 10 | 0.026 | 15 | 0.042 | 20 | 0.131 |
| Mean | 0.000 | Mean | 0.031 | Mean | 0.055 | Mean | 0.104 |

| WV-20170/WV-36807 | | | | | | WV-38708/WV-36807 | |
|---|---|---|---|---|---|---|---|
| 0.6 mg/kg | | 2 mg/kg | | 6 mg/kg | | 0.6 mg/kg | |
| | antisense | | antisense | | antisense | | antisense |
| | strand | | strand | | strand | | strand |
| animal | (μg/g of | animal | (μg/g of | animal | (μg/g of | animal | (μg/g of |
| No. | tissue) | No. | tissue) | No. | tissue) | No. | tissue) |
| 21 | 0.040 | 26 | 0.066 | 31 | 0.057 | 36 | 0.017 |
| 22 | 0.024 | 27 | 0.032 | 32 | 0.062 | 37 | 0.015 |
| 23 | 0.006 | 28 | 0.015 | 33 | 0.110 | 38 | 0.011 |
| 24 | 0.000 | 29 | 0.019 | 34 | 0.072 | 39 | 0.004 |
| 25 | 0.000 | 30 | 0.022 | 35 | 0.103 | 40 | 0.010 |
| Mean | 0.014 | Mean | 0.031 | Mean | 0.081 | Mean | 0.012 |

WV-38708/WV-36807

| 2 mg/kg | | 6 mg/kg | |
|---|---|---|---|
| | antisense | | antisense |
| | strand | | strand |
| animal | (μg/g of | animal | (μg/g of |
| No. | tissue) | No. | tissue) |
| 41 | 0.063 | 46 | 0.298 |
| 42 | 0.088 | 47 | 0.365 |
| 43 | 0.065 | 48 | 0.196 |
| 44 | 0.092 | 49 | 0.229 |
| 45 | 0.050 | 50 | 0.322 |
| Mean | 0.072 | Mean | 0.282 |

[1487] Table 8. shows Ago 2 loading of guide strand relative to miR-122. N=2.

| | Ct: | Ct: miR- | Ct | Ct: miR- | Relative |
|---|---|---|---|---|---|
| | mTTR/Ago2 | 122/Ago2 | mTTR/IgG | 122/IgG | mTTR/miR122 |
| PBS-1 | 39.07 | 16.86 | 38.67 | 27.78 | −0.02 |
| PBS-2 | 38.86 | 16.95 | 39.06 | 28.16 | 0.01 |
| WV-20167-1 | 36.57 | 16.94 | 38.63 | 28.58 | 0.34 |
| WV-20167-2 | 36.40 | 16.90 | 38.87 | 28.55 | 0.40 |
| WV-20170-1 | 34.56 | 16.63 | 38.67 | 27.49 | 1.35 |
| WV-20170-2 | 33.91 | 16.91 | 38.93 | 27.80 | 2.64 |
| WV-38708-1 | 31.10 | 16.48 | 36.70 | 28.02 | 13.94 |
| WV-38708-2 | 31.15 | 16.37 | 35.22 | 27.33 | 11.90 |

[1488] Table 8a. shows % mouse TTR protein remaining relative to PBS control. N=5. N.D.: Not determined.

| | PBS | | | | | |
|---|---|---|---|---|---|---|
| Day | animal1 | animal2 | animal3 | animal4 | animal5 | Mean |
| 1 | 91 | 114 | 104 | 91 | 100 | 100 |
| 8 | 103 | 120 | 98 | 91 | 87 | 100 |
| 15 | 91 | 100 | 112 | 103 | 93 | 100 |
| 22 | 94 | 107 | 91 | 102 | 106 | 100 |
| 29 | 93 | 101 | 87 | 108 | 111 | 100 |
| 36 | 87 | 102 | 95 | 112 | 104 | 100 |
| 43 | 98 | 95 | 95 | 101 | 112 | 100 |

| | WV-20167/WV-36860, 2 mg/kg | | | | | |
|---|---|---|---|---|---|---|
| Day | animal6 | animal7 | animal8 | animal9 | animal10 | Mean |
| 1 | 97 | 105 | 72 | 80 | 90 | 89 |
| 8 | 54 | 48 | 39 | 51 | 44 | 47 |
| 15 | 68 | 70 | 62 | 62 | 63 | 65 |
| 22 | 90 | 96 | 80 | 92 | 92 | 90 |
| 29 | 85 | 116 | 82 | 98 | 91 | 94 |
| 36 | 115 | 120 | 108 | 88 | 122 | 110 |
| 43 | 102 | 115 | 99 | 99 | 94 | 102 |

| | WV-20167/WV-36860, 6 mg/kg | | | | | |
|---|---|---|---|---|---|---|
| Day | animal11 | animal12 | animal13 | animal14 | animal15 | Mean |
| 1 | 92 | 102 | 109 | 119 | 92 | 103 |
| 8 | 18 | 18 | 19 | 18 | 16 | 18 |
| 15 | 33 | 38 | 39 | 30 | 34 | 35 |
| 22 | 57 | 78 | 72 | 55 | 66 | 66 |
| 29 | 72 | 80 | 85 | 71 | 81 | 78 |
| 36 | 90 | 119 | 104 | 96 | 100 | 102 |
| 43 | 94 | 98 | 115 | 105 | 106 | 104 |
| | WV-20170/WV-36807, 2 mg/kg | | | | | |
| Day | animal16 | animal17 | animal18 | animal19 | animal20 | Mean |
| 1 | 65 | 83 | 95 | 83 | 103 | 86 |
| 8 | 36 | 37 | 43 | 41 | 34 | 38 |
| 15 | 53 | 47 | 49 | 60 | 55 | 53 |
| 22 | 67 | 76 | 71 | 84 | 76 | 75 |
| 29 | 78 | 85 | 85 | 103 | 69 | 84 |
| 36 | 90 | 93 | 93 | 96 | 93 | 93 |
| 43 | 88 | 93 | 94 | 117 | 79 | 94 |
| | WV-20170/WV-36807, 6 mg/kg | | | | | |
| Day | animal21 | animal22 | animal23 | animal24 | animal25 | Mean |
| 1 | 108 | 129 | 100 | 105 | 107 | 110 |
| 8 | 9 | 11 | 4 | 8 | 15 | 10 |
| 15 | 17 | 19 | 9 | 19 | 29 | 19 |
| 22 | 39 | 40 | 18 | 39 | 58 | 39 |
| 29 | 67 | 69 | 41 | 56 | 79 | 62 |
| 36 | 90 | 94 | 61 | 84 | 110 | 88 |
| 43 | 108 | 114 | 80 | 90 | 107 | 100 |
| | WV-38708/WV-36807, 2 mg/kg | | | | | |
| Day | animal26 | animal27 | animal28 | animal29 | animal30 | Mean |
| 1 | 120 | 102 | 117 | 99 | 141 | 116 |
| 8 | 32 | 31 | 21 | 22 | 30 | 27 |
| 15 | 46 | 40 | 38 | 36 | 44 | 41 |
| 22 | 77 | 79 | 69 | 65 | 70 | 72 |
| 29 | 85 | 69 | 82 | 77 | 87 | 80 |
| 36 | 100 | 95 | 92 | 98 | 103 | 98 |
| 43 | 106 | 101 | 91 | 113 | 119 | 106 |
| | WV-38708/WV-36807, 6 mg/kg | | | | | |
| Day | animal31 | animal32 | animal33 | animal34 | animal35 | Mean |
| 1 | 102 | 103 | 107 | 105 | 117 | 107 |
| 8 | 7 | 4 | 4 | 5 | 7 | 6 |
| 15 | 13 | 9 | 7 | 11 | 12 | 10 |
| 22 | 27 | 20 | 19 | 27 | 30 | 25 |
| 29 | 48 | 38 | 40 | 52 | 63 | 48 |
| 36 | 77 | 66 | 66 | 72 | 83 | 73 |
| 43 | 82 | 89 | 77 | 115 | 94 | 91 |
| | WV-38706/WV-36807, 6 mg/kg | | | | | |
| Day | animal36 | animal37 | animal38 | animal39 | Animal40 | Mean |
| 1 | 114 | 129 | 142 | 104 | 111 | 120 |
| 8 | 123 | 93 | 100 | 106 | 102 | 105 |
| 15 | 127 | 111 | 119 | 104 | 100 | 112 |
| 22 | 130 | 100 | 101 | 103 | 109 | 109 |
| 29 | 121 | 91 | 126 | 102 | 105 | 109 |
| 36 | 117 | 135 | 108 | 106 | 109 | 115 |
| 43 | 120 | 114 | 120 | 132 | 102 | 117 |

[1489] Table 9. shows % mouse TTR mRNA remaining (at 300 and 100 pM siRNA treatment) relative to mouse HPRT control. N=2. N.D.: Not determined.

| | 300 pM | | | 100 pM | | |
|---|---|---|---|---|---|---|
| | % remaining | % remaining | | % remaining | % remaining | |
| | mRNA | mRNA | | mRNA | mRNA | |
| | (mTTR/ | (mTTR/ | | (mTTR/ | (mTTR/ | |
| siRNA | mHPRT)-1 | mHPRT)-2 | Mean | mHPRT)-1 | mHPRT)-2 | Mean |
| DSR-0101651 | 56.113 | 54.657 | 55.39 | 70.934 | 79.092 | 75.01 |
| DSR-0102524 | 46.386 | 34.305 | 40.35 | 76.224 | 57.865 | 67.04 |
| DSR-0103268 | 53.02 | 46.219 | 49.62 | 66.65 | 85.311 | 75.98 |
| DSR-0102161 | 57.793 | 45.721 | 51.76 | 91.94 | 60.264 | 76.10 |
| DSR-0103267 | 55.08 | 47.509 | 51.29 | 76.377 | 85.699 | 81.04 |
| DSR-0103266 | 47.401 | 41.727 | 44.56 | 75.259 | 62.845 | 69.05 |
| DSR-0103265 | 44.067 | 38.667 | 41.37 | 58.235 | 68.8 | 63.52 |
| DSR-0103264 | 52.212 | 48.956 | 50.58 | 78.578 | 67.927 | 73.25 |
| DSR-0103263 | 45.545 | 42.045 | 43.80 | 58.894 | 68.952 | 63.92 |
| DSR-0103262 | 53.611 | 41.367 | 47.49 | 79.49 | 60.584 | 70.04 |
| DSR-0103261 | 48.408 | 39.907 | 44.16 | 81.101 | 66.145 | 73.62 |
| DSR-0103260 | 58.72 | 47.415 | 53.07 | 87.199 | 62.272 | 74.74 |
| DSR-0103259 | 51.685 | 51.323 | 51.50 | 81.791 | 68.437 | 75.11 |
| DSR-0103258 | 47.667 | 38.217 | 42.94 | 68.023 | 65.279 | 66.65 |
| DSR-0103257 | 42.808 | 33.274 | 38.04 | 60.211 | 56.174 | 58.19 |
| DSR-0103256 | 53.223 | 46.577 | 49.90 | 73.002 | 70.513 | 71.76 |
| DSR-0103255 | 47.099 | 34.879 | 40.99 | 67.35 | 54.488 | 60.92 |
| DSR-0103254 | 58.712 | 49.158 | 53.94 | 82.3 | 67.993 | 75.15 |
| DSR-0103253 | 80.254 | 72.068 | 76.16 | 89.74 | 90.965 | 90.35 |
| DSR-0103252 | 83.201 | 80.517 | 81.86 | 95.172 | 102.116 | 98.64 |
| DSR-0103251 | 80.899 | 73.316 | 77.11 | 101.592 | 87.385 | 94.49 |
| DSR-0103250 | 95.286 | 95.152 | 95.22 | 106.407 | 109.407 | 107.91 |
| DSR-0103249 | 69.998 | 64.799 | 67.40 | 77.547 | 83.51 | 80.53 |
| DSR-0103248 | 88.732 | 86.846 | 87.79 | 96.76 | 104.801 | 100.78 |
| DSR-0103247 | 76.182 | 81.738 | 78.96 | 88.763 | 82.923 | 85.84 |
| DSR-0103246 | 98.911 | 92.585 | 95.75 | 110.514 | 113.56 | 112.04 |
| DSR-0103245 | 79.964 | 81.799 | 80.88 | 96.89 | 107.033 | 101.96 |
| DSR-0103244 | 82.89 | 81.533 | 82.21 | 98.283 | 94.37 | 96.33 |
| DSR-0103243 | 76.706 | 69.282 | 72.99 | 93.716 | 83.245 | 88.48 |
| DSR-0103242 | 70.084 | 64.651 | 67.37 | 97.212 | 85.997 | 91.60 |
| DSR-0103241 | 58.731 | 59.878 | 59.30 | 85.01 | 72.463 | 78.74 |
| DSR-0103240 | 81.878 | 79.308 | 80.59 | 96.758 | 100.935 | 98.85 |
| DSR-0103239 | 78.511 | 66.294 | 72.40 | 81.031 | 84.232 | 82.63 |
| DSR-0103238 | 70.707 | 66.602 | 68.65 | 95.922 | 87.921 | 91.92 |
| DSR-0103237 | 59.689 | 57.305 | 58.50 | 85.747 | 71.655 | 78.70 |
| DSR-0103236 | 58.868 | 59.182 | 59.03 | 81.563 | 77.43 | 79.50 |
| DSR-0103235 | 51.897 | 51.53 | 51.71 | 77.548 | 77.375 | 77.46 |
| DSR-0103234 | 51.616 | 43.004 | 47.31 | 67.075 | 75.288 | 71.18 |
| DSR-0103233 | 62.17 | 45.953 | 54.06 | 69.925 | 69.112 | 69.52 |
| DSR-0103232 | 62.285 | 51.385 | 56.84 | 70.226 | 84.397 | 77.31 |
| DSR-0103231 | 60.632 | 45.751 | 53.19 | 64.284 | 81.317 | 72.80 |
| DSR-0103230 | 60.696 | 53.028 | 56.86 | 74.074 | 81.77 | 77.92 |
| DSR-0103229 | 55.893 | 43.043 | 49.47 | 66.193 | 70.503 | 68.35 |
| DSR-0103228 | 61.225 | 50.887 | 56.06 | 61.807 | 78.262 | 70.03 |
| DSR-0103227 | 40.582 | 39.321 | 39.95 | 77.481 | 73.723 | 75.60 |

### Example 3. Improved Silencing Corresponds to Lower Thermal Stability

[1490] To investigate how the inclusion of PN linkages at backbone position +3 of the antisense strand impacts silencing, the thermal stability of siRNAs with and without these linkages were determined. For SSR-0102772, which is a stereopure siRNA that lacks PN linkages, the measured Tm was 69.6° C. Adding a PN linkage at position +3 in either an Sp (SSR-0104275) or Rp configuration (SSR-0104267) lowered Tm by ˜1° C. For WV-43775, which is a stereopure siRNA that lacks PN linkages and has a 2′-OMe on the 3′-side of the third backbone position, the measured Tm was 64.4° C. Adding a PN linkage at position +3 in either an Sp (WV-44453) or an Rp configuration (WV-46540) preserved or increased Tm compared with TTR-872. By contrast for SSR-0\, which has a 2′-F on the 3′-side of the third backbone position, the Tm decreased by ˜1° C. by the addition of a PN linkage in either an Sp (WV-47121) or Rp configuration (WV-47103). These data demonstrate that the inclusion of PN linkages can increase thermal instability, and increases in thermal instability are observed if the PN linkage is accompanied by an adjacent 2′-F ribose modification but not a 2′-OMe modification 3′ of the linkage.

[1491] To perform the thermal denaturation (Tm) experiments, equimolar amounts of sense and antisense strands were combined and annealed in 0.1×PBS (pH 7.2) to obtain a final concentration of 1 mM of each strand (3 ml). UV absorbance at 254 nm was recorded at intervals of 30 s as the temperature was raised from 15° C. to 95° C. at a rate of +0.5° C. per min, using a Cary Series UV-Vis spectrophotometer (Agilent Technologies). Absorbance was plotted against the temperature, and Tm values were calculated by taking the first derivative of each curve. The results are presented in Table 16.

[1492] Table 10. shows

| Passenger | Guide | Tm (Derivative) |
|---|---|---|
| WV-40362 | WV-20167 | 68.52 |
| WV-40363 | WV-20170 | 69.62 |
| WV-40363 | WV-41918 | 68.67 |
| WV-40363 | WV-41896 | 67.77 |
| WV-40363 | WV-38708 | 69.81 |
| WV-40363 | WV-38706 | 66.52 |
| WV-41828 | WV-49611 | 65.52 |
| WV-41828 | WV-49612 | 65.62 |
| WV-42080 | WV-51122 | 65.67 |
| WV-42080 | WV-47145 | 65.77 |
| WV-42080 | WV-48528 | 64.81 |
| SSR-0101630 | SSR-0105101 | 66.52 |
| SSR-0101630 | WV-49592 | 66.57 |
| SSR-0101695 | WV-49590 | 66.67 |
| — | — | — |
| WV-42080 | WV-43775 | 64.37 |
| WV-42080 | WV-44453 | 65.62 |
| WV-42080 | WV-46540 | 64.63 |
| WV-42080 | WV-47121 | 64.72 |
| WV-42080 | WV-47103 | 64.77 |
| WV-42080 | SSR-0106582 | 65.52 |

### Example 4. Provided Oligonucleotides and Compositions are Active In Vitro in Mouse Primary Hepatocytes

[1493] Various siRNAs for mouse APP were designed and constructed. A number of siRNAs were tested in vitro in mouse primary hepatocytes at one or a range of concentrations. Some siRNAs were also tested in mice (e.g., C57BL6 wild type mice).

[1494] Example protocol for in vitro determination of siRNA activity in mouse primary hepatocytes: For determination of siRNAs activity, siRNAs at specific concentration were gymnotically delivered to mouse primary hepatocytes plated at 96-well plates, with 10,000 cells/well. Following 48 hours treatment, total RNA was extracted using SV96 Total RNA Isolation kit (Promega). cDNA production from RNA samples were performed using High-Capacity cDNA Reverse Transcription kit (Thermo Fisher) following manufacturer's instructions and qPCR analysis performed in CFX System using iQ Multiplex Powermix (Bio-Rad). For mouse APP mRNA, the following qPCR assay were utilized: Thermofisher Taqman qPCR assay ID Mm01344172-ml. Mouse HPRT was used as normalizer (Forward 5′CAAACTTTGCTTTCCCTGGTT3′, Reverse 5′TGGCCTGTATCCAACACTTC3′, Probe 5′/5HEX/ACCAGCAAG/Zen/CTTGCAACCTTAACC/31ABkFQ/3′. mRNA knockdown levels were calculated as % mRNA remaining relative to mock treatment.

[1495] Table 11. shows 0% mouse APP mRNA remaining (at 300, 33.33 and 3.70 nM siRNA treatment) in primary mouse hepatocytes relative to mouse HPRT control. N=2. N.D.: Not determined.

| | 300 nM | | | 33.33 nM | | | 3.70 nM | | |
|---|---|---|---|---|---|---|---|---|---|
| | % | % | | % | % | | % | % | |
| | remaining | remaining | | remaining | remaining | | remaining | remaining | |
| | mRNA | mRNA | | mRNA | mRNA | | mRNA | mRNA | |
| | (mAPP/ | (mAPP/ | | (mAPP/ | (mAPP/ | | (mAPP/ | (mAPP/ | |
| siRNA | mHPRT)-1 | mHPRT)-2 | Mean | mHPRT)-1 | mHPRT)-2 | Mean | mHPRT)-1 | mHPRT)-2 | Mean |
| DSR- | 12.32 | 13.87 | 13.10 | 64.86 | 49 | 56.93 | 82.78 | 71.7 | 77.24 |
| 0102630 | | | | | | | | | |
| DSR- | 10.74 | 8.72 | 9.73 | 59.49 | 47.91 | 53.70 | 78.51 | 65.26 | 71.89 |
| 0102631 | | | | | | | | | |
| DSR- | 16.33 | 16.47 | 16.40 | 61.18 | 54.57 | 57.88 | 92.66 | 79.42 | 86.04 |
| 0102632 | | | | | | | | | |
| DSR- | 21.67 | 22.28 | 21.98 | 64.56 | 72.98 | 68.77 | 81.04 | 87.01 | 84.03 |
| 0102633 | | | | | | | | | |
| DSR- | 34.72 | 28.21 | 31.47 | 86.97 | 67.85 | 77.41 | 119.52 | 84.49 | 102.01 |
| 0102634 | | | | | | | | | |
| DSR- | 41.92 | 36.12 | 39.02 | 95.2 | 73.04 | 84.12 | 94.34 | 96 | 95.17 |
| 0102635 | | | | | | | | | |
| DSR- | 26.86 | 28.9 | 27.88 | 82.47 | 76.43 | 79.45 | 92.47 | 92.13 | 92.30 |
| 0102636 | | | | | | | | | |
| DSR- | 32.77 | 38.3 | 35.54 | 81.11 | 84.64 | 82.88 | 102.91 | 90.86 | 96.89 |
| 0102637 | | | | | | | | | |
| DSR- | 24.94 | 30.67 | 27.81 | 61.1 | 78.7 | 69.90 | 89.39 | 99.77 | 94.58 |
| 0102638 | | | | | | | | | |
| DSR- | 58.21 | 67.28 | 62.75 | 82.47 | 86.68 | 84.58 | 101.7 | 89.15 | 95.43 |
| 0102639 | | | | | | | | | |
| DSR- | 16.91 | 19.73 | 18.32 | 51.45 | 56.1 | 53.78 | 91.95 | 84.61 | 88.28 |
| 0102640 | | | | | | | | | |
| DSR- | 15.14 | 28.45 | 21.80 | 57.69 | 61.42 | 59.56 | 93.1 | 43.45 | 68.28 |
| 0102641 | | | | | | | | | |

### Example 5. Provided Oligonucleotides and Compositions are Active In Vitro in Mouse Neuro 2A Cells

[1496] Various siRNAs for mouse TTR were designed and constructed. A number of siRNAs were tested in vitro in mouse Neuro 2A cells at one or a range of concentrations. Some siRNAs were also tested in mice (e.g., C57BL6 wild type mice).

[1497] Example protocol for in vitro determination of siRNA activity in mouse Neuro2A cells: For determination of siRNAs activity, siRNAs at specific concentration were gymnotically delivered to mouse neuro2A cells plated at 96-well plates, with 25,000 cells/well. Following 48 hours treatment, total RNA was extracted using SV96 Total RNA Isolation kit (Promega). cDNA production from RNA samples were performed using High-Capacity cDNA Reverse Transcription kit (Thermo Fisher) following manufacturer's instructions and qPCR analysis performed in CFX System using iQ Multiplex Powermix (Bio-Rad). For mouse APP mRNA, the following qPCR assay were utilized: Thermofisher Taqman qPCR assay ID Mm01344172_m1. Mouse HPRT was used as normalizer (Forward 5′CAAACTTTGCTTTCCCTGGTT3′, Reverse 5′TGGCCTGTATCCAACACTTC3′, Probe 5′/5HEX/ACCAGCAAG/Zen/CTTGCAACCTTAACC/3IABkFQ/3′. mRNA knockdown levels were calculated as % mRNA remaining relative to mock treatment.

[1498] Table 12. shows % mouse APP mRNA remaining (at 5, 1 and 0.3 uM siRNA treatment) in mouse Neuro2A cells relative to mouse HPRT control. N=2. N.D.: Not determined.

| | 5 uM | | | 1 uM | | | 0.3 uM | | |
|---|---|---|---|---|---|---|---|---|---|
| | % | % | | % | % | | % | % | |
| | remaining | remaining | | remaining | remaining | | remaining | remaining | |
| | mRNA | mRNA | | mRNA | mRNA | | mRNA | mRNA | |
| | (mAPP/ | (mAPP/ | | (mAPP/ | (mAPP/ | | (mAPP/ | (mAPP/ | |
| siRNA | mHPRT)-1 | mHPRT)-2 | Mean | mHPRT)-1 | mHPRT)-2 | Mean | mHPRT)-1 | mHPRT)-2 | Mean |
| DSR- | 62.52 | 70.91 | 66.715 | 79.8 | 76.37 | 78.085 | 82.26 | 80.53 | 81.395 |
| 0102630 | | | | | | | | | |
| DSR- | 44.58 | 54.09 | 49.335 | 60.98 | 65.1 | 63.04 | 69.2 | 76.51 | 72.855 |
| 0102631 | | | | | | | | | |
| DSR- | 38.46 | 45.4 | 41.93 | 50.52 | 59.57 | 55.045 | 64.93 | 70.54 | 67.735 |
| 0102632 | | | | | | | | | |
| DSR- | 40.55 | 48.76 | 44.655 | 53.95 | 63.91 | 58.93 | 71.39 | 73.08 | 72.235 |
| 0102633 | | | | | | | | | |
| DSR- | 61.54 | 73.98 | 67.76 | 74.59 | 86.23 | 80.41 | 83.67 | 92.22 | 87.945 |
| 0102634 | | | | | | | | | |
| DSR- | 59.37 | 73.75 | 66.56 | 75.53 | 83.09 | 79.31 | 82.91 | 93.59 | 88.25 |
| 0102635 | | | | | | | | | |
| DSR- | 39.73 | 43.97 | 41.85 | 51.03 | 59.09 | 55.06 | 63.95 | 70.45 | 67.2 |
| 0102636 | | | | | | | | | |
| DSR- | 46.79 | 50.85 | 48.82 | 61.37 | 75.94 | 68.655 | 70.35 | 81.95 | 76.15 |
| 0102637 | | | | | | | | | |
| DSR- | 35.91 | 41.66 | 38.785 | 50.49 | 58.78 | 54.635 | 63.09 | 71.4 | 67.245 |
| 0102638 | | | | | | | | | |
| DSR- | 60.24 | 67.39 | 63.815 | 70.34 | 80.46 | 75.4 | 75.55 | 90.75 | 83.15 |
| 0102639 | | | | | | | | | |
| DSR- | 52.5 | 50.43 | 51.465 | 68.41 | 64.26 | 66.335 | 78.86 | 74.75 | 76.805 |
| 0102640 | | | | | | | | | |
| DSR- | 50.78 | 45.85 | 48.315 | 69.79 | 56.48 | 63.135 | 80.11 | 68.27 | 74.19 |
| 0102641 | | | | | | | | | |

[1499] Table 13. shows % mouse APP mRNA remaining (at 5, 1 and 0.3 uM siRNA treatment) in mouse Neuro2A cells relative to mouse HPRT control. N=2. N.D.: Not determined.

| | 5 uM | | | 1 uM | | | 0.3 uM | | |
|---|---|---|---|---|---|---|---|---|---|
| | % | % | | % | % | | % | % | |
| | remaining | remaining | | remaining | remaining | | remaining | remaining | |
| | mRNA | mRNA | | mRNA | mRNA | | mRNA | mRNA | |
| | (mAPP/ | (mAPP/ | | (mAPP/ | (mAPP/ | | (mAPP/ | (mAPP/ | |
| siRNA | mHPRT)-1 | mHPRT)-2 | Mean | mHPRT)-1 | mHPRT)-2 | Mean | mHPRT)-1 | mHPRT)-2 | Mean |
| DSR- | 69.20 | 71.60 | 70.40 | 91.70 | 90.10 | 90.90 | 98.60 | 108.00 | 103.30 |
| 0102661 | | | | | | | | | |
| DSR- | 57.10 | 63.60 | 60.35 | 76.80 | 78.50 | 77.65 | 83.30 | 99.10 | 91.20 |
| 0102662 | | | | | | | | | |
| DSR- | 66.00 | 75.80 | 70.90 | 95.70 | 89.20 | 92.45 | 90.30 | 112.90 | 101.60 |
| 0102663 | | | | | | | | | |
| DSR- | 67.30 | 73.70 | 70.50 | 84.20 | 97.50 | 90.85 | 89.60 | 96.00 | 92.80 |
| 0102664 | | | | | | | | | |
| DSR- | 37.20 | 44.30 | 40.75 | 58.00 | 70.70 | 64.35 | 71.50 | 88.10 | 79.80 |
| 0102665 | | | | | | | | | |
| DSR- | 40.90 | 44.70 | 42.80 | 54.80 | 28.40 | 41.60 | 70.40 | 82.90 | 76.65 |
| 0102666 | | | | | | | | | |
| DSR- | 41.60 | 46.60 | 44.10 | 64.20 | 65.30 | 64.75 | 80.30 | 91.60 | 85.95 |
| 0102667 | | | | | | | | | |
| DSR- | 43.90 | 43.70 | 43.80 | 68.10 | 57.70 | 62.90 | 74.20 | 98.40 | 86.30 |
| 0102668 | | | | | | | | | |
| DSR- | 44.60 | 54.10 | 49.35 | 66.60 | 72.30 | 69.45 | 77.60 | 90.00 | 83.80 |
| 0102669 | | | | | | | | | |
| DSR- | 42.50 | 55.50 | 49.00 | 66.10 | 67.20 | 66.65 | 51.20 | 85.80 | 68.50 |
| 0102670 | | | | | | | | | |
| DSR- | 44.90 | 45.90 | 45.40 | 66.30 | 71.10 | 68.70 | 74.50 | 86.30 | 80.40 |
| 0102671 | | | | | | | | | |
| DSR- | 51.30 | 52.90 | 52.10 | 80.70 | 36.80 | 58.75 | 80.00 | 50.40 | 65.20 |
| 0102672 | | | | | | | | | |
| DSR- | 36.29 | 49.24 | 42.77 | 46.54 | 62.03 | 54.29 | 64.88 | 78.58 | 71.73 |
| 0102632 | | | | | | | | | |
| DSR- | 29.87 | 40.51 | 35.19 | 35.11 | 59.41 | 47.26 | 43.02 | 73.69 | 58.36 |
| 0102636 | | | | | | | | | |
| DSR- | 15.88 | 30.89 | 23.39 | 38.94 | 67.51 | 53.23 | 92.96 | 131.61 | 112.29 |
| 0102640 | | | | | | | | | |

### Example 6. Provided Oligonucleotides and Compositions are Active In Vitro in Human iCell GABA Neurons

[1500] Various siRNAs for mouse TTR were designed and constructed. A number of siRNAs were tested in vitro in human iCell GABA neurons at one or a range of concentrations. Some siRNAs were also tested in mice (e.g., C57BL6 wild type mice).

[1501] Example protocol for in vitro determination of siRNA activity in human iCell GABA neurons: For determination of siRNAs activity, siRNAs at specific concentration were gymnotically delivered to human iCell GABA neurons plated at 96-well plates, with 40,000 cells/well. Following 5 days treatment, total RNA was extracted using SV96 Total RNA Isolation kit (Promega). cDNA production from RNA samples were performed using High-Capacity cDNA Reverse Transcription kit (Thermo Fisher) following manufacturer's instructions and qPCR analysis performed in CFX System using iQ Multiplex Powermix (Bio-Rad). For human APP mRNA, the following qPCR assay were utilized: Thermofisher Taqman qPCR assay ID Hs00169098-ml. Human SFRS9 was used as normalizer (Forward, 5′-TGGAATATGCCCTGCGTAAA-3′; Reverse, 5′-TGGTGCTTCTCTCAGGATAAAC-3′, Probe, 5′-TGGATGACACCAAATTCCGCTCTCA-3′. mRNA knockdown levels were calculated as % mRNA remaining relative to mock treatment.

[1502] Table 14. shows % human APP mRNA remaining (at 5, 1 and 0.3 uM siRNA treatment) in iCell GABA neurons relative to human SFRS9 control. N=2. N.D.: Not determined.

| | 5 uM | | | 1 uM | | | 0.3 uM | | |
|---|---|---|---|---|---|---|---|---|---|
| | % | % | | % | % | | % | % | |
| | remaining | remaining | | remaining | remaining | | remaining | remaining | |
| | mRNA | mRNA | | mRNA | mRNA | | mRNA | mRNA | |
| | (hAPP/ | (hAPP/ | | (hAPP/ | (hAPP/ | | (hAPP/ | (hAPP/ | |
| siRNA | hSFRS9)-1 | hSFRS9)-2 | Mean | hSFRS9)-1 | hSFRS9)-2 | Mean | hSFRS9)-1 | hSFRS9)-2 | Mean |
| DSR- | 97.60 | 108.20 | 102.9 | 113.30 | 111.00 | 112.15 | 94.60 | 110.80 | 102.7 |
| 0102630 | | | | | | | | | |
| DSR- | 97.30 | 96.60 | 96.95 | 91.90 | 97.90 | 94.9 | 94.20 | 97.10 | 95.65 |
| 0102631 | | | | | | | | | |
| DSR- | 31.70 | 30.20 | 30.95 | 62.90 | 72.90 | 67.9 | 82.40 | 90.30 | 86.35 |
| 0102632 | | | | | | | | | |
| DSR- | 41.00 | 55.90 | 48.45 | 77.10 | 84.90 | 81 | 80.10 | 79.70 | 79.9 |
| 0102633 | | | | | | | | | |
| DSR- | 51.40 | 55.60 | 53.5 | 73.80 | 79.00 | 76.4 | 89.40 | 77.70 | 83.55 |
| 0102634 | | | | | | | | | |
| DSR- | 53.70 | 68.60 | 61.15 | 65.80 | 96.10 | 80.95 | 88.50 | 96.00 | 92.25 |
| 0102635 | | | | | | | | | |
| DSR- | 25.50 | 28.30 | 26.9 | 53.20 | 74.80 | 64 | 85.50 | 77.00 | 81.25 |
| 0102636 | | | | | | | | | |
| DSR- | 44.90 | 57.80 | 51.35 | 71.50 | 71.90 | 71.7 | 82.90 | 76.10 | 79.5 |
| 0102637 | | | | | | | | | |
| DSR- | 73.00 | 36.00 | 54.5 | 68.10 | 82.70 | 75.4 | 128.30 | 71.50 | 99.9 |
| 0102638 | | | | | | | | | |
| DSR- | N.D | 33.90 | 16.95 | 64.80 | 56.00 | 60.4 | 75.70 | 73.10 | 74.4 |
| 0102639 | | | | | | | | | |
| DSR- | 44.60 | 42.20 | 43.4 | 82.30 | 88.90 | 85.6 | 82.40 | 103.50 | 92.95 |
| 0102640 | | | | | | | | | |
| DSR- | 58.80 | 65.30 | 62.05 | 98.20 | 74.50 | 86.35 | 116.20 | 89.00 | 102.6 |
| 0102641 | | | | | | | | | |

[1503] Table 15. shows 0% human APP mRNA remaining (at 5, 1.5 and 0.5 uM siRNA treatment) in iCell GABA neurons relative to human SFRS9 control. N=2. N.D.: Not determined.

| | 5 uM | | | 1.5 uM | | | 0.5 uM | | |
|---|---|---|---|---|---|---|---|---|---|
| | % | % | | % | % | | % | % | |
| | remaining | remaining | | remaining | remaining | | remaining | remaining | |
| | mRNA | mRNA | | mRNA | mRNA | | mRNA | mRNA | |
| | (hAPP/ | (hAPP/ | | (hAPP/ | (hAPP/ | | (hAPP/ | (hAPP/ | |
| siRNA | hSFRS9)-1 | hSFRS9)-2 | Mean | hSFRS9)-1 | hSFRS9)-2 | Mean | hSFRS9)-1 | hSFRS9)-2 | Mean |
| DSR- | 43.50 | 102.80 | 73.15 | 41.20 | 54.00 | 47.60 | 62.50 | 0.00 | 31.25 |
| 0102663 | | | | | | | | | |
| DSR- | 40.90 | 46.10 | 43.50 | 39.00 | 53.90 | 46.45 | 55.30 | 65.30 | 60.30 |
| 0102664 | | | | | | | | | |
| DSR- | 43.30 | 38.90 | 41.10 | N.D | 45.20 | 22.60 | 66.70 | 86.80 | 76.75 |
| 0102665 | | | | | | | | | |
| DSR- | 127.20 | 33.00 | 80.10 | 59.20 | 69.50 | 64.35 | 35.40 | 85.00 | 60.20 |
| 0102667 | | | | | | | | | |
| DSR- | N.D | 78.00 | 39.00 | 77.20 | 72.20 | 74.70 | 61.70 | 77.50 | 69.60 |
| 0102668 | | | | | | | | | |
| DSR- | 56.30 | 60.30 | 58.30 | 95.90 | 72.10 | 84.00 | 80.60 | 108.30 | 94.45 |
| 0102669 | | | | | | | | | |
| DSR- | 46.50 | 62.00 | 54.25 | 37.30 | 67.10 | 52.20 | 92.00 | 93.70 | 92.85 |
| 0102670 | | | | | | | | | |
| DSR- | 67.50 | 132.70 | 100.10 | 160.40 | 137.60 | 149.00 | 147.20 | 149.70 | 148.45 |
| 0102672 | | | | | | | | | |
| DSR- | 16.40 | 20.30 | 18.35 | 23.80 | 41.80 | 32.80 | 27.10 | 155.70 | 91.40 |
| 0102632 | | | | | | | | | |
| DSR- | 19.10 | 22.10 | 20.60 | 28.70 | 34.10 | 31.40 | 37.70 | 59.50 | 48.60 |
| 0102636 | | | | | | | | | |
| DSR- | 48.30 | 54.60 | 51.45 | 59.30 | 61.10 | 60.20 | 125.00 | 100.90 | 112.95 |
| 0102640 | | | | | | | | | |

[1504] Table 16. shows % human APP mRNA remaining (at 5 uM siRNA treatment) in iCell GABA neurons relative to human SFRS9 control. N=2. N.D. Not determined.

5 uM

| | % remaining | % remaining | |
|---|---|---|---|
| | mRNA (hAPP/ | mRNA (hAPP/ | |
| siRNA | hSFRS9)-1 | hSFRS9)-2 | Mean |
| DSR-0102661 | 48.40 | 41.50 | 44.95 |
| DSR-0102662 | 73.10 | 54.10 | 63.60 |
| DSR-0102663 | 67.40 | 59.80 | 63.60 |
| DSR-0102664 | 62.50 | 62.10 | 62.30 |
| DSR-0102665 | 27.70 | 29.30 | 28.50 |
| DSR-0102666 | 47.60 | 46.10 | 46.85 |
| DSR-0102667 | 30.00 | 34.60 | 32.30 |
| DSR-0102668 | 33.90 | 34.20 | 34.05 |
| DSR-0102669 | 32.20 | 35.10 | 33.65 |
| DSR-0102670 | 54.00 | 48.70 | 51.35 |
| DSR-0102671 | 54.90 | 60.80 | 57.85 |
| DSR-0102672 | 70.70 | 77.90 | 74.30 |
| DSR-0102632 | 25.00 | 25.50 | 25.25 |
| DSR-0102636 | 23.00 | 22.50 | 22.75 |
| DSR-0102640 | 46.80 | 53.30 | 50.05 |
| DSR-0103338 | 151.30 | 65.30 | 108.30 |
| DSR-0103340 | 64.30 | 54.30 | 59.30 |
| DSR-0103190 | 85.70 | 76.00 | 80.85 |
| DSR-0103137 | 81.30 | 118.10 | 99.70 |
| DSR-0103339 | 79.70 | 71.00 | 75.35 |
| DSR-0103337 | 81.10 | 99.60 | 90.35 |

[1505] Table 17. shows % human APP mRNA remaining (at 3 uM siRNA treatment) in iCell GABA neurons relative to human SFRS9 control. N=2. N.D. Not determined.

3 uM

| | % remaining | % remaining | |
|---|---|---|---|
| | mRNA (hAPP/ | mRNA (hAPP/ | |
| siRNA | hSFRS9)-1 | hSFRS9)-2 | Mean |
| DSR-0103190 | 47.40 | 44.30 | 45.85 |
| DSR-0103137 | 77.30 | 76.80 | 77.05 |
| DSR-0102636 | 17.50 | 25.10 | 21.30 |
| DSR-0103185 | 17.60 | 27.80 | 22.70 |
| DSR-0103179 | 21.30 | 24.50 | 22.90 |
| DSR-0103141 | 21.80 | 28.40 | 25.10 |
| DSR-0103192 | 27.10 | 35.90 | 31.50 |
| DSR-0103180 | 18.70 | 25.20 | 21.95 |
| DSR-0103171 | 15.90 | 15.10 | 15.50 |
| DSR-0103162 | 33.90 | 43.70 | 38.80 |
| DSR-0103163 | 26.80 | 28.00 | 27.40 |
| DSR-0103172 | 33.60 | 42.60 | 38.10 |
| DSR-0103148 | 24.20 | 21.30 | 22.75 |
| DSR-0103154 | 18.60 | 19.60 | 19.10 |
| DSR-0103173 | 20.60 | 21.40 | 21.00 |
| DSR-0103149 | 28.00 | 28.70 | 28.35 |
| DSR-0103155 | 19.20 | 26.80 | 23.00 |
| DSR-0103164 | 12.80 | 11.70 | 12.25 |
| DSR-0103142 | 15.10 | 15.10 | 15.10 |
| DSR-0103138 | 14.00 | 15.00 | 14.50 |
| DSR-0103168 | 15.60 | 15.40 | 15.50 |
| DSR-0103160 | 15.20 | 19.10 | 17.15 |
| DSR-0103161 | 14.20 | 18.00 | 16.10 |
| DSR-0103139 | 14.80 | 15.50 | 15.15 |
| DSR-0103169 | 14.50 | 24.20 | 19.35 |
| DSR-0103153 | 23.20 | 18.60 | 20.90 |
| DSR-0103170 | 28.80 | 32.40 | 30.60 |
| DSR-0103184 | 18.20 | 21.10 | 19.65 |
| DSR-0103147 | 18.90 | 14.70 | 16.80 |
| DSR-0103140 | 22.40 | 21.30 | 21.85 |
| DSR-0103191 | 22.30 | 31.50 | 26.90 |
| DSR-0103178 | 17.70 | 19.50 | 18.60 |

[1506] Table 18. shows % human APP mRNA remaining (at 3 uM siRNA treatment) in iCell GABA neurons relative to human SFRS9 control. N=2. N.D. Not determined.

3 uM

| | % remaining | % remaining | |
|---|---|---|---|
| | mRNA (hAPP/ | mRNA (hAPP/ | |
| siRNA | hSFRS9)-1 | hSFRS9)-2 | Mean |
| DSR-0103190 | 47.40 | 44.30 | 45.85 |
| DSR-0103137 | 77.30 | 76.80 | 77.05 |
| DSR-0103189 | 19.40 | 21.70 | 20.55 |
| DSR-0103144 | 20.00 | 21.90 | 20.95 |
| DSR-0103176 | 21.40 | 21.30 | 21.35 |
| DSR-0103145 | 19.90 | 26.20 | 23.05 |
| DSR-0103157 | 20.10 | 28.00 | 24.05 |
| DSR-0103152 | 18.40 | 26.20 | 22.30 |
| DSR-0103167 | 20.00 | 25.50 | 22.75 |
| DSR-0103158 | 31.30 | 37.90 | 34.60 |
| DSR-0103187 | 24.20 | 22.50 | 23.35 |
| DSR-0102665 | 29.70 | 33.90 | 31.80 |
| DSR-0103146 | 22.70 | 29.40 | 26.05 |
| DSR-0103177 | 19.50 | 22.00 | 20.75 |
| DSR-0103135 | 21.20 | 21.20 | 21.20 |
| DSR-0103136 | 28.10 | 36.20 | 32.15 |
| DSR-0103183 | 27.70 | 35.10 | 31.40 |
| DSR-0103188 | 17.70 | 18.80 | 18.25 |
| DSR-0103159 | 19.30 | 21.20 | 20.25 |
| DSR-0103165 | 20.90 | 20.70 | 20.80 |
| DSR-0103156 | 24.10 | 20.90 | 22.50 |
| DSR-0103150 | 18.50 | 17.20 | 17.85 |
| DSR-0103133 | 17.60 | 18.20 | 17.90 |
| DSR-0103143 | 19.90 | 24.20 | 22.05 |
| DSR-0103134 | 28.30 | 31.90 | 30.10 |
| DSR-0103186 | 25.80 | 21.70 | 23.75 |
| DSR-0103174 | 21.00 | 24.00 | 22.50 |
| DSR-0103166 | 23.30 | 22.60 | 22.95 |
| DSR-0103181 | 25.70 | 19.30 | 22.50 |
| DSR-0103175 | 24.30 | 22.60 | 23.45 |
| DSR-0103182 | 36.50 | 35.40 | 35.95 |
| DSR-0103151 | 26.50 | 26.40 | 26.45 |

[1507] Table 19. shows 0% human APP mRNA remaining (at 6, 0.6, and 0.03 uM siRNA treatment) in iCell GABA neurons relative to human SFRS9 control. N=2. N.D.: Not determined.

| | 6 uM | | | 0.6 uM | | | 0.06 uM | | |
|---|---|---|---|---|---|---|---|---|---|
| | % | % | | % | % | | % | % | |
| | remaining | remaining | | remaining | remaining | | remaining | remaining | |
| | mRNA | mRNA | | mRNA | mRNA | | mRNA | mRNA | |
| | (hAPP/ | (hAPP/ | | (hAPP/ | (hAPP/ | | (hAPP/ | (hAPP/ | |
| siRNA | hSFRS9)-1 | hSFRS9)-2 | Mean | hSFRS9)-1 | hSFRS9)-2 | Mean | hSFRS9)-1 | hSFRS9)-2 | Mean |
| DSR- | 45.00 | 61.00 | 53.00 | 69.00 | 88.50 | 78.75 | 91.30 | 95.60 | 93.45 |
| 0103190 | | | | | | | | | |
| DSR- | 11.10 | 9.40 | 10.25 | 35.80 | 39.30 | 37.55 | 99.10 | 82.20 | 90.65 |
| 0103164 | | | | | | | | | |
| DSR- | 12.30 | 10.50 | 11.40 | 45.40 | 45.50 | 45.45 | 88.90 | 88.50 | 88.70 |
| 0103142 | | | | | | | | | |
| DSR- | 12.00 | 10.70 | 11.35 | 42.10 | 38.80 | 40.45 | 85.80 | 86.50 | 86.15 |
| 0103138 | | | | | | | | | |
| DSR- | 12.80 | 13.40 | 13.10 | 39.50 | 46.70 | 43.10 | 78.60 | 90.50 | 84.55 |
| 0103168 | | | | | | | | | |
| DSR- | 12.60 | 15.20 | 13.90 | 52.60 | 54.10 | 53.35 | 87.50 | 113.90 | 100.70 |
| 0103160 | | | | | | | | | |
| DSR- | 10.80 | 9.60 | 10.20 | 36.90 | 39.40 | 38.15 | 79.20 | 85.90 | 82.55 |
| 0103161 | | | | | | | | | |
| DSR- | 14.10 | 16.00 | 15.05 | 42.90 | 44.80 | 43.85 | 111.10 | 102.40 | 106.75 |
| 0103139 | | | | | | | | | |
| DSR- | 15.60 | 17.80 | 16.70 | 45.20 | 60.00 | 52.60 | 70.40 | 80.40 | 75.40 |
| 0103169 | | | | | | | | | |
| DSR- | 17.50 | 15.10 | 16.30 | 65.70 | 66.30 | 66.00 | 101.50 | 83.40 | 92.45 |
| 0103153 | | | | | | | | | |
| DSR- | 17.80 | 14.70 | 16.25 | 67.30 | 69.30 | 68.30 | 73.20 | 93.30 | 83.25 |
| 0103170 | | | | | | | | | |
| DSR- | 15.10 | 13.30 | 14.20 | 49.70 | 47.40 | 48.55 | 90.80 | 91.30 | 91.05 |
| 0103184 | | | | | | | | | |
| DSR- | 11.00 | 11.20 | 11.10 | 38.60 | 39.10 | 38.85 | 61.90 | 78.20 | 70.05 |
| 0103147 | | | | | | | | | |
| DSR- | 15.40 | 14.70 | 15.05 | 33.00 | 38.40 | 35.70 | 74.10 | 100.60 | 87.35 |
| 0103140 | | | | | | | | | |
| DSR- | 20.00 | 20.20 | 20.10 | 47.20 | 49.00 | 48.10 | 76.50 | 80.00 | 78.25 |
| 0103191 | | | | | | | | | |
| DSR- | 18.30 | 18.70 | 18.50 | 62.50 | 74.70 | 68.60 | 112.30 | 110.80 | 111.55 |
| 0103178 | | | | | | | | | |

[1508] Table 20. shows 00 human APP mRNA remaining (at 3 and 1 uM siRNA treatment) in iCell GABA neurons relative to human SFRS9 control. N=2. N.D. Not determined.

| | 3 uM | | | 1 uM | | |
|---|---|---|---|---|---|---|
| | % | % | | % | % | |
| | remaining | remaining | | remaining | remaining | |
| | mRNA | mRNA | | mRNA | mRNA | |
| | (hAPP/ | (hAPP/ | | (hAPP/ | (hAPP/ | |
| siRNA | hSFRS9)-1 | hSFRS9)-2 | Mean | hSFRS9)-1 | hSFRS9)-2 | Mean |
| DSR-0103190 | 54.40 | 56.70 | 55.55 | 58.00 | 86.50 | 72.25 |
| DSR-0103161 | 14.50 | 15.20 | 14.85 | 37.00 | 45.40 | 41.20 |
| DSR-0103219 | 19.10 | 17.50 | 18.30 | 33.90 | 36.40 | 35.15 |
| DSR-0103212 | 13.90 | 17.70 | 15.80 | 35.20 | 39.60 | 37.40 |
| DSR-0103201 | 16.80 | 16.70 | 16.75 | 33.20 | 43.90 | 38.55 |
| DSR-0103226 | 13.40 | 15.90 | 14.65 | 27.30 | 33.00 | 30.15 |
| DSR-0103202 | 16.70 | 20.50 | 18.60 | 33.00 | 48.00 | 40.50 |
| DSR-0103207 | 15.30 | 16.10 | 15.70 | 37.80 | 30.70 | 34.25 |
| DSR-0103203 | 27.10 | 29.00 | 28.05 | 42.30 | 62.40 | 52.35 |
| DSR-0103213 | 26.20 | 31.20 | 28.70 | 52.80 | 70.40 | 61.60 |
| DSR-0103214 | 22.60 | 24.10 | 23.35 | 41.30 | 45.30 | 43.30 |
| DSR-0103208 | 24.20 | 30.30 | 27.25 | 47.10 | 56.30 | 51.70 |
| DSR-0103220 | 22.50 | 19.40 | 20.95 | 29.90 | 32.30 | 31.10 |
| DSR-0103209 | 22.00 | 25.30 | 23.65 | 54.30 | 68.20 | 61.25 |
| DSR-0103204 | 17.70 | 24.70 | 21.20 | 44.90 | 46.60 | 45.75 |
| DSR-0103215 | 20.20 | 24.00 | 22.10 | 43.70 | 62.40 | 53.05 |

[1509] Table 21. shows 00 human APP mRNA remaining (at 3 and 1 uM siRNA treatment) in iCell GABA neurons relative to human SFRS9 control. N=2. N.D. Not determined.

| | 3 uM | | | 1 uM | | |
|---|---|---|---|---|---|---|
| | % | % | | % | % | |
| | remaining | remaining | | remaining | remaining | |
| | mRNA | mRNA | | mRNA | mRNA | |
| | (hAPP/ | (hAPP/ | | (hAPP/ | (hAPP/ | |
| siRNA | hSFRS9)-1 | hSFRS9)-2 | Mean | hSFRS9)-1 | hSFRS9)-2 | Mean |
| DSR-0103190 | 70.20 | 87.40 | 78.80 | 96.40 | 74.30 | 85.35 |
| DSR-0103164 | 13.60 | 16.40 | 15.00 | 27.10 | 30.10 | 28.60 |
| DSR-0103161 | 7.10 | 26.30 | 16.70 | 36.80 | 40.40 | 38.60 |
| DSR-0103221 | 14.20 | 14.20 | 14.20 | 24.70 | 29.30 | 27.00 |
| DSR-0103222 | 11.80 | 18.90 | 15.35 | 28.40 | 48.50 | 38.45 |
| DSR-0103199 | 12.20 | 30.50 | 21.35 | 21.70 | 24.10 | 22.90 |
| DSR-0103216 | 15.70 | 16.40 | 16.05 | 25.00 | 28.10 | 26.55 |
| DSR-0103205 | 10.40 | 15.70 | 13.05 | 35.70 | 32.40 | 34.05 |
| DSR-0103200 | 12.10 | 19.10 | 15.60 | 25.50 | 32.40 | 28.95 |

[1510] Table 22. shows % human APP mRNA remaining (at 3 and 1 uM siRNA treatment) in iCell GABA neurons relative to human SFRS9 control. N=2 N.D.: Not determined.

| | 3 uM | | | 1 uM | | |
|---|---|---|---|---|---|---|
| | % remaining | % remaining | | % remaining | % remaining | |
| | mRNA | mRNA | | mRNA | mRNA | |
| | (hAPP/ | (hAPP/ | | (hAPP/ | (hAPP/ | |
| siRNA | hSFRS9)-1 | hSFRS9)-2 | Mean | hSFRS9)-1 | hSFRS9)-2 | Mean |
| DSR-0103190 | 61.00 | 60.40 | 60.70 | 70.70 | 87.30 | 79.00 |
| DSR-0103164 | 12.90 | 14.40 | 13.65 | 27.20 | 27.90 | 27.55 |
| DSR-0103210 | 53.20 | 50.00 | 51.60 | 60.90 | 74.20 | 67.55 |
| DSR-0103211 | 60.70 | 64.40 | 62.55 | 88.90 | 73.90 | 81.40 |
| DSR-0103206 | 13.70 | 17.40 | 15.55 | 32.10 | 46.90 | 39.50 |
| DSR-0103217 | 27.90 | 35.10 | 31.50 | 66.10 | 61.90 | 64.00 |
| DSR-0103223 | 14.90 | 17.00 | 15.95 | 30.70 | 45.60 | 38.15 |
| DSR-0103224 | 28.40 | 78.60 | 53.50 | 61.20 | 66.20 | 63.70 |
| DSR-0103225 | 16.70 | 22.20 | 19.45 | 47.20 | 63.20 | 55.20 |
| DSR-0103218 | 26.30 | 33.50 | 29.90 | 79.00 | 64.60 | 71.80 |

[1511] Table 23. shows % IC50 of knocking down human APP mRNA in human iCell GABA neurons.

| siRNA | IC50 (uM) | 95% CI |
|---|---|---|
| DSR-0103164 | 0.2700 | 0.1474 to 0.4916 |
| DSR-0103275 | 0.3049 | 0.1615 to 0.5520 |
| DSR-0103276 | 0.2856 | 0.1768 to 0.4624 |
| DSR-0103199 | 0.2226 | 0.1584 to 0.3131 |
| DSR-0103216 | 0.2762 | 0.1250 to 0.5945 |
| DSR-0103206 | 0.7064 | 0.3981 to 1.271 |
| DSR-0103223 | 1.051 | 0.5869 to 1.932 |
| DSR-0103225 | 1.902 | 0.7058 to 6.344 |

[1512] Table 24. shows % human APP mRNA remaining (at 6, 0.6, and 0.2 uM siRNA treatment) in iCell GABA neurons relative to human SFRS9 control. N=2. N.D.: Not determined.

| | 6 uM | | | 0.6 uM | | | 0.2 uM | | |
|---|---|---|---|---|---|---|---|---|---|
| | % remaining | % remaining | | % remaining | % remaining | | % remaining | % remaining | |
| | mRNA | mRNA | | mRNA | mRNA | | mRNA | mRNA | |
| | (hAPP/ | (hAPP/ | | (hAPP/ | (hAPP/ | | (hAPP/ | (hAPP/ | |
| siRNA | hSFRS9)-1 | hSFRS9)-2 | Mean | hSFRS9)-1 | hSFRS9)-2 | Mean | hSFRS9)-1 | hSFRS9)-2 | Mean |
| DSR-0103275 | 10.70 | 12.50 | 11.60 | 34.40 | 38.40 | 36.40 | 53.30 | 62.70 | 58.00 |
| DSR-0103325 | 15.00 | 18.30 | 16.65 | 43.60 | 50.30 | 46.95 | 67.00 | 74.60 | 70.80 |
| DSR-0103326 | 10.00 | 11.80 | 10.90 | 35.90 | 35.50 | 35.70 | 56.40 | 55.80 | 56.10 |
| DSR-0103319 | 9.40 | 12.40 | 10.90 | 31.10 | 40.50 | 35.80 | 59.70 | 60.90 | 60.30 |
| DSR-0103320 | 9.90 | 13.30 | 11.60 | 41.10 | 32.00 | 36.55 | 61.50 | 66.30 | 63.90 |
| DSR-0103321 | 16.90 | 19.50 | 18.20 | 55.50 | 53.70 | 54.60 | 77.70 | 70.60 | 74.15 |
| DSR-0103322 | 13.40 | 17.30 | 15.35 | 47.80 | 49.40 | 48.60 | 72.10 | 71.10 | 71.60 |
| DSR-0103323 | 16.90 | 17.60 | 17.25 | 48.50 | 60.20 | 54.35 | 74.50 | 77.70 | 76.10 |
| DSR-0103324 | 85.10 | 91.10 | 88.10 | 93.00 | 98.60 | 95.80 | 93.30 | 108.90 | 101.10 |

### Example 7. Provided Oligonucleotides and Compositions are Active In Vivo

[1513] All animal procedures were performed under IACUC guidelines. Male 8-9 weeks of age C57BL/6 mice underwent surgery for the implantation of intracerebroventricular cannulas. At 10-11 weeks of age the same mice were dosed 100 mg/kg on Day 0 by intracerebroventricular injection. At day 14 animals in groups 1-6 were euthanized by CO₂ asphyxiation followed by thoracotomy. After cardiac perfusion with PBS brain samples were taken from both hemispheres (cortex, striatum, hippocampus, cerebellum, and brain stem) and flash frozen on dry ice. At day 56 animals in groups 7-12 were euthanized by CO₂ asphyxiation followed by thoracotomy and terminal blood collection. After cardiac perfusion with PBS brain samples were taken from both hemispheres (cortex, striatum, hippocampus, cerebellum, brain stem, and spinal cord) and flash frozen on dry ice. Two animals from each group had the right hemisphere of their brain placed in buffered 10% formalin. Total RNA from different CNS regions was extracted using RNeasy 96 kit (Qiagen), after tissue lysis with TRIzol and chloroform. cDNA production from RNA samples were performed using High-Capacity cDNA Reverse Transcription kit (Thermo Fisher) following manufacturer's instructions and qPCR analysis performed in CFX System using iQ Multiplex Powermix (Bio-Rad For mouse APP mRNA, the following qPCR assay were utilized: Thermofisher Taqman qPCR assay ID Mm01344172_m1. Mouse HPRT was used as normalizer (Forward 5′CAAACTTTGCTTTCCCTGGTT3′, Reverse 5′TGGCCTGTATCCAACACTTC3′, Probe 5′/5HEX/ACCAGCAAG/Zen/CTTGCAACCTTAACC/3IABkFQ/3′. cDNA production from RNA samples were performed using High-Capacity cDNA Reverse Transcription kit (Thermo Fisher) following manufacturer's instructions and qPCR analysis performed in CFX System using iQ Multiplex Powermix (Bio-Rad For neurotoxicity markers, the following qPCR assays were utilized: Thermofisher Taqman qPCR assay ID for Calb1: Mm00486647_m1, Grid2: Mm00515047_m1, Pcp2: Mm00435514_m1, Gfap: Mm01253033_m1, Aif1: Mm00479862_g1. Thermofisher Taqman qPCR assay ID Mouse Tubb3 which was used as normalizer: Mm00727586_s1.

[1514] Oligonucleotide accumulation in CNS regions was determined by sandwich ELISA.

[1515] To evaluate the safety of siRNAs used, serum NfL levels were measured at 4-, 6-, and 8-weeks following administration. Monoclonal antibody UD1 (Uman Diagnotics) was covalently coupled to MagPlex-C Microspheres #12 (MC10012-01, Luminex) using xMAP Antibody Coupling Kit (#40-50016, Luminex). Serum samples from mice were diluted as 1:4 with Specimen Diluent Buffer (Quidel #A3670) and incubated with UD1 coupled microspheres (2500 beads/well) in a 96-well plate for 18-20 hours at 4 C on an orbital plated shaker. Following three washes with Wash Buffer (EMD Millipore #L-WB), the wells were subjected to an incubation step with 25 μL of Detection antibody (1:500, UD3, Uman Diagnostics) on a plate shaker for 2 hours at ambient temperature. 25 μL of Streptavidin-Phycoerthrin (EMD Millipore #LB-SAPE10) was introduced into each well, followed by an incubation period of 30 minutes with continuous agitation. Following three rounds of washing, 150 microliters of Sheath Fluid PLUS (EMD Millipore #40-50021) was introduced, and subsequently, the beads were resuspended on a plate shaker for a duration of 5 minutes. The fluorescence intensity signal of the beads was measured using FLEXMAP 3D (Luminex) instrument with xPONENT software (Luminex). The analyses were conducted in duplicate to ensure accuracy and reliability. The standard NfL protein (Progen #RPC20469) was used to prepare five standards at the concentration from 30 to 200,000 pg/ml in Assay buffer (EMD Millipore #L-AB) Unspiked assay buffer was used as blank. Standard curves were fitted using 5-Parameter Logistic regression analysis by XPONENT software. Average NfL concentration of each group was calculated and plotted using GraphPad Prism. Minimal changes in the serum levels of NfL were observed in the mice treated with siRNA, in comparison to the group treated with PBS. There was no statistically significant difference observed between the groups.

[1516] Cerebellum total RNA extracted from mice treated with PBS, DSR-0103199, and DSR-0103299 (3 animals from each group) were RNA-sequenced and Fastq's were obtained from Novogene. nf-core/rnaseq (version 3.10.1) pipeline was used to process the data, with the specific packages following. Adapters were trimmed using Trim Galore!(Version 0.6.7 & cutadapt version 3.4) then aligned using STAR (version 2.7.9a) and transcript counts quantified using Salmon (version 1.9.0). Aligned bam files were processed using R (version 4.3.0) and differential expression results calculated using DEseq2 (version 1.40.2) and plotted using EnhancedVolcano (version 1.18.0) with cutoffs greater than |log 2foldChange|>1 and padj (Benjamini-Hochberg) less than 0.01.

[1517] Table 25. shows % mouse APP mRNA remaining relative to PBS control in the cortex 14 days post dosing. N=7. N.D.: Not determined.

| animal | % remaining of mAPP mRNA | | | | | |
|---|---|---|---|---|---|---|
| No. | PBS | DSR-0103199 | DSR-0103216 | DSR-0103299 | DSR-0103300 | DSR-0103301 |
| 1 | 93.40 | 44.60 | 40.40 | 15.60 | 33.90 | 37.60 |
| 2 | 84.40 | 9.40 | 22.60 | 49.30 | 46.20 | 16.20 |
| 3 | 98.10 | 17.10 | 22.40 | 6.50 | 15.50 | 31.90 |
| 4 | 101.50 | 74.10 | 16.20 | 19.70 | 38.30 | 16.90 |
| 5 | 105.50 | 35.30 | 78.10 | 24.90 | 55.60 | 19.40 |
| 6 | 116.90 | 29.20 | 30.70 | 29.50 | 23.20 | 19.40 |
| 7 | 100.20 | 16.50 | 26.60 | 38.30 | 20.10 | 19.80 |
| Mean | 100.00 | 32.31 | 33.86 | 26.26 | 33.26 | 23.03 |

[1518] Table 26. shows % mouse APP mRNA remaining relative to PBS control in the cortex 56 days post dosing. N=7. N.D.: Not determined.

| animal | % remaining of mAPP mRNA | | | | | |
|---|---|---|---|---|---|---|
| No. | PBS | DSR-0103199 | DSR-0103216 | DSR-0103299 | DSR-0103300 | DSR-0103301 |
| 1 | 114.3 | 15.5 | 27.1 | 35.4 | 35.2 | 9.9 |
| 2 | 105.7 | 9.4 | 17.4 | 21.3 | 21.9 | 17.1 |
| 3 | 96.9 | 113.7 | 60 | 30.8 | 21.6 | 29.2 |
| 4 | 88.9 | 14.3 | 42 | 22.1 | 61.9 | 11.3 |
| 5 | 106 | 20.6 | 43.6 | 20.4 | 19.7 | 30 |
| 6 | 117.6 | 31.6 | 20.5 | 30.6 | 14.2 | 33.6 |
| 7 | 70.6 | 12.6 | 13 | 21.1 | N.D. | 11.9 |
| Mean | 100.00 | 31.10 | 31.94 | 25.96 | 24.93 | 20.43 |

[1519] Table 27. shows % mouse APP mRNA remaining relative to PBS control in the striatum 14 days post dosing. N=7. N.D.: Not determined.

| animal | % remaining of mAPP mRNA | | | | | |
|---|---|---|---|---|---|---|
| No. | PBS | DSR-0103199 | DSR-0103216 | DSR-0103299 | DSR-0103300 | DSR-0103301 |
| 1 | 86.90 | 56.60 | 52.10 | 15.90 | 45.70 | 33.50 |
| 2 | 125.10 | 14.00 | 17.40 | 37.30 | 53.40 | 13.00 |
| 3 | 90.00 | 18.10 | 26.30 | 22.10 | 28.80 | 11.40 |
| 4 | 96.20 | 90.60 | 19.30 | 19.70 | 40.00 | 13.60 |
| 5 | N.D. | 40.80 | 77.40 | 16.90 | 37.00 | 16.50 |
| 6 | 99.80 | 21.50 | 31.50 | 27.70 | 30.40 | N.D. |
| 7 | 102.10 | 12.60 | 23.10 | 46.90 | 14.90 | 19.30 |
| Mean | 85.73 | 36.31 | 35.30 | 26.64 | 35.74 | 15.33 |

[1520] Table 28. shows % mouse APP mRNA remaining relative to PBS control in the striatum 56 days post dosing. N=7. N.D.: Not determined.

| animal | % remaining of mAPP mRNA | | | | | |
|---|---|---|---|---|---|---|
| No. | PBS | DSR-0103199 | DSR-0103216 | DSR-0103299 | DSR-0103300 | DSR-0103301 |
| 1 | 104.40 | 8.40 | 16.00 | 73.60 | 28.60 | 8.10 |
| 2 | 102.00 | 8.80 | N.D. | 14.70 | 14.60 | 12.90 |
| 3 | 104.50 | 76.30 | 59.10 | 25.10 | 32.40 | 11.10 |
| 4 | 99.70 | 13.10 | 20.10 | 17.40 | 18.00 | 13.00 |
| 5 | 88.10 | 19.40 | 39.50 | 17.80 | 17.30 | 36.40 |
| 6 | 100.70 | 14.30 | 20.10 | 29.70 | 11.80 | 26.20 |
| 7 | 100.60 | 10.70 | 22.30 | 19.50 | N.D. | 21.80 |
| Mean | 100.00 | 21.57 | 25.30 | 28.26 | 17.53 | 18.50 |

[1521] Table 29. shows % mouse APP mRNA remaining relative to PBS control in the cerebellum 14 days post dosing. N=7. N.D.: Not determined.

| animal | % remaining of mAPP mRNA | | | | | |
|---|---|---|---|---|---|---|
| No. | PBS | DSR-0103199 | DSR-0103216 | DSR-0103299 | DSR-0103300 | DSR-0103301 |
| 1 | 99.30 | 52.10 | 44.70 | 32.40 | 39.80 | 51.30 |
| 2 | 92.40 | 28.60 | 33.00 | 44.50 | 39.50 | 18.80 |
| 3 | 102.70 | 32.90 | 27.20 | 41.20 | 27.20 | 34.90 |
| 4 | 92.20 | 64.10 | 45.60 | 45.60 | 42.50 | 16.80 |
| 5 | 104.00 | 58.50 | 65.40 | 37.80 | 69.50 | 18.80 |
| 6 | 108.00 | 38.60 | 33.00 | 41.60 | 31.90 | 19.20 |
| 7 | 101.40 | 12.50 | 31.70 | 43.90 | 24.90 | 22.50 |
| Mean | 100.00 | 41.04 | 40.09 | 41.00 | 39.33 | 26.04 |

[1522] Table 29. shows % mouse APP mRNA remaining relative to PBS control in the cerebellum 56 days post dosing. N=7. N.D.: Not determined.

| animal | % remaining of mAPP mRNA | | | | | |
|---|---|---|---|---|---|---|
| No. | PBS | DSR-0103199 | DSR-0103216 | DSR-0103299 | DSR-0103300 | DSR-0103301 |
| 1 | 105.30 | 20.10 | 28.60 | 80.80 | 20.90 | 16.60 |
| 2 | 86.00 | 20.20 | 24.20 | 19.40 | 22.10 | 14.10 |
| 3 | 90.80 | 78.70 | 52.80 | 25.90 | 23.70 | 20.30 |
| 4 | 81.60 | 20.90 | 35.90 | 20.30 | 27.40 | 18.30 |
| 5 | 103.10 | 25.30 | 42.60 | 27.40 | 23.40 | 22.90 |
| 6 | 109.80 | 11.10 | 29.50 | 30.90 | 21.60 | 26.10 |
| 7 | 123.40 | 23.20 | 32.60 | 42.10 | N.D. | 20.20 |
| Mean | 100.00 | 28.50 | 35.17 | 35.26 | 19.87 | 19.79 |

[1523] Table 30. shows % mouse APP mRNA remaining relative to PBS control in the hippocampus 14 days post dosing. N=7. N.D.: Not determined.

| animal | % remaining of mAPP mRNA | | | | | |
|---|---|---|---|---|---|---|
| No. | PBS | DSR-0103199 | DSR-0103216 | DSR-0103299 | DSR-0103300 | DSR-0103301 |
| 1 | 85.80 | 20.60 | 16.70 | 19.70 | 21.90 | 27.70 |
| 2 | 107.40 | 7.20 | 17.70 | 23.50 | 16.30 | 8.30 |
| 3 | 85.60 | 8.90 | 8.30 | 19.50 | 16.60 | 21.70 |
| 4 | 93.90 | 50.40 | 7.20 | 21.60 | 15.20 | 11.80 |
| 5 | 86.40 | 22.30 | 57.20 | 55.10 | 27.90 | 13.10 |
| 6 | 104.10 | 18.10 | 12.20 | 18.80 | 13.00 | 8.10 |
| 7 | 136.80 | 9.40 | 11.20 | 21.60 | 12.00 | 14.80 |
| Mean | 100.00 | 19.56 | 18.64 | 25.69 | 17.56 | 15.07 |

[1524] Table 31. shows % mouse APP mRNA remaining relative to PBS control in the hippocampus 56 days post dosing. N=7. N.D.: Not determined.

| animal | % remaining of mAPP mRNA | | | | | |
|---|---|---|---|---|---|---|
| No. | PBS | DSR-0103199 | DSR-0103216 | DSR-0103299 | DSR-0103300 | DSR-0103301 |
| 1 | 102.70 | 24.40 | 7.20 | 42.10 | 14.20 | 6.90 |
| 2 | 107.50 | 7.20 | 57.10 | N.D. | 11.80 | 7.60 |
| 3 | 101.60 | 45.10 | 32.10 | 14.50 | 13.70 | 13.60 |
| 4 | 113.70 | 8.20 | 13.60 | 8.40 | 20.20 | 7.50 |
| 5 | 108.90 | 6.60 | 28.50 | 9.80 | 13.40 | 13.20 |
| 6 | 89.20 | 27.10 | 7.50 | 16.00 | 7.20 | 8.50 |
| 7 | 76.30 | 6.00 | 10.50 | 13.80 | N.D. | 7.30 |
| Mean | 100.00 | 17.80 | 22.36 | 14.94 | 11.50 | 9.23 |

[1525] Table 32. shows % mouse APP mRNA remaining relative to PBS control in the brainstem 14 days post dosing. N=7. N.D.: Not determined.

| animal | % remaining of mAPP mRNA | | | | | |
|---|---|---|---|---|---|---|
| No. | PBS | DSR-0103199 | DSR-0103216 | DSR-0103299 | DSR-0103300 | DSR-0103301 |
| 1 | 99.40 | 27.00 | 25.20 | 14.80 | 22.80 | 41.40 |
| 2 | 93.60 | 10.20 | 14.70 | 28.90 | 24.90 | 13.20 |
| 3 | 95.80 | 13.50 | 12.50 | 30.00 | 18.50 | 20.50 |
| 4 | 91.20 | 54.20 | 15.10 | 26.00 | 23.60 | 11.60 |
| 5 | 117.30 | 34.80 | 49.80 | 36.90 | 38.50 | 13.90 |
| 6 | 99.00 | 20.40 | 17.30 | 25.90 | 19.70 | 12.50 |
| 7 | 103.60 | 11.30 | 15.10 | 27.00 | 19.00 | 14.00 |
| Mean | 100.00 | 24.49 | 21.39 | 27.07 | 23.86 | 18.16 |

[1526] Table 33. shows % mouse APP mRNA remaining relative to PBS control in the brainstem 56 days post dosing. N=7. N.D.: Not determined.

| animal | % remaining of mAPP mRNA | | | | | |
|---|---|---|---|---|---|---|
| No. | PBS | DSR-0103199 | DSR-0103216 | DSR-0103299 | DSR-0103300 | DSR-0103301 |
| 1 | 108.50 | 17.00 | 22.60 | 85.20 | 18.20 | 11.30 |
| 2 | 93.90 | 10.10 | N.D. | 20.50 | 20.20 | 13.20 |
| 3 | 97.70 | 71.10 | 47.70 | 20.60 | 19.80 | 14.50 |
| 4 | 105.00 | 15.20 | 22.20 | 15.00 | 21.20 | 12.40 |
| 5 | 93.00 | 11.10 | 27.80 | 16.30 | 14.60 | 17.90 |
| 6 | 110.00 | 19.60 | 15.90 | 20.90 | 13.90 | 15.40 |
| 7 | 92.00 | 13.60 | 22.20 | 24.00 | N.D. | 13.70 |
| Mean | 100.00 | 22.53 | 22.63 | 28.93 | 15.41 | 14.06 |

[1527] Table 34. shows % mouse APP mRNA remaining relative to PBS control in the spinal cord 56 days post dosing. N=7. N.D.: Not determined.

| animal | % remaining of mAPP mRNA | | | | | |
|---|---|---|---|---|---|---|
| No. | PBS | DSR-0103199 | DSR-0103216 | DSR-0103299 | DSR-0103300 | DSR-0103301 |
| 1 | 94.90 | 10.50 | 10.60 | 72.20 | 9.20 | 8.40 |
| 2 | 99.70 | 8.90 | 24.70 | 17.30 | 11.70 | 8.00 |
| 3 | 99.20 | 71.40 | 33.30 | 16.50 | 11.70 | 9.70 |
| 4 | 108.10 | 19.50 | 14.60 | 10.80 | 17.40 | 9.70 |
| 5 | 97.80 | 11.10 | 14.80 | 16.70 | 10.90 | 13.50 |
| 6 | 104.50 | 11.50 | 11.50 | 18.00 | 10.90 | 13.10 |
| 7 | 95.70 | 19.80 | 20.20 | 24.60 | N.D. | 8.80 |
| Mean | 100.00 | 21.81 | 18.53 | 25.16 | 10.26 | 10.17 |

[1528] Table 35. shows changes in mouse GFAP mRNA remaining relative to PBS control in the cerebellum 14 days post dosing. N=7. N.D.: Not determined.

| animal | Relative change of mGFAP mRNA | | | | | |
|---|---|---|---|---|---|---|
| No. | PBS | DSR-0103199 | DSR-0103216 | DSR-0103299 | DSR-0103300 | DSR-0103301 |
| 1 | 0.93 | 1.23 | 0.96 | 0.74 | 1.02 | 0.86 |
| 2 | 0.92 | 1.20 | 1.18 | 0.90 | 1.06 | 1.06 |
| 3 | 1.11 | 1.45 | 1.68 | 0.81 | 0.87 | 0.88 |
| 4 | 0.95 | 0.81 | 1.11 | 1.07 | 1.03 | 1.21 |
| 5 | 0.88 | 1.31 | 0.99 | 1.09 | 1.32 | 1.12 |
| 6 | 1.17 | 1.60 | 1.37 | 1.11 | 1.15 | 1.40 |
| 7 | 1.04 | 1.14 | 1.79 | 1.10 | 1.03 | 1.00 |
| Mean | 1.00 | 1.25 | 1.30 | 0.97 | 1.07 | 1.08 |

[1529] Table 36. shows changes in mouse GFAP mRNA remaining relative to PBS control in the cerebellum 56 days post dosing. N=7. N.D.: Not determined.

| animal | Relative change of mGFAP mRNA | | | | | |
|---|---|---|---|---|---|---|
| No. | PBS | DSR-0103199 | DSR-0103216 | DSR-0103299 | DSR-0103300 | DSR-0103301 |
| 1 | 1.09 | 0.64 | 0.91 | 1.00 | 1.07 | 0.97 |
| 2 | 0.86 | 1.09 | N.D. | 0.80 | 6.32 | 0.98 |
| 3 | 1.10 | 1.08 | 0.84 | 1.13 | 0.81 | 1.08 |
| 4 | 0.78 | 0.88 | 0.86 | 1.05 | 1.03 | 0.83 |
| 5 | 1.10 | 1.23 | 0.97 | 1.08 | 0.89 | 1.22 |
| 6 | 0.96 | 1.86 | 0.89 | 1.13 | 0.96 | 1.22 |
| 7 | 1.10 | 1.01 | 1.07 | 1.12 | N.D. | 1.01 |
| Mean | 1.00 | 1.11 | 0.79 | 1.04 | 1.58 | 1.04 |

[1530] Table 37. shows changes in mouse GFAP mRNA remaining relative to PBS control in the brainstem 14 days post dosing. N=7. N.D.: Not determined.

| | Relative change of mGFAP mRNA | | | | | |
|---|---|---|---|---|---|---|
| animal No. | PBS | DSR-0103199 | DSR-0103216 | DSR-0103299 | DSR-0103300 | DSR-0103301 |
| 1 | 1.07 | 1.22 | 1.52 | 1.06 | 0.91 | 0.87 |
| 2 | 1.03 | 1.43 | 1.54 | 0.92 | 1.00 | 0.90 |
| 3 | 1.02 | 1.34 | 1.67 | 0.95 | 0.60 | 0.55 |
| 4 | 0.86 | 0.76 | 1.59 | 1.34 | 0.82 | 0.84 |
| 5 | 1.25 | 1.17 | 1.39 | 0.84 | 1.51 | 0.77 |
| 6 | 0.85 | 0.99 | 1.89 | 0.90 | 0.84 | 1.02 |
| 7 | 0.92 | 1.53 | 1.92 | 0.89 | 1.03 | 0.60 |
| Mean | 1.00 | 1.21 | 1.65 | 0.99 | 0.96 | 0.79 |

[1531] Table 38. shows changes in mouse GFAP mRNA remaining relative to PBS control in the brainstem 56 days post dosing. N=7. N.D.: Not determined.

| | Relative change of mGFAP mRNA | | | | | |
|---|---|---|---|---|---|---|
| animal No. | PBS | DSR-0103199 | DSR-0103216 | DSR-0103299 | DSR-0103300 | DSR-0103301 |
| 1 | 1.06 | 0.80 | 0.66 | 0.93 | 0.84 | 1.15 |
| 2 | 1.30 | 0.89 | N.D. | 0.94 | 4.45 | 0.75 |
| 3 | 0.56 | 0.86 | 0.74 | 0.74 | 0.90 | 0.83 |
| 4 | 0.85 | 0.99 | 0.93 | 0.88 | 0.68 | 1.10 |
| 5 | 1.19 | 0.95 | 0.71 | 1.02 | 0.65 | 0.73 |
| 6 | 0.98 | 0.90 | 0.67 | 0.84 | 1.04 | 0.87 |
| 7 | 1.05 | 1.35 | 0.76 | 0.78 | N.D. | 0.97 |
| Mean | 1.00 | 0.96 | 0.64 | 0.88 | 1.22 | 0.91 |

[1532] Table 39. shows changes in mouse GFAP mRNA remaining relative to PBS control in the spinal cord 56 days post dosing. N=7. N.D.: Not determined.

| | Relative change of mGFAP mRNA | | | | | |
|---|---|---|---|---|---|---|
| animal No. | PBS | DSR-0103199 | DSR-0103216 | DSR-0103299 | DSR-0103300 | DSR-0103301 |
| 1 | 1.04 | 1.03 | 1.06 | 1.20 | 1.08 | 1.36 |
| 2 | 0.97 | 1.06 | 1.12 | 1.27 | 2.00 | 1.12 |
| 3 | 1.05 | 1.08 | 0.98 | 1.03 | 0.96 | 1.07 |
| 4 | 0.87 | 1.04 | 0.95 | 1.10 | 1.06 | 1.11 |
| 5 | 1.00 | 0.98 | 0.76 | 1.19 | 1.17 | 0.93 |
| 6 | 1.04 | 1.10 | 0.87 | 1.13 | 1.10 | 1.24 |
| 7 | 1.03 | 1.14 | 0.89 | 1.16 | 0.00 | 1.21 |
| Mean | 1.00 | 1.06 | 0.95 | 1.15 | 1.05 | 1.15 |

[1533] Table 40. shows changes in mouse AIF1 mRNA remaining relative to PBS control in the cerebellum 14 days post dosing. N=7. N.D.: Not determined.

| | Relative change of mAIF1 mRNA | | | | | |
|---|---|---|---|---|---|---|
| animal No. | PBS | DSR-0103199 | DSR-0103216 | DSR-0103299 | DSR-0103300 | DSR-0103301 |
| 1 | 0.88 | 1.26 | 2.25 | 0.97 | 0.99 | 0.91 |
| 2 | 0.95 | 2.15 | 2.43 | 0.95 | 0.95 | 1.20 |
| 3 | 0.99 | 3.04 | 3.82 | 0.99 | 0.72 | 0.98 |
| 4 | 1.00 | 1.03 | 2.14 | 1.22 | 1.10 | 1.49 |
| 5 | 0.80 | 1.69 | 1.37 | 0.94 | 2.74 | 0.95 |
| 6 | 0.94 | 3.24 | 2.81 | 0.89 | 0.91 | 1.81 |
| 7 | 1.44 | 1.69 | 2.83 | 0.82 | 1.06 | 1.74 |
| Mean | 1.00 | 2.01 | 2.52 | 0.97 | 1.21 | 1.30 |

[1534] Table 41. shows changes in mouse AIF1 mRNA remaining relative to PBS control in the cerebellum 56 days post dosing. N=7. N.D.: Not determined.

| | Relative change of mAIF1 mRNA | | | | | |
|---|---|---|---|---|---|---|
| animal No. | PBS | DSR-0103199 | DSR-0103216 | DSR-0103299 | DSR-0103300 | DSR-0103301 |
| 1 | 1.01 | 0.99 | 1.43 | 0.93 | 0.99 | 1.06 |
| 2 | 0.88 | 1.46 | 0.00 | 0.73 | 9.58 | 1.01 |
| 3 | 0.82 | 1.03 | 0.93 | 0.95 | 0.87 | 0.89 |
| 4 | 0.89 | 1.43 | 1.16 | 1.05 | 0.96 | 0.73 |
| 5 | 1.13 | 1.42 | 1.00 | 1.00 | 0.91 | 1.10 |
| 6 | 0.96 | 2.23 | 1.17 | 0.95 | 0.95 | 0.79 |
| 7 | 1.30 | 1.46 | 1.37 | 0.94 | 0.00 | 0.91 |
| Mean | 1.00 | 1.43 | 1.01 | 0.94 | 2.04 | 0.93 |

[1535] Table 42. shows changes in mouse AIF1 mRNA remaining relative to PBS control in the brainstem 14 days post dosing. N=7. N.D.: Not determined.

| | Relative change of mAIF1 mRNA | | | | | |
|---|---|---|---|---|---|---|
| animal No. | PBS | DSR-0103199 | DSR-0103216 | DSR-0103299 | DSR-0103300 | DSR-0103301 |
| 1 | 1.09 | 1.40 | 1.85 | 1.12 | 1.06 | 1.31 |
| 2 | 0.93 | 1.99 | 2.12 | 0.98 | 1.14 | 1.01 |
| 3 | 0.97 | 2.28 | 2.41 | 1.01 | 1.01 | 1.15 |
| 4 | 0.99 | 1.08 | 1.67 | 1.37 | 0.83 | 0.90 |
| 5 | 0.93 | 1.25 | 1.42 | 0.82 | 2.63 | 0.59 |
| 6 | 0.82 | 1.26 | 2.50 | 0.71 | 0.73 | 1.35 |
| 7 | 1.27 | 1.60 | 2.46 | 1.05 | 1.02 | 0.85 |
| Mean | 1.00 | 1.55 | 2.06 | 1.01 | 1.20 | 1.02 |

[1536] Table 43. shows changes in mouse AIF1 mRNA remaining relative to PBS control in the brainstem 56 days post dosing. N=7. N.D.: Not determined.

| | Relative change of mAIF1 mRNA | | | | | |
|---|---|---|---|---|---|---|
| animal No. | PBS | DSR-0103199 | DSR-0103216 | DSR-0103299 | DSR-0103300 | DSR-0103301 |
| 1 | 1.22 | 1.24 | 1.17 | 1.02 | 0.87 | 0.87 |
| 2 | 0.96 | 1.44 | 0.00 | 0.80 | 5.80 | 0.68 |
| 3 | 0.84 | 0.79 | 0.80 | 0.80 | 0.87 | 0.78 |
| 4 | 0.91 | 1.17 | 1.01 | 0.76 | 1.07 | 0.85 |
| 5 | 1.24 | 1.27 | 0.99 | 0.84 | 0.74 | 0.74 |
| 6 | 0.66 | 1.29 | 0.75 | 0.74 | 0.85 | 0.77 |
| 7 | 1.17 | 1.43 | 0.83 | 0.73 | 0.00 | 0.81 |
| Mean | 1.00 | 1.23 | 0.79 | 0.81 | 1.46 | 0.79 |

[1537] Table 44. shows changes in mouse AIF1 mRNA remaining relative to PBS control in the spinal cord 56 days post dosing. N=7. N.D.: Not determined.

| | Relative change of mAIF1 mRNA | | | | | |
|---|---|---|---|---|---|---|
| animal No. | PBS | DSR-0103199 | DSR-0103216 | DSR-0103299 | DSR-0103300 | DSR-0103301 |
| 1 | 1.08 | 1.21 | 1.63 | 1.03 | 0.95 | 1.08 |
| 2 | 0.96 | 1.60 | 1.28 | 1.21 | 4.91 | 1.15 |
| 3 | 0.88 | 0.97 | 1.28 | 0.91 | 1.06 | 1.08 |
| 4 | 0.89 | 1.35 | 1.31 | 1.12 | 1.11 | 1.05 |
| 5 | 1.12 | 1.23 | 1.08 | 1.12 | 0.98 | 1.09 |
| 6 | 1.03 | 1.41 | 1.27 | 1.14 | 0.86 | 0.99 |
| 7 | 1.03 | 1.29 | 1.37 | 1.01 | N.D. | 1.13 |
| Mean | 1.00 | 1.30 | 1.32 | 1.08 | 1.41 | 1.08 |

[1538] Table 45. shows changes in mouse PCP2 mRNA remaining relative to PBS control in the cerebellum-14 days-pos-t-dosing. N=7. N.D.: Not determined.

| | Relative change of mPCP2 mRNA | | | | | |
|---|---|---|---|---|---|---|
| animal No. | PBS | DSR-0103199 | DSR-0103216 | DSR-0103299 | DSR-0103300 | DSR-0103301 |
| 1 | 0.96 | 0.97 | 1.05 | 0.98 | 1.04 | 1.26 |
| 2 | 1.01 | 1.07 | 1.00 | 1.28 | 1.50 | 0.85 |
| 3 | 1.11 | 1.15 | 0.64 | 0.95 | 0.92 | 1.06 |
| 4 | 1.23 | 0.89 | 1.19 | 1.06 | 1.08 | 1.00 |
| 5 | 0.67 | 1.20 | 0.92 | 0.80 | 0.79 | 0.96 |
| 6 | 1.14 | 1.22 | 1.08 | 1.01 | 0.87 | 1.06 |
| 7 | 0.87 | 0.00 | 1.31 | 1.00 | 1.12 | 1.42 |
| Mean | 1.00 | 0.93 | 1.03 | 1.01 | 1.05 | 1.09 |

[1539] Table 46. shows changes in mouse PCP2 mRNA remaining relative to PBS control in the cerebellum 56 days post dosing. N=7. N.D.: Not determined.

| | Relative change of mPCP2 mRNA | | | | | |
|---|---|---|---|---|---|---|
| animal No. | PBS | DSR-0103199 | DSR-0103216 | DSR-0103299 | DSR-0103300 | DSR-0103301 |
| 1 | 0.82 | 0.56 | 0.59 | 0.55 | 0.61 | 0.63 |
| 2 | 0.52 | 0.75 | 0.43 | 0.39 | 0.61 | 0.69 |
| 3 | 0.74 | 0.73 | 0.68 | 0.60 | 0.65 | 0.70 |
| 4 | 0.81 | 0.87 | 0.64 | 0.62 | 0.54 | 0.78 |
| 5 | 1.78 | 0.97 | 0.40 | 0.68 | 0.65 | 0.85 |
| 6 | 1.71 | 0.00 | 0.77 | 0.77 | 0.84 | 0.93 |
| 7 | 0.62 | 0.87 | 0.70 | 0.81 | N.D. | 1.04 |
| Mean | 1.00 | 0.68 | 0.60 | 0.63 | 0.56 | 0.80 |

[1540] Table 47. shows changes in mouse GRID2 mRNA remaining relative to PBS control in the cerebellum 14 days post dosing. N=7. N.D.: Not determined.

| | Relative change of mGRID2 mRNA | | | | | |
|---|---|---|---|---|---|---|
| animal No. | PBS | DSR-0103199 | DSR-0103216 | DSR-0103299 | DSR-0103300 | DSR-0103301 |
| 1 | 0.99 | 1.08 | 1.12 | 1.11 | 1.25 | 1.27 |
| 2 | 0.87 | 1.18 | 1.01 | 1.19 | 1.08 | 0.95 |
| 3 | 1.12 | 1.14 | 0.72 | 0.96 | 1.09 | 1.06 |
| 4 | 1.11 | 0.97 | 0.92 | 1.03 | 1.01 | 1.02 |
| 5 | 0.78 | 1.12 | 1.00 | 0.82 | 0.93 | 1.07 |
| 6 | 1.00 | 1.12 | 1.01 | 1.09 | 0.95 | 1.10 |
| 7 | 1.13 | 0.04 | 1.06 | 1.16 | 1.28 | 1.70 |
| Mean | 1.00 | 0.95 | 0.98 | 1.05 | 1.09 | 1.17 |

[1541] Table 48. shows changes in mouse GRID2 mRNA remaining relative to PBS control in the cerebellum 56 days post dosing. N=7. N.D.: Not determined.

| | Relative change of mGRID2 mRNA | | | | | |
|---|---|---|---|---|---|---|
| animal No. | PBS | DSR-0103199 | DSR-0103216 | DSR-0103299 | DSR-0103300 | DSR-0103301 |
| 1 | 0.87 | 0.79 | 1.04 | 1.02 | 1.07 | 1.23 |
| 2 | 0.82 | 1.28 | 0.57 | 0.56 | 0.98 | 1.17 |
| 3 | 0.98 | 1.16 | 1.17 | 0.87 | 1.21 | 1.20 |
| 4 | 0.81 | 1.09 | 1.19 | 0.97 | 0.88 | 1.21 |
| 5 | 1.03 | 1.21 | 0.60 | 0.99 | 0.83 | 1.26 |
| 6 | 0.99 | 0.06 | 1.21 | 1.11 | 1.08 | 1.27 |
| 7 | 1.50 | 1.61 | 1.49 | 1.40 | N.D. | 1.70 |
| Mean | 1.00 | 1.03 | 1.04 | 0.99 | 0.86 | 1.29 |

[1542] Table 49. shows changes in mouse CALBINDIN1 mRNA remaining relative to PBS control in the cerebellum 14 days post dosing. N=7. N.D.: Not determined.

| | Relative change of m CALBINDIN1 mRNA | | | | | |
|---|---|---|---|---|---|---|
| animal No. | PBS | DSR-0103199 | DSR-0103216 | DSR-0103299 | DSR-0103300 | DSR-0103301 |
| 1 | 0.95 | 1.04 | 1.04 | 0.75 | 1.09 | 1.06 |
| 2 | 0.96 | 0.91 | 1.18 | 1.08 | 1.13 | 0.96 |
| 3 | 1.32 | 0.99 | 0.81 | 0.98 | 0.80 | 0.67 |
| 4 | 1.16 | 1.02 | 0.72 | 0.97 | 1.08 | 1.09 |
| 5 | 0.76 | 1.00 | 0.77 | 0.77 | 0.56 | 1.07 |
| 6 | 0.88 | 0.98 | 0.89 | 0.85 | 0.97 | 1.06 |
| 7 | 0.97 | 0.03 | 1.00 | 0.86 | 1.11 | 0.89 |
| Mean | 1.00 | 0.85 | 0.92 | 0.89 | 0.96 | 0.97 |

[1543] Table 50. shows changes in mouse CALBINDIN1 mRNA remaining relative to PBS control in the cerebellum 56 days post dosing. N=7. N.D.: Not determined.

| | Relative change of m CALBINDIN1 mRNA | | | | | |
|---|---|---|---|---|---|---|
| animal No. | PBS | DSR-0103199 | DSR-0103216 | DSR-0103299 | DSR-0103300 | DSR-0103301 |
| 1 | 1.14 | 0.99 | 1.05 | 1.13 | 1.09 | 1.09 |
| 2 | 0.83 | 1.08 | 0.62 | 0.68 | 0.82 | 1.10 |
| 3 | 0.95 | 1.29 | 0.92 | 0.77 | 1.05 | 1.05 |
| 4 | 1.07 | 1.09 | 0.95 | 1.02 | 0.86 | 0.90 |
| 5 | 0.95 | 1.03 | 0.48 | 0.89 | 0.78 | 1.13 |
| 6 | 1.16 | 0.12 | 0.94 | 1.11 | 0.98 | 1.07 |
| 7 | 0.91 | 0.92 | 0.94 | 1.01 | 0.00 | 1.09 |
| Mean | 1.00 | 0.93 | 0.84 | 0.94 | 0.80 | 1.06 |

[1544] Table 51. shows the accumulation of antisense strand in the cortex 14 days post dosing. N=7. N.D.: Not determined.

| | Cortex Guide Strand PK (ug oligo/g tissue) | | | | | |
|---|---|---|---|---|---|---|
| Aimal No. | PBS | DSR-0103199 | DSR-0103216 | DSR-0103299 | DSR-0103300 | DSR-0103301 |
| 1 | 0 | 1.33948 | 1.80608 | 3.82596 | 2.8835 | 0.66222 |
| 2 | 0 | 16.8195 | 3.84503 | 1.95844 | 1.86272 | 2.61393 |
| 3 | 0 | 2.85246 | 1.87771 | 15.1319 | 3.79604 | 2.71381 |
| 4 | 0 | 0.50572 | 5.66784 | 18.1493 | 1.77258 | 2.95025 |
| 5 | 0 | 1.06663 | 1.45146 | 6.11727 | 2.16316 | 5.23829 |
| 6 | 0 | 2.35304 | 2.9701 | 2.25564 | 4.74025 | 13.5293 |
| 7 | 0 | 3.67902 | 4.78442 | 2.51718 | 4.55966 | 3.24826 |
| Mean | 0 | 4.08798 | 3.20038 | 7.13653 | 3.11113 | 4.42229 |

[1545] Table 52. shows the accumulation of antisense strand in the cortex 56 days post dosing. N=7. N.D.: Not determined.

| Aimal | Cortex Guide Strand PK (ug oligo/g tissue) | | | | | |
|---|---|---|---|---|---|---|
| No. | PBS | DSR-0103199 | DSR-0103216 | DSR-0103299 | DSR-0103300 | DSR-0103301 |
| 3 | 0 | 0.20081 | 0.93402 | 2.00189 | 1.86236 | 2.37207 |
| 4 | 0 | 2.53469 | 1.8332 | 3.21747 | 1.84593 | 2.95649 |
| 5 | 0 | 3.0488 | 0.48963 | 2.58878 | 2.49124 | 0.91171 |
| 6 | 0 | 3.11275 | 9.08395 | 1.71651 | 2.2698 | 2.145 |
| 7 | 0 | 26.6596 | 6.58865 | 7.95356 | | 2.94993 |
| Mean | 0 | 7.11133 | 3.78589 | 3.49564 | 2.11733 | 2.26704 |

[1546] Table 53. shows the accumulation of antisense strand in the striatum 14 days post dosing. N=7. N.D.: Not determined.

| Aimal | Striatum Guide Strand PK (ug oligo/g tissue) | | | | | |
|---|---|---|---|---|---|---|
| No. | PBS | DSR-0103199 | DSR-0103216 | DSR-0103299 | DSR-0103300 | DSR-0103301 |
| 1 | 0 | 0.551 | 2.21288 | 2.32673 | 2.53787 | 0.73583 |
| 2 | 0 | 4.12606 | 3.36196 | 1.06003 | 1.21851 | 2.98398 |
| 3 | 0 | 2.18424 | 2.73792 | 5.76885 | 2.45364 | 0.9651 |
| 4 | 0 | 0.50011 | 2.12554 | 4.48963 | 1.52145 | 2.2157 |
| 5 | 0 | 0.61944 | 0.5552 | 1.46772 | 1.96907 | 2.73949 |
| 6 | 0 | 1.43174 | 2.79406 | 0.83037 | 1.87262 | 8.63543 |
| 7 | 0 | 4.75519 | 3.1783 | 1.98539 | 2.93697 | 5.0838 |
| Mean | 0 | 2.02397 | 2.42369 | 2.56125 | 2.07288 | 3.33705 |

[1547] Table 54. shows the accumulation of antisense strand in the striatum 56 days post dosing. N=7. N.D.: Not determined.

| Aimal | Striatum Guide Strand PK (ug oligo/g tissue) | | | | | |
|---|---|---|---|---|---|---|
| No. | PBS | DSR-0103199 | DSR-0103216 | DSR-0103299 | DSR-0103300 | DSR-0103301 |
| 3 | 0 | 0.42331 | 0.85208 | 0.7444 | 1.12985 | 2.20913 |
| 4 | 0 | 1.07156 | 2.51691 | 3.6308 | 1.91271 | 3.13026 |
| 5 | 0 | 1.79049 | 1.5583 | 0.78541 | 1.8188 | 1.61048 |
| 6 | 0 | 1.55346 | 1.71599 | 0.9843 | 0.86184 | 2.15115 |
| 7 | 0 | 11.8794 | 6.19197 | 5.16557 | | 9.43752 |
| Mean | 0 | 3.34364 | 2.56705 | 2.2621 | 1.4308 | 3.70771 |

[1548] Table 55. shows the accumulation of antisense strand in the hippocampus 14 days post dosing. N=7. N.D.: Not determined.

| Aimal | Hippocampus Guide Strand PK (ug oligo/g tissue) | | | | | |
|---|---|---|---|---|---|---|
| No. | PBS | DSR-0103199 | DSR-0103216 | DSR-0103299 | DSR-0103300 | DSR-0103301 |
| 1 | 0 | 2.81788 | 3.90611 | 3.31764 | 2.09342 | 1.03392 |
| 2 | 0 | 15.6481 | 5.6271 | 1.34039 | 1.5961 | 4.11233 |
| 3 | 0 | 5.18201 | 4.0548 | 5.6222 | 2.47653 | 1.63066 |
| 4 | 0 | 0.86528 | 5.96447 | 35.2191 | 1.04451 | 3.02446 |
| 5 | 0 | 1.20395 | 2.13628 | 11.0307 | 1.64763 | 3.54461 |
| 6 | 0 | 2.57232 | 7.11894 | 1.19691 | 3.50326 | 28.5453 |
| 7 | 0 | 5.39943 | 9.24162 | 1.93582 | 5.84708 | 1.62606 |
| Mean | 0 | 4.81271 | 5.43562 | 8.52325 | 2.60122 | 6.21676 |

[1549] Table 56. shows the accumulation of antisense strand in the hippocampus 56 days post dosing. N=7. N.D.: Not determined.

| Aimal | Hippocampus Guide Strand PK (ug oligo/g tissue) | | | | | |
|---|---|---|---|---|---|---|
| No. | PBS | DSR-0103199 | DSR-0103216 | DSR-0103299 | DSR-0103300 | DSR-0103301 |
| 3 | 0 | 0.22335 | 1.51477 | 2.20613 | 2.3042 | 2.98112 |
| 4 | 0 | 6.3419 | 2.4054 | 2.34931 | 2.30888 | 4.40675 |
| 5 | 0 | 3.83749 | 1.90508 | 2.74854 | 5.23838 | 1.74007 |
| 6 | 0 | 2.17971 | 9.00748 | 1.71049 | 2.99417 | 3.75598 |
| 7 | 0 | 23.3133 | 14.5841 | 9.43574 | | 5.2144 |
| Mean | 0 | 7.17915 | 5.88337 | 3.69004 | 3.21141 | 3.61966 |

[1550] Table 57. shows the accumulation of antisense strand in the cerebellum 14 days post dosing. N=7. N.D.: Not determined.

| Aimal | Cerebellum Guide Strand PK (ug oligo/g tissue) | | | | | |
|---|---|---|---|---|---|---|
| No. | PBS | DSR-0103199 | DSR-0103216 | DSR-0103299 | DSR-0103300 | DSR-0103301 |
| 1 | 0 | 1.40272 | 2.7092 | 3.72023 | 2.54973 | 0.79629 |
| 2 | 0 | 5.82978 | 5.76795 | 1.89276 | 1.64845 | 4.96995 |
| 3 | 0 | 3.79642 | 6.6563 | 2.65203 | 3.61692 | 2.17467 |
| 4 | 0 | 0.59886 | 7.38686 | 5.00374 | 2.06531 | 5.45346 |
| 5 | 0 | 1.44633 | 0.7256 | 2.3963 | 1.0604 | 4.8901 |
| 6 | 0 | 3.1469 | 4.99195 | 2.31226 | 3.37586 | 6.84859 |
| 7 | 0 | 6.31042 | 6.15305 | 2.08616 | 4.4272 | 4.68073 |
| Mean | 0 | 3.21878 | 4.91299 | 2.86621 | 2.6777 | 4.25911 |

[1551] Table 58. shows the accumulation of antisense strand in the cerebellum 56 days post dosing. N=7. N.D.: Not determined.

| Aimal | Cerebellum Guide Strand PK (ug oligo/g tissue) | | | | | |
|---|---|---|---|---|---|---|
| No. | PBS | DSR-0103199 | DSR-0103216 | DSR-0103299 | DSR-0103300 | DSR-0103301 |
| 3 | 0 | 0.15425 | 1.06097 | 2.0099 | 2.56686 | 4.3132 |
| 4 | 0 | 3.11745 | 2.08099 | 3.05043 | 1.0629 | 4.87016 |
| 5 | 0 | 5.12822 | 1.92624 | 2.1483 | 4.51151 | 2.93411 |
| 6 | 0 | 1.90138 | 4.63673 | 1.91964 | 3.78654 | 2.31057 |
| 7 | 0 | 4.8623 | 4.15376 | 2.11323 | | 4.6793 |
| Mean | 0 | 3.03272 | 2.77174 | 2.2483 | 2.98195 | 3.82147 |

[1552] Table 59. shows the accumulation of antisense strand in the brain stem14 days post dosing. N=7. N.D.: Not determined.

| Aimal | Brain Stem Guide Strand PK (ug oligo/g tissue) | | | | | |
|---|---|---|---|---|---|---|
| No. | PBS | DSR-0103199 | DSR-0103216 | DSR-0103299 | DSR-0103300 | DSR-0103301 |
| 1 | 0 | 2.77113 | 4.0305 | 3.56911 | 2.96699 | 1.08657 |
| 2 | 0 | 8.36009 | 4.857 | 2.03299 | 2.25413 | 5.09715 |
| 3 | 0 | 5.36779 | 7.76106 | 3.75237 | 4.66602 | 2.98417 |
| 4 | 0 | 1.35822 | 11.5525 | 16.0687 | 2.57904 | 6.48715 |
| 5 | 0 | 2.40431 | 1.7073 | 5.46635 | 1.66483 | 3.52442 |
| 6 | 0 | 3.31405 | 6.95348 | 2.31155 | 4.1131 | 12.8219 |
| 7 | 0 | 7.87811 | 11.0572 | 2.50131 | 5.24387 | 4.77719 |
| Mean | 0 | 4.49339 | 6.84558 | 5.10034 | 3.35543 | 5.25408 |

[1553] Table 60. shows the accumulation of antisense strand in the brain stem 56 days post dosing. N=7. N.D.: Not determined.

| Aimal | Brain Stem Guide Strand PK (ug oligo/g tissue) | | | | | |
|---|---|---|---|---|---|---|
| No. | PBS | DSR-0103199 | DSR-0103216 | DSR-0103299 | DSR-0103300 | DSR-0103301 |
| 3 | 0 | 0.40218 | 1.55602 | 2.05998 | 2.26861 | 3.13505 |
| 4 | 0 | 7.497 | 2.57235 | 3.62769 | 2.61901 | 3.91605 |
| 5 | 0 | 5.24135 | 1.89323 | 2.50807 | 4.59302 | 1.8709 |
| 6 | 0 | 2.5117 | 4.55858 | 2.05992 | 4.99378 | 2.50165 |
| 7 | 0 | 15.1391 | 9.30655 | 5.36508 | | 4.79568 |
| Mean | 0 | 6.15827 | 3.97735 | 3.12415 | 3.61861 | 3.24387 |

[1554] Table 61. shows the accumulation of antisense strand in the spinal cord 56 days post dosing. N=7. N.D.: Not determined.

| Aimal | Spinal Cord Guide Strand PK (ug oligo/g tissue) | | | | | |
|---|---|---|---|---|---|---|
| No. | PBS | DSR-0103199 | DSR-0103216 | DSR-0103299 | DSR-0103300 | DSR-0103301 |
| 1 | 0 | 0.33782 | 0.38522 | 0.0687 | 0.38175 | 0.8507 |
| 2 | 0 | 0.72056 | 0.17588 | 0.22064 | 0.32037 | 0.70698 |
| 3 | 0 | 0.08108 | 0.16001 | 0.20748 | 0.29364 | 0.46593 |
| 4 | 0 | 0.21632 | 0.31657 | 0.33833 | 0.21955 | 0.64514 |
| 5 | 0 | 0.4908 | 0.29841 | 0.20039 | 0.5234 | 0.38035 |
| 6 | 0 | 0.44083 | 0.4376 | 0.18571 | 0.38424 | 0.3374 |
| 7 | 0 | 0.22957 | 0.22118 | 0.16681 | | 0.58253 |
| Mean | 0 | 0.35957 | 0.28498 | 0.19829 | 0.35383 | 0.567 |

[1555] Table 61a. shows Ago 2 loading of guide strand relative to miR-124 in cortex. N=3.

| | Day 56 | | | | |
|---|---|---|---|---|---|
| | Ct: | Ct: | Ct: | Ct: | Relative |
| | mAPP/ | miR- | mAPP/ | miR- | mAPP/miR- |
| | Ago2 | 124/Ago2 | IgG | 124/IgG | 124 |
| PBS-1 | 33.48 | 30.09 | 32.62 | 38.6 | 0.08 |
| PBS-2 | 33.28 | 28.83 | 33.51 | 39.01 | 0.01 |
| PBS-3 | 32.27 | 28.16 | 32.65 | 38.56 | 0.01 |
| DSR-0103199-1 | 22.89 | 28.72 | 28.53 | 40 | 55.75 |
| DSR-0103199-2 | 21.32 | 28.78 | 27.2 | 37.89 | 173.08 |
| DSR-0103199-3 | 27.35 | 27.51 | 31.03 | 37.53 | 1.03 |
| DSR-0103216-1 | 20.59 | 28.03 | 26.94 | 36.64 | 171.52 |
| DSR-0103216-2 | 25.78 | 31.48 | 29.46 | 40 | 47.93 |
| DSR-0103216-3 | 24.65 | 28.89 | 28.74 | 36 | 17.79 |
| DSR-0103299-1 | 24.31 | 30.76 | 29.03 | 35.82 | 84.11 |
| DSR-0103299-2 | 22.55 | 28.33 | 26.41 | 36.1 | 51.16 |
| DSR-0103299-3 | 24.21 | 30.34 | 29.03 | 36.42 | 67.56 |
| DSR-0103300-1 | 23.63 | 29.16 | 28.72 | 37.79 | 44.85 |
| DSR-0103300-2 | 22.08 | 29.23 | 27.49 | 37.56 | 138.68 |
| DSR-0103300-3 | 23.52 | 28.31 | 28.77 | 36.2 | 26.94 |
| DSR-0103301-1 | 20.27 | 27.47 | 26.48 | 33.72 | 145.05 |
| DSR-0103301-2 | 22.80 | 28.74 | 27.42 | 35.09 | 58.90 |
| DSR-0103301-3 | 22.19 | 27.3 | 26.65 | 33.36 | 32.97 |

[1556] Table 61b. shows average serum NfL levels 4, 6, or 8 weeks post siRNA administration. N=7. N.D.: Not determined.

| | Group average NfL (pg/ml) | | |
|---|---|---|---|
| Group | Week 2 | Week 4 | Week 8 |
| PBS | 1383 | 1413 | 1440 |
| DSR-0103199 | 519.6 | 1014 | 826.5 |
| DSR-0103216 | 826.2 | 1017 | 1281 |
| DSR-0103299 | 1946 | 2563 | 1641 |
| DSR-0103300 | 744.5 | 981.3 | 1464 |
| DSR-0103301 | 746.9 | 860.7 | 724.5 |

[1557] Table 61c. shows gene numbers for downregulated, unchanged, and upregulated genes in RNAseq.

| | Downregulated | Unchanged | Upregulated |
|---|---|---|---|
| DSR-0103199 | 9 | 55156 | 256 |
| DSR-0103299 | 1 | 55420 | 0 |

### Provided Oligonucleotides and Compositions are Active In Situ

[1558] Various siRNAs for APP siRNA distribution in brain tissue were designed and constructed. A number of siRNAs were tested in situ using a ViewRNA in situ hybridization (ISH) Assay. Example protocol for ViewRNA in situ hybridization assay: Mouse brain hemisphere were fixed in 10% neutral buffered formalin overnight at 2-8° C., processed and embedded in paraffin. The tissue was cut into 5 μm sections and evaluated by using ViewRNA ISH Tissue 1-Plex Assay (Thermo Fisher Scientific, Cat. No. QVT0051) with custom designed APP siRNA antisense guide strand probe set (Thermo Fisher), according to manufacturer's protocol, with Fast Red Substrate. The representative digital images were generated using a Zeiss Axio Observer microscope (Zeiss, Thornwood, NY, USA) under brightfield or fluorescent field.

[1559] ViewRNA results show uniform distribution of APP siRNA guide strand SSR-0106222 in regions of Cortex, Hippocampus, Striatum, Cerebellum, Brainstem (MidBrain and Medulla), 8 weeks after a single ICV injection at P0. While guide strand SSR-0106223 appears less effective in some regions. DSR-0103299 (Passenger strand SSR-0106206) treated animal shows reduced distribution (detectible) of the guide strand SSR-0106222 in all regions of mouse brain at 8 weeks. APP siRNA guide strand broadly distributed and retained within cytoplasm of neuron cells in these target regions of mouse brain at 8 weeks; siRNA passenger strand was also detectible, although at levels less than Guide strand, in neuron cells for up to 8 weeks. Lipid conjugate (DSR-0103301) on passenger PN showed no benefit under these conditions.

[1560] Various siRNAs for APP protein knockdown in brain tissues were designed and constructed. A number of siRNAs were tested in situ using an Immunohistochemistry (IHC) Assay. Example protocol for Immunohistochemistry Assay: Mouse brain hemisphere biopsies were fixed and embedded in paraffin as described above. 10 um sections were cut and followed by standard IHC staining methods using anti-APP Rabbit mAb #19389 (E3F3P) and isotype control Rabbit mAb #3900 (DA1E) (Cell Signaling Technology), followed by Polymer-HRP 2nd Detection antibody, and developed with DAB (brown) for 10 min and counterstained with hematoxylin (blue). The representative digital images were generated using a Zeiss Axio Observer microscope (Zeiss, Thornwood, NY, USA) under brightfield.

[1561] IHC results show specific APP protein staining in all brain regions of the mouse in PBS treated animals. DSR-0103199, DSR-0103216, DSR-0103300 and DSR-0103301 showed marked reduction of APP protein staining in frontal cortex while DSR-0103299 showed reduced APP protein staining, but not as strong as other siRNAs in frontal cortex. All siRNA showed reduction of APP proteins in some areas of striatum, all areas of hippocampus (CA1-CA4), all areas of cerebellum including Purkinje cells, and mid brain regions of brain stem. The extend of APP protein knock down is less obvious for DSR-01013216 and DSR-0103299 in medulla region of brain stem, while DSR-0103199, DSR-0103300 and DSR-0103301 have profound APP protein reduction in the similar regions in medulla.

[1562] Various siRNAs for APP protein knockdown in brain tissues were designed and constructed. Histopathology analysis was conducted on a number of siRNAs tested in situ. Sagittal half brain samples were fixed in 10% neutral buffered formalin. Samples were grossed, embedded in paraffin, trimmed at 4-6 μm thickness, and stained with hematoxylin and eosin. Histopathology assessment of sagittal brain sections obtained from 7 to 8-week-old male B6 mice administered single dose of DSR-0103199, DSR-0103216, DSR-0103299, DSR-0103300, or DSR-0103301 at 100 μg and PBS as a control resulted in no test-article or adverse findings. Bacterial meningoencephalitis in 1 mouse administered DSR-0103300 was present and was due to contamination of administration site that resulted in increased serum NFL levels in this animal. Procedure-related cannula track was present in 1 each out of 2 PBS (control animals), DSR-0103216, or DSR-0103301 administered animals and 2 out of 2 animals in DSR-0103199 and DSR-0103299 groups. These changes were chronic and had healed except for a control animal with an active neurodegenerative process that contributed to increased serum NFL levels.

### Example 8. Provided Oligonucleotides and Compositions are Tested in In Vitro BJAB and PBMC Cytokine Assay

[1563] BJAB cells (a human Burkitt lymphoma B cell line) or human peripheral blood mononuclear cells (PBMCs) were incubated at a density of 4×10⁵ cells/well for 24 hours with test articles in a 96-well plate. BJAB cells were treated with a 4-point curve (1, 3, 10 and 30 μM), while PBMCs were treated with a 6-point curve (0.1, 0.3, 1, 3, 10 and 30 μM). After 24 hours, the supernatant was transferred and the presence of cytokines was assessed using a commercial cytokine magnetic bead kit (EMD Millipore, catalog number HCYTOMAG-60K). The procedure was carried out in accordance with the manufacturer's instructions and the samples were acquired on the FLEXMAP 3D® system. Median fluorescent intensity was analyzed using a 5-parameter logistic curve-fitting method to calculate analyte concentrations in the test samples based on standard curves.

[1564] Average fold changes vs. PBS were calculated per cytokine by dividing average cytokine concentration per condition by average cytokine concentration for PBS-treated wells. For the PBMC experiment, fold changes were calculated per donor. Cytokine fold changes were Z-standardized by subtracting the mean Cytokine fold change and dividing the centered values by the standard deviation of the fold changes. For PBMC experiments, Z standardization was performed separately per donor. For each compound, the maximum responding concentration was identified per donor/cell line as the concentration at which the sum of the Z-standardized Cytokine fold changes was highest. For ranking of pro-inflammatory potential, Euclidean distance vs. PBS was calculated for each compound's maximal responding concentration per donor/cell line across Z-standardized Cytokine fold changes. For the BJAB experiment, compounds were ranked according to Euclidean distance vs. PBS. For the PBMC experiment, compounds were first ranked separately by donor according to Euclidean distance vs. PBS. The compound with the highest overall distance vs. PBS across donors was identified as the one in which the sum of the individual donor ranks was highest. To normalize distance values per donor, Euclidean distances were scaled per donor relative to that respective donor's Nusinersen distance (0%) and its distance for the compound with the highest overall distance vs. PBS (100%). Final rankings for the PBMC experiment were assigned based on the average scaled Euclidean distance vs. PBS across all donors.

[1565] Table 62. shows euclidian distance from PBS in BJAB cytokine assay.

| Compound ID | Distance vs PBS | Rank |
|---|---|---|
| DSR-0103199 | 0.0107 | 1 |
| DSR-0103216 | 0.0705 | 2 |
| ASO-0104323 | 0.0967 | 3 |
| DSR-0103300 | 0.1644 | 4 |
| DSR-0103299 | 0.2072 | 5 |
| DSR-0103301 | 0.2142 | 6 |
| ASO-0109259 | 0.4144 | 7 |
| ASO-0100157 | 1.9408 | 8 |
| ASO-0136356 | 9.0727 | 9 |

[1566] Table 63. shows euclidian distance from PBS in PBMC cytokine assay.

| | | | | Mean | |
|---|---|---|---|---|---|
| | Donor | Distance | Distance | (Distance | Rank |
| Compound ID | ID | vs PBS | Scaled | Scaled) | Mean |
| DSR-0103301 | 201563 | 0.5136 | −7.9161 | −3.0687 | 1 |
| DSR-0103301 | 201648 | 0.8717 | 0.6655 | −3.0687 | 1 |
| DSR-0103301 | 201653 | 1.3897 | −1.9555 | −3.0687 | 1 |
| ASO-0104323 | 201563 | 1.1614 | 0.0000 | 0.0000 | 2 |
| ASO-0104323 | 201648 | 0.8061 | 0.0000 | 0.0000 | 2 |
| ASO-0104323 | 201653 | 1.5957 | 0.0000 | 0.0000 | 2 |
| DSR-0103216 | 201563 | 1.1857 | 0.2968 | 3.4977 | 3 |
| DSR-0103216 | 201648 | 0.6761 | −1.3182 | 3.4977 | 3 |
| DSR-0103216 | 201653 | 2.8084 | 11.5144 | 3.4977 | 3 |
| DSR-0103300 | 201563 | 2.8519 | 20.6573 | 3.7459 | 4 |
| DSR-0103300 | 201648 | 0.5660 | −2.4354 | 3.7459 | 4 |
| DSR-0103300 | 201653 | 0.8600 | −6.9842 | 3.7459 | 4 |
| DSR-0103299 | 201563 | 2.1014 | 11.4867 | 4.0156 | 5 |
| DSR-0103299 | 201648 | 0.9080 | 1.0340 | 4.0156 | 5 |
| DSR-0103299 | 201653 | 1.5458 | −0.4738 | 4.0156 | 5 |
| DSR-0103199 | 201563 | 6.2669 | 62.3872 | 22.1240 | 6 |
| DSR-0103199 | 201648 | 0.9124 | 1.0784 | 22.1240 | 6 |
| DSR-0103199 | 201653 | 1.9018 | 2.9064 | 22.1240 | 6 |
| ASO-0109259 | 201563 | 4.2381 | 37.5963 | 31.4447 | 7 |
| ASO-0109259 | 201648 | 4.4812 | 37.2854 | 31.4447 | 7 |
| ASO-0109259 | 201653 | 3.6445 | 19.4523 | 31.4447 | 7 |
| ASO-0100157- | 201563 | 8.5738 | 90.5770 | 77.9365 | 8 |
| 004 | | | | | |
| ASO-0100157 | 201648 | 9.4751 | 87.9503 | 77.9365 | 8 |
| ASO-0100157 | 201653 | 7.4183 | 55.2822 | 77.9365 | 8 |
| ASO-0136356 | 201563 | 9.3450 | 100.0000 | 100.0000 | 9 |
| ASO-0136356 | 201648 | 10.6628 | 100.0000 | 100.0000 | 9 |
| ASO-0136356 | 201653 | 12.1283 | 100.0000 | 100.0000 | 9 |

### Example 9. Provided Oligonucleotides and Compositions are Active In Vitro in Mouse Primary Hepatocytes

[1567] Various siRNAs for mouse TTR were designed and constructed. A number of siRNAs were tested in vitro in mouse primary hepatocytes at one or a range of concentrations. Some siRNAs were also tested in mice (e.g., C57BL6 wild type mice).

[1568] Example protocol for in vitro determination of siRNA activity in mouse primary hepatocytes: For determination of siRNAs activity, siRNAs at specific concentration were gymnotically delivered to mouse primary hepatocytes plated at 96-well plates, with 10,000 cells/well. Following 48 hours treatment, total RNA was extracted using SV96 Total RNA Isolation kit (Promega). cDNA production from RNA samples were performed using High-Capacity cDNA Reverse Transcription kit (Thermo Fisher) following manufacturer's instructions and qPCR analysis performed in CFX System using iQ Multiplex Powermix (Bio-Rad). For mouse TTR mRNA, the following qPCR assay were utilized: IDT PrimeTime predesigned qPCR Assay Mm.PT.58.11922308. Mouse HPRT was used as normalizer (Forward 5′CAAACTTTGCTTTCCCTGGTT3′, Reverse 5′TGGCCTGTATCCAACACTTC3′, Probe 5′/5HEX/ACCAGCAAG/Zen/CTTGCAACCTTAACC/3IABkFQ/3′. mRNA knockdown levels were calculated as % mRNA remaining relative to mock treatment.

[1569] Table 64. shows % mouse TTR mRNA remaining (at 500, 150 and 50 μM siRNA treatment) in primary mouse hepatocytes relative to mouse HPRT control. N=2. N.D.: Not determined.

| | 500 pM | | | 150 pM | | |
|---|---|---|---|---|---|---|
| | % remaining | % remaining | | % remaining | % remaining | |
| | mRNA (mTTR/ | mRNA (mTTR/ | | mRNA (mTTR/ | mRNA (mTTR/ | |
| siRNA | mHPRT)-1 | mHPRT)-2 | Mean | mHPRT)-1 | mHPRT)-2 | Mean |
| DSR-0102524 | 32.28 | 24.27 | 28.27 | 67.91 | 46.56 | 57.24 |
| DSR-0102626 | 36.38 | 18.77 | 27.58 | 53.31 | 33.71 | 43.51 |
| DSR-0103360 | 32.67 | 23.34 | 28.01 | 59.74 | 59.18 | 59.46 |
| DSR-0103362 | 25.63 | 15.67 | 20.65 | 43.67 | 35.29 | 39.48 |
| DSR-0103361 | 20.01 | 13.79 | 16.9 | 50.24 | 43.74 | 46.99 |
| DSR-0103359 | 15.78 | 12.43 | 14.11 | 59.69 | 41.97 | 50.83 |

| | 50 pM | | |
|---|---|---|---|
| | % remaining | % remaining | |
| | mRNA (mTTR/ | mRNA (mTTR/ | |
| siRNA | mHPRT)-1 | mHPRT)-2 | Mean |
| DSR-0102524 | 77.27 | 63.16 | 70.21 |
| DSR-0102626 | 83.12 | 63.14 | 73.13 |
| DSR-0103360 | 95.39 | 84.64 | 90.01 |
| DSR-0103362 | 65.87 | 57.07 | 61.47 |
| DSR-0103361 | 44.22 | 61.16 | 52.69 |
| DSR-0103359 | 50.86 | 82.76 | 66.81 |

[1570] Table 65. shows IC50 of knocking down mouse TTR mRNA in mouse primary hepatocyte.

| siRNA | IC50 (pM) | 95% CI |
|---|---|---|
| DSR-0103028 | 62.88 | 46.20 to 85.94 |
| DSR-0102626 | 57.87 | 38.64 to 87.34 |
| DSR-0103361 | 52.80 | 29.38 to 95.40 |

### Example 10. Provided Oligonucleotides and Compositions are Active In Vivo

[1571] In vivo determination of mouse TTR siRNA activity: All animal procedures were performed under IACUC guidelines. To evaluate the potency and liver exposure of provided oligonucleotides and compositions, male 8-10 weeks of age C57BL/6 mice were dose at 0.5 mg/kg at desired oligonucleotide concentration on Day 0 by subcutaneous administration. Animals were euthanized on Day 7 by CO₂ asphyxiation followed by thoracotomy and terminal blood collection. After cardiac perfusion with PBS, liver samples were harvested and flash-frozen in dry ice. Liver total RNA was extracted using SV96 Total RNA Isolation kit (Promega), after tissue lysis with TRIzol and bromochloropropane. cDNA production from RNA samples were performed using High-Capacity cDNA Reverse Transcription kit (Thermo Fisher) following manufacturer's instructions and qPCR analysis performed in CFX System using iQ Multiplex Powermix (Bio-Rad). For mouse TTR mRNA, the following qPCR assay were utilized: IDT Taqman qPCR assay ID Mm.PT.58.11922308. Oligonucleotide accumulation in liver was determined by hybrid ELISA.

[1572] To evaluate the durability of provided oligonucleotides and compositions, male 8-10 weeks of age C₅₇BL/6 mice were dose at 0.5 mg/kg at desired oligonucleotide concentration on Day 0 by subcutaneous administration. On Day 0 (pre-dose) and then weekly, whole blood was collected via submandibular bleeding into serum separator tubes, and processed serum samples were kept at −70° C. Mouse TTR protein concentration in the serum was assessed using the Mouse Prealbumin ELISA kit (Crystal Chem) and following manufacturer's instructions.

[1573] Ago2 immunoprecipitation assay: Tissues were lysed in lysis buffer 50 mM Tris-HCl at pH 7.5, 200 mM NaCl, 0.5% Triton X-100, 2 mM EDTA, 1 mg/mL heparin) with protease inhibitor (Sigma-Aldrich). Lysate concentration was measured with a protein BCA kit (Pierce BCA protein assay kit or Bradford protein assay kit). Anti-Ago2 antibody was purchased from Wako Chemicals. Control mouse IgG was from eBioscience. Dynabeads (Invitrogen) were used to precipitate antibodies. Ago2-associated siRNA and endogenous miR22 were measured by Stem-Loop RT followed by TaRMan PCR analysis using Taqman miRNA and siRNA assay kit (Thermo fisher) based on manufacturer's methods.

[1574] Table 66. shows 0% mouse TTR mRNA remaining relative to PBS control. N=5. N.D.: Not determined.

| PBS | | DSR-0102657 | | DSR-0102626 | | DSR-0103359 | |
|---|---|---|---|---|---|---|---|
| | % remaining | | % remaining | | % remaining | | % remaining |
| animal | of mTTR | animal | of mTTR | animal | of mTTR | animal | of mTTR |
| No. | mRNA | No. | mRNA | No. | mRNA | No. | mRNA |
| 1 | 86.94 | 6 | 93.70 | 11 | 8.06 | 16 | 22.76 |
| 2 | 107.68 | 7 | 111.90 | 12 | 20.69 | 17 | 12.89 |
| 3 | 101.18 | 8 | 134.51 | 13 | 14.45 | 18 | 10.79 |
| 4 | 111.85 | 9 | 108.31 | 14 | 9.28 | 19 | 18.96 |
| 5 | 92.36 | 10 | 123.57 | 15 | 10.49 | 20 | 18.74 |
| Mean | 100 | Mean | 114.40 | Mean | 12.59 | Mean | 16.83 |

| | | |
|---|---|---|
| DSR-0103360 | DSR-0103361 | DSR-0103362 |

| | % remaining | | % remaining | | % remaining |
|---|---|---|---|---|---|
| animal | of mTTR | animal | of mTTR | animal | of mTTR |
| No. | mRNA | No. | mRNA | No. | mRNA |
| 21 | 28.40 | 26 | 9.40 | 31 | 10.50 |
| 22 | 23.51 | 27 | 15.91 | 32 | 26.17 |
| 23 | 24.40 | 28 | 18.63 | 33 | 4.86 |
| 24 | 21.07 | 29 | 23.16 | 34 | 21.58 |
| 25 | 38.78 | 30 | 14.89 | 35 | 3.42 |
| Mean | 27.23 | Mean | 16.40 | Mean | 13.31 |

[1575] Table 67. shows % mouse TTR protein remaining relative to PBS control. N=5. N.D.: Not Determined.

| | PBS | | | | | |
|---|---|---|---|---|---|---|
| Day | animal1 | animal2 | animal3 | animal4 | animal5 | Mean |
| 0 | 108 | 105 | 71 | 118 | 98 | 100 |
| 7 | 103 | 98 | 80 | 114 | 106 | 100 |
| 14 | 93 | 99 | 88 | 120 | 100 | 100 |
| 21 | 101 | 99 | 90 | 102 | 108 | 100 |
| 28 | 134 | 82 | 89 | 105 | 91 | 100 |
| 35 | 105 | 93 | 94 | 110 | 99 | 100 |
| 42 | 101 | 83 | 109 | 115 | 92 | 100 |
| 49 | 110 | 100 | 108 | 87 | 94 | 100 |

| | DSR-0102657, 0.5 mg/kg | | | | | |
|---|---|---|---|---|---|---|
| Day | animal6 | animal7 | animal8 | animal9 | animal10 | Mean |
| 0 | 81 | 59 | 121 | 62 | 99 | 84 |
| 7 | 86 | 68 | 112 | 58 | 89 | 83 |
| 14 | 91 | 87 | 109 | 86 | 105 | 96 |
| 21 | 69 | 89 | 95 | 72 | 100 | 85 |
| 28 | 88 | 86 | 102 | 83 | 92 | 90 |
| 35 | 84 | 502 | 95 | 72 | 92 | 169 |
| 42 | 80 | 110 | 72 | 60 | 87 | 82 |
| 49 | 66 | 95 | 89 | 74 | 86 | 82 |

| | DSR-0102626, 0.5 mg/kg | | | | | |
|---|---|---|---|---|---|---|
| Day | animal11 | animal12 | animal13 | animal14 | animal15 | Mean |
| 0 | 88 | 99 | 103 | 122 | 102 | 103 |
| 7 | 7 | 7 | 8 | 9 | 6 | 8 |
| 14 | 14 | 12 | 15 | 11 | 10 | 12 |
| 21 | 23 | 24 | 26 | 19 | 21 | 22 |
| 28 | 38 | 30 | 31 | 22 | 32 | 31 |
| 35 | 54 | 54 | 55 | 46 | 55 | 53 |
| 42 | 80 | 68 | 70 | 72 | 88 | 76 |
| 49 | 81 | 73 | 77 | 75 | 85 | 78 |
| | DSR-0103359, 0.5 mg/kg | | | | | |
| Day | animal16 | animal17 | animal18 | animal19 | animal20 | Mean |
| 0 | 160 | 94 | 97 | 77 | 95 | 104 |
| 7 | 12 | 15 | 15 | 14 | 20 | 15 |
| 14 | 12 | 17 | 13 | 9 | 22 | 15 |
| 21 | 15 | 25 | 24 | 16 | 26 | 21 |
| 28 | 17 | 36 | 22 | 22 | 31 | 26 |
| 35 | 25 | 43 | 41 | 33 | 39 | 36 |
| 42 | 38 | 44 | 61 | 55 | 53 | 50 |
| 49 | 59 | 58 | 73 | 67 | 63 | 64 |
| | DSR-0103360, 0.5 mg/kg | | | | | |
| Day | animal21 | animal22 | animal23 | animal24 | animal25 | Mean |
| 0 | 86 | 79 | 84 | 98 | 91 | 88 |
| 7 | 13 | 16 | 11 | 13 | 10 | 12 |
| 14 | 14 | 22 | 14 | 17 | 8 | 15 |
| 21 | 15 | 22 | 15 | 17 | 12 | 16 |
| 28 | 20 | 31 | 19 | 27 | 16 | 23 |
| 35 | 31 | 37 | 27 | 38 | 25 | 32 |
| 42 | 39 | 47 | 41 | 50 | 32 | 42 |
| 49 | 53 | 49 | 44 | 66 | 62 | 55 |
| | DSR-0103361, 0.5 mg/kg | | | | | |
| Day | animal26 | animal27 | animal28 | animal29 | animal30 | Mean |
| 0 | 88 | 80 | 96 | 88 | 85 | 87 |
| 7 | 7 | 8 | 6 | 8 | 10 | 8 |
| 14 | 6 | 5 | 5 | 7 | 4 | 6 |
| 21 | 10 | 9 | 13 | 12 | 14 | 11 |
| 28 | 10 | 7 | 16 | 16 | 17 | 13 |
| 35 | 18 | 11 | 30 | 25 | 3 | 18 |
| 42 | 33 | 23 | 51 | 35 | 48 | 38 |
| 49 | 40 | 27 | 60 | 59 | 69 | 51 |
| | DSR-0103362, 0.5 mg/kg | | | | | |
| Day | animal31 | animal32 | animal33 | animal34 | animal35 | Mean |
| 0 | 86 | 70 | 85 | 91 | 97 | 86 |
| 7 | 16 | 13 | 9 | 14 | 14 | 13 |
| 14 | 14 | 15 | 7 | 14 | 13 | 13 |
| 21 | 13 | 23 | 14 | 16 | 15 | 16 |
| 28 | 18 | 32 | 15 | 15 | 21 | 20 |
| 35 | 26 | 38 | 29 | 22 | 29 | 29 |
| 42 | 28 | 50 | 37 | 25 | 42 | 36 |
| 49 | 44 | 60 | 59 | 44 | 71 | 56 |

[1576] Table 68. shows Ago 2 loading of guide strand relative to miR-122 at day 7. N=3.

| | Ct: | Ct: | Ct: | Ct: | Relative |
|---|---|---|---|---|---|
| | mTTR/ | miR- | mTTR/ | miR- | mTTR/ |
| | Ago2 | 122/Ago2 | IgG | 122/IgG | miR122 |
| PBS-1 | 36.77 | 21.2 | 35.93 | 28.23 | 0.0043 |
| PBS-2 | 34.14 | 18.7 | 37.45 | 29.61 | 0.0052 |
| PBS-3 | 34.54 | 18.92 | 35.8 | 29.57 | 0.0015 |
| DSR- | 30.56 | 17.97 | 37.54 | 28.24 | 0.1022 |
| 0102626-1 | | | | | |
| DSR- | 29.70 | 17.85 | 34.63 | 28.24 | 0.0227 |
| 0102626-2 | | | | | |
| DSR- | 30.58 | 17.58 | 34.1 | 27.74 | 0.0100 |
| 0102626-3 | | | | | |
| DSR- | 31.33 | 17.26 | 34.12 | 27.23 | 0.0069 |
| 0103359-1 | | | | | |
| DSR- | 30.21 | 17.36 | 33.55 | 27.86 | 0.0070 |
| 0103359-2 | | | | | |
| DSR- | 30.17 | 17.07 | 34.15 | 27.24 | 0.0137 |
| 0103359-3 | | | | | |
| DSR- | 32.66 | 17.51 | 34.26 | 28.29 | 0.0017 |
| 0103360-1 | | | | | |
| DSR- | 34.13 | 18.86 | 34.39 | 27.73 | 0.0026 |
| 0103360-2 | | | | | |
| DSR- | 33.27 | 17.18 | 34.32 | 27.95 | 0.0012 |
| 0103360-3 | | | | | |
| DSR- | 33.15 | 18.46 | 35.9 | 29.02 | 0.0045 |
| 0103361-1 | | | | | |
| DSR- | 33.36 | 18.76 | 33.91 | 28.58 | 0.0016 |
| 0103361-2 | | | | | |
| DSR- | 32.16 | 17.88 | 35.62 | 28.65 | 0.0063 |
| 0103361-3 | | | | | |
| DSR- | 29.66 | 17.22 | 33.94 | 27.65 | 0.0141 |
| 0103362-1 | | | | | |
| DSR- | 29.13 | 17.43 | 34.14 | 27.78 | 0.0247 |
| 0103362-2 | | | | | |
| DSR- | 28.95 | 17.3 | 34.35 | 28.74 | 0.0152 |
| 0103362-3 | | | | | |

### Example 11. Provided Oligonucleotides and Compositions are Active In Vitro in Human iCell GABA Neurons

[1577] Various siRNAs for mouse APP were designed and constructed. A number of siRNAs were tested in vitro in human iCell GABA neurons at one or a range of concentrations. Some siRNAs were also tested in mice (e.g., C57BL6 wild type mice).

[1578] Example protocol for in vitro determination of siRNA activity in human iCell GABA neurons: For determination of siRNAs activity, siRNAs at specific concentration were gymnotically delivered to human iCell GABA neurons plated at 96-well plates, with 40,000 cells/well. Following 5 days treatment, total RNA was extracted using SV96 Total RNA Isolation kit (Promega). cDNA production from RNA samples were performed using High-Capacity cDNA Reverse Transcription kit (Thermo Fisher) following manufacturer's instructions and qPCR analysis performed in CFX System using iQ Multiplex Powermix (Bio-Rad). For human APP mRNA, the following qPCR assay were utilized: Thermofisher Taqman qPCR assay ID Hs00169098-ml. Human SFRS9 was used as normalizer (Forward, 5′-TGGAATATGCCCTGCGTAAA-3′; Reverse, 5′-TGGTGCTTCTCTCAGGATAAAC-3′, Probe, 5′-TGGATGACACCAAATTCCGCTCTCA-3′. mRNA knockdown levels were calculated as % mRNA remaining relative to mock treatment.

[1579] Table 69. shows % human APP mRNA remaining (at 3 and 1 uM siRNA treatment) in iCell GABA neurons relative to human SFRS9 control. N=2. N.D.: Not determined.

| | 3 uM | | | 1 uM | | |
|---|---|---|---|---|---|---|
| | % remaining | % remaining | | % remaining | % remaining | |
| | mRNA (hAPP/ | mRNA (hAPP/ | | mRNA (hAPP/ | mRNA (hAPP/ | |
| siRNA | hSFRS9)- 1 | hSFRS9)-2 | Mean | hSFRS9)- 1 | hSFRS9)-2 | Mean |
| DSR-0103190 | 61.00 | 60.40 | 60.70 | 70.70 | 87.30 | 79.00 |
| DSR-0103164 | 12.90 | 14.40 | 13.65 | 27.20 | 27.90 | 27.55 |
| DSR-0103210 | 53.20 | 50.00 | 51.60 | 60.90 | 74.20 | 67.55 |
| DSR-0103211 | 60.70 | 64.40 | 62.55 | 88.90 | 73.90 | 81.40 |
| DSR-0103206 | 13.70 | 17.40 | 15.55 | 32.10 | 46.90 | 39.50 |
| DSR-0103217 | 27.90 | 35.10 | 31.50 | 66.10 | 61.90 | 64.00 |
| DSR-0103223 | 14.90 | 17.00 | 15.95 | 30.70 | 45.60 | 38.15 |
| DSR-0103224 | 28.40 | 78.60 | 53.50 | 61.20 | 66.20 | 63.70 |
| DSR-0103225 | 16.70 | 22.20 | 19.45 | 47.20 | 63.20 | 55.20 |
| DSR-0103218 | 26.30 | 33.50 | 29.90 | 79.00 | 64.60 | 71.80 |

[1580] Table 70. shows % human APP mRNA remaining (at 3 and 1 uM siRNA treatment) in iCell GABA neurons relative to human SFRS9 control. N=2. N.D.: Not determined.

| | 3 uM | | | 1 uM | | |
|---|---|---|---|---|---|---|
| | % remaining | % remaining | | % remaining | % remaining | |
| | mRNA (hAPP/ | mRNA (hAPP/ | | mRNA (hAPP/ | mRNA (hAPP/ | |
| siRNA | hSFRS9)- 1 | hSFRS9)-2 | Mean | hSFRS9)- 1 | hSFRS9)-2 | Mean |
| DSR-0103190 | 114.20 | 92.20 | 103.20 | 98.00 | 92.10 | 95.05 |
| DSR-0103342 | 77.70 | 66.90 | 72.30 | 74.10 | 72.30 | 73.20 |
| DSR-0103343 | 74.30 | 80.40 | 77.35 | 100.00 | 104.70 | 102.35 |
| DSR-0103408 | 14.90 | 15.10 | 15.00 | 47.90 | 54.10 | 51.00 |
| DSR-0103424 | 15.50 | 18.40 | 16.95 | 84.90 | 60.70 | 72.80 |
| DSR-0103414 | 17.60 | 19.30 | 18.45 | 53.80 | 49.50 | 51.65 |
| DSR-0103429 | 16.40 | 21.20 | 18.80 | 52.00 | 60.00 | 56.00 |
| DSR-0103411 | 18.90 | 24.40 | 21.65 | 50.80 | 57.60 | 54.20 |
| DSR-0103217 | 17.10 | 24.10 | 20.60 | 47.20 | 59.30 | 53.25 |
| DSR-0103206 | 11.30 | 12.50 | 11.90 | 30.40 | 31.70 | 31.05 |
| DSR-0103164 | 12.80 | 18.90 | 15.85 | 22.70 | 26.50 | 24.60 |
| DSR-0103416 | 14.90 | 16.40 | 15.65 | 30.90 | 28.30 | 29.60 |

[1581] Table 71. shows 0% human APP mRNA remaining (at 1, 0.04, and 0.008 uM siRNA treatment) in primary human hepatocytes relative to human SFRS9 control. N=2. N.D.: Not determined.

| | 1 uM | | | 0.04 uM | | | 0.008 uM | | |
|---|---|---|---|---|---|---|---|---|---|
| | % | % | | % | % | | % | % | |
| | remaining | remaining | | remaining | remaining | | remaining | remaining | |
| | mRNA | mRNA | | mRNA | mRNA | | mRNA | mRNA | |
| | (hAPP/ | (hAPP/ | | (hAPP/ | (hAPP/ | | (hAPP/ | (hAPP/ | |
| siRNA | hSFRS9) − 1 | hSFRS9) − 2 | Mean | hSFRS9) − 1 | hSFRS9) − 2 | Mean | hSFRS9) − 1 | hSFRS9) − 2 | Mean |
| DSR- | 6.08 | 5.70 | 5.89 | 23.85 | 23.17 | 23.51 | 57.65 | 54.43 | 56.04 |
| 0103301 | | | | | | | | | |
| DSR- | 7.33 | 7.06 | 7.19 | 13.98 | 15.65 | 14.82 | 40.10 | 43.25 | 41.67 |
| 0103300 | | | | | | | | | |
| DSR- | 11.94 | 12.26 | 12.10 | 31.40 | 31.31 | 31.35 | 58.22 | 55.42 | 56.82 |
| 0103299 | | | | | | | | | |
| DSR- | 8.12 | 6.01 | 7.06 | 17.73 | 18.47 | 18.10 | 43.00 | 41.26 | 42.13 |
| 0103216 | | | | | | | | | |
| DSR- | 7.78 | 6.44 | 7.11 | 15.04 | 18.77 | 16.90 | 39.37 | 39.18 | 39.27 |
| 0103199 | | | | | | | | | |

[1582] Table 72. shows IC50 of knocking down human APP mRNA in human iCell GABA neurons.

| siRNA | IC50 (uM) | 95% CI |
|---|---|---|
| DSR-0103199 | 0.32 | 0.16 to 0.64 |
| DSR-0103216 | 0.34 | 0.23 to 0.50 |
| DSR-0103299 | 0.63 | 0.45 to 0.88 |
| DSR-0103300 | 0.23 | 0.18 to 0.29 |
| DSR-0103301 | 0.61 | 0.51 to 0.73 |

[1583] Table 73. shows 0% human APP mRNA remaining (at 3 and 1 uM siRNA treatment) in iCell GABA neurons relative to human SFRS9 control. N=2. N.D.: Not determined.

| | 3 uM | | | 1 uM | | |
|---|---|---|---|---|---|---|
| | % remaining | % remaining | | % remaining | % remaining | |
| | mRNA | mRNA | | mRNA | mRNA | |
| | (hAPP/ | (hAPP/ | | (hAPP/ | (hAPP/ | |
| siRNA | hSFRS9) − 1 | hSFRS9) − 2 | Mean | hSFRS9) − 1 | hSFRS9) − 2 | Mean |
| DSR- | 15.80 | 14.40 | 15.10 | 23.10 | 31.30 | 27.20 |
| 0103415 | | | | | | |
| DSR- | 22.40 | 24.60 | 23.50 | 32.80 | 34.50 | 33.65 |
| 0103412 | | | | | | |
| DSR- | 42.70 | 38.60 | 40.65 | 61.70 | 79.40 | 70.55 |
| 0103719 | | | | | | |
| DSR- | 53.00 | 59.50 | 56.25 | 72.70 | 69.90 | 71.30 |
| 0103718 | | | | | | |

[1584] Table 74. shows 00 human APP mRNA remaining (at 3 and 1 uM siRNA treatment) in iCell GABA neurons relative to human SFRS9 control. N=2. N.D.: Not determined.

| | 3 uM | | | 1 uM | | |
|---|---|---|---|---|---|---|
| | % remaining | % remaining | | % remaining | % remaining | |
| | mRNA | mRNA | | mRNA | mRNA | |
| | (hAPP/ | (hAPP/ | | (hAPP/ | (hAPP/ | |
| siRNA | hSFRS9) − 1 | hSFRS9) − 2 | Mean | hSFRS9) − 1 | hSFRS9) − 2 | Mean |
| DSR- | 15.60 | 16.30 | 15.95 | 28.40 | 28.80 | 28.60 |
| 0103428 | | | | | | |
| DSR- | 19.90 | 15.80 | 17.85 | 28.50 | 30.80 | 29.65 |
| 0103427 | | | | | | |
| DSR- | 18.50 | 12.30 | 15.40 | 29.90 | 27.20 | 28.55 |
| 0103426 | | | | | | |
| DSR- | 20.00 | 18.00 | 19.00 | 33.60 | 33.30 | 33.45 |
| 0103409 | | | | | | |
| DSR- | 15.80 | 16.20 | 16.00 | 33.50 | 27.40 | 30.45 |
| 0103404 | | | | | | |
| DSR- | 37.60 | 35.80 | 36.70 | 55.00 | 66.80 | 60.90 |
| 0103420 | | | | | | |
| DSR- | 22.70 | 21.80 | 22.25 | 56.20 | 55.00 | 55.60 |
| 0103425 | | | | | | |
| DSR- | 22.20 | 27.20 | 24.70 | 71.60 | 67.60 | 69.60 |
| 0103419 | | | | | | |
| DSR- | 20.70 | 21.10 | 20.90 | 47.60 | 60.10 | 53.85 |
| 0103431 | | | | | | |
| DSR- | 20.70 | 20.50 | 20.60 | 52.00 | 68.20 | 60.10 |
| 0103418 | | | | | | |
| DSR- | 22.70 | 18.10 | 20.40 | 51.30 | 51.30 | 51.30 |
| 0103430 | | | | | | |
| DSR- | 12.80 | 18.90 | 15.85 | 22.70 | 26.50 | 24.60 |
| 0103164 | | | | | | |
| DSR- | 14.90 | 16.40 | 15.65 | 30.90 | 28.30 | 29.60 |
| 0103416 | | | | | | |

[1585] Table 75. shows % human APP mRNA remaining (at 3 and 1 uM siRNA treatment) in iCell GABA neurons relative to human SFRS9 control. N=2. N.D.: Not determined.

| | 3 uM | | | 1 uM | | |
|---|---|---|---|---|---|---|
| | % remaining | % remaining | | % remaining | % remaining | |
| | mRNA | mRNA | | mRNA | mRNA | |
| | (hAPP/ | (hAPP/ | | (hAPP/ | (hAPP/ | |
| siRNA | hSFRS9) − 1 | hSFRS9) − 2 | Mean | hSFRS9) − 1 | hSFRS9) − 2 | Mean |
| DSR- | 15.90 | 14.60 | 15.25 | 26.10 | 31.30 | 28.70 |
| 0103717 | | | | | | |
| DSR- | 15.60 | 13.70 | 14.65 | 27.50 | 23.10 | 25.30 |
| 0103716 | | | | | | |
| DSR- | 14.30 | 14.50 | 14.40 | 32.00 | 38.00 | 35.00 |
| 0103715 | | | | | | |
| DSR- | 14.80 | 15.20 | 15.00 | 30.20 | 31.00 | 30.60 |
| 0103714 | | | | | | |
| DSR- | 17.20 | 17.60 | 17.40 | 30.60 | 39.70 | 35.15 |
| 0103713 | | | | | | |
| DSR- | 13.80 | 15.20 | 14.50 | 28.10 | 25.40 | 26.75 |
| 0103712 | | | | | | |
| DSR- | 31.70 | 26.70 | 29.20 | 45.70 | 52.10 | 48.90 |
| 0103325 | | | | | | |

### Example 12. Provided Oligonucleotides and Compositions are Active In Vivo

[1586] All animal procedures were performed under IACUC guidelines. To evaluate the potency and liver exposure of provided oligonucleotides and compositions, male 8-10 weeks of age C57BL/6 mice were dose at 50 mg/kg on Day 0 by subcutaneous administration. Animals were euthanized on Day 7 or 28 by CO2 asphyxiation followed by thoracotomy and terminal blood collection. After cardiac perfusion with PBS, various tissue samples were harvested and flash-frozen in dry ice. Total RNA was extracted using RNeasy 96 kit (Qiagen), after tissue lysis with TRIzol and chloroform. cDNA production from RNA samples were performed using High-Capacity cDNA Reverse Transcription kit (Thermo Fisher) following manufacturer's instructions and qPCR analysis performed in CFX System using iQ Multiplex Powermix (Bio-Rad for mouse APP mRNA, the following qPCR assay were utilized: Thermofisher Taqman qPCR assay ID Mm01344172_m1. Mouse HPRT was used as normalizer (Forward 5′CAAACTTTGCTTTCCCTGGTT3′, Reverse 5′TGGCCTGTATCCAACACTTC3′, Probe 5′/5HEX/ACCAGCAAG/Zen/CTTGCAACCTTAACC/3IABkFQ/3′. Oligonucleotide accumulation was determined by sandwich ELISA. Serum biomarkers were measured at Charles River Laboratory.

[1587] Ago2 immunoprecipitation assay: Tissues were lysed in lysis buffer 50 mM Tris-HCl at pH 7.5, 200 mM NaCl, 0.5% Triton X-100, 2 mM EDTA, 1 mg/mL heparin) with protease inhibitor (Sigma-Aldrich). Lysate concentration was measured with a protein BCA kit (Pierce BCA protein assay kit or Bradford protein assay kit). Anti-Ago2 antibody was purchased from Wako Chemicals. Control mouse IgG was from eBioscience. Dynabeads (Invitrogen) were used to precipitate antibodies. Ago2-associated siRNA and endogenous miR122 or miR143 were measured by Stem-Loop RT followed by TaqMan PCR analysis using Taqman miRNA and siRNA assay kit (Thermo fisher) based on manufacturer's methods.

[1588] Table 76. shows % mouse APP mRNA remaining relative to PBS control in the kidney 7 days post dosing. N=5. N.D.: Not determined.

| | % remaining of mAPP mRNA | | | | | |
|---|---|---|---|---|---|---|
| animal No. | PBS | DSR-0103199 | DSR-0103216 | DSR-0103299 | DSR-0103300 | DSR-0103301 |
| 1 | 85.36 | 122.85 | 70.14 | 57.26 | 51.35 | 47.02 |
| 2 | 99.41 | 70.02 | 73.48 | 61.90 | 48.81 | 49.16 |
| 3 | 122.58 | 67.48 | 60.40 | 50.00 | 58.70 | 56.62 |
| 4 | 114.39 | 122.01 | 76.33 | 51.77 | 46.71 | 53.10 |
| 5 | 78.26 | 68.62 | 57.15 | 64.94 | 52.17 | 49.27 |
| Mean | 100.00 | 90.19 | 67.50 | 57.17 | 51.55 | 51.03 |

[1589] Table 77. shows % mouse APP mRNA remaining relative to PBS control in the lung 7 days post dosing. N=5. N.D.: Not determined.

| | % remaining of mAPP mRNA | | | | | |
|---|---|---|---|---|---|---|
| animal No. | PBS | DSR-0103199 | DSR-0103216 | DSR-0103299 | DSR-0103300 | DSR-0103301 |
| 1 | 118.57 | 86.19 | 61.17 | 83.76 | 93.37 | 84.73 |
| 2 | 88.93 | 86.56 | 80.45 | 90.96 | 83.56 | 71.78 |
| 3 | 108.52 | 107.77 | 102.05 | 84.27 | 76.72 | 64.47 |
| 4 | 75.01 | 139.34 | 118.34 | 73.79 | 105.69 | 79.28 |
| 5 | 108.97 | 117.36 | 52.35 | 65.36 | 81.96 | 68.27 |
| Mean | 100.00 | 107.44 | 82.87 | 79.63 | 88.26 | 73.71 |

[1590] Table 78. shows 00 mouse APP mRNA remaining relative to PBS control in the quad 7 days post dosing. N=5. N.D.: Not determined.

| | % remaining of mAPP mRNA | | | | | |
|---|---|---|---|---|---|---|
| animal No. | PBS | DSR-0103199 | DSR-0103216 | DSR-0103299 | DSR-0103300 | DSR-0103301 |
| 1 | 63.45 | 63.97 | 36.05 | 65.64 | 51.59 | 31.96 |
| 2 | 78.76 | 74.49 | 48.73 | 45.92 | 45.36 | 59.03 |
| 3 | 121.49 | 75.26 | 56.15 | 45.70 | 66.45 | 64.54 |
| 4 | 134.75 | 48.11 | 51.88 | 48.18 | 72.16 | 66.54 |
| 5 | 101.55 | 61.49 | 47.66 | 69.01 | 79.49 | 60.32 |
| Mean | 100.00 | 64.67 | 48.09 | 54.89 | 63.01 | 56.48 |

[1591] Table 79. shows 00 mouse APP mRNA remaining relative to PBS control in the spleen 7 days post dosing. N=5. N.D.: Not determined.

| | % remaining of mAPP mRNA | | | | | |
|---|---|---|---|---|---|---|
| animal No. | PBS | DSR-0103199 | DSR-0103216 | DSR-0103299 | DSR-0103300 | DSR-0103301 |
| 1 | 86.01 | 100.17 | 85.40 | 107.31 | 86.87 | 97.31 |
| 2 | 96.23 | 115.38 | 97.66 | 130.66 | 89.36 | 107.61 |
| 3 | 113.18 | 83.79 | 73.64 | 89.08 | 99.30 | 91.44 |
| 4 | 87.72 | 144.33 | 93.30 | 124.44 | 122.73 | 99.96 |
| 5 | 116.86 | 84.92 | 86.15 | 160.76 | 132.16 | 112.01 |
| Mean | 100.00 | 105.72 | 87.23 | 122.45 | 106.08 | 101.67 |

[1592] Table 80. shows % mouse APP mRNA remaining relative to PBS control in the liver 7 days post dosing. N=5. N.D.: Not determined.

| | % remaining of mAPP mRNA | | | | | |
|---|---|---|---|---|---|---|
| animal No. | PBS | DSR-0103199 | DSR-0103216 | DSR-0103299 | DSR-0103300 | DSR-0103301 |
| 1 | 163.61 | 23.56 | 25.82 | 27.03 | 30.78 | 24.75 |
| 2 | 76.61 | 27.91 | 30.56 | 39.24 | 29.70 | 35.40 |
| 3 | 129.52 | 44.78 | 38.09 | 28.04 | 25.62 | 28.29 |
| 4 | 76.48 | 41.92 | 23.95 | 27.55 | 26.39 | 27.33 |
| 5 | 53.78 | 61.43 | 37.42 | 40.15 | 32.40 | 31.33 |
| Mean | 100.00 | 39.92 | 31.17 | 32.40 | 28.98 | 29.42 |

[1593] Table 81. shows % mouse APP mRNA remaining relative to PBS control in the white Adipose Tissue 7 days post dosing. N=5. N.D.: Not determined.

| | % remaining of mAPP mRNA | | | | | |
|---|---|---|---|---|---|---|
| animal No. | PBS | DSR-0103199 | DSR-0103216 | DSR-0103299 | DSR-0103300 | DSR-0103301 |
| 1 | 111.65 | 58.32 | 52.64 | 39.07 | 30.36 | 19.07 |
| 2 | 99.73 | 63.99 | 52.98 | 53.75 | 34.25 | 23.22 |
| 3 | 100.06 | 62.41 | 40.10 | 51.87 | 42.47 | 25.18 |
| 4 | 117.14 | 50.79 | 56.61 | 59.20 | 27.33 | 20.33 |
| 5 | 71.42 | 66.34 | 37.61 | 31.01 | 41.22 | 27.47 |
| Mean | 100.00 | 60.37 | 47.99 | 46.98 | 35.13 | 23.05 |

[1594] Table 82. shows % mouse APP mRNA remaining relative to PBS control in the diaphragm 7 days post dosing. N=5. N.D.: Not determined.

| | % remaining of mAPP mRNA | | | | | |
|---|---|---|---|---|---|---|
| animal No. | PBS | DSR-0103199 | DSR-0103216 | DSR-0103299 | DSR-0103300 | DSR-0103301 |
| 1 | 100.17 | 70.03 | 71.55 | 55.95 | 53.54 | 59.52 |
| 2 | 106.27 | 72.40 | 64.20 | 26.03 | 61.82 | 64.63 |
| 3 | 100.72 | 71.96 | 75.35 | 62.05 | 55.46 | 70.65 |
| 4 | 104.18 | 68.96 | 61.86 | 67.66 | 79.59 | 66.05 |
| 5 | 88.66 | 78.04 | 60.27 | 62.49 | 67.34 | 72.90 |
| Mean | 100.00 | 72.28 | 66.65 | 54.83 | 63.55 | 66.75 |

[1595] Table 83. shows 00 mouse APP mRNA remaining relative to PBS control in the heart 7 days post dosing. N=5. N.D.: Not determined.

| | % remaining of mAPP mRNA | | | | | |
|---|---|---|---|---|---|---|
| animal No. | PBS | DSR-0103199 | DSR-0103216 | DSR-0103299 | DSR-0103300 | DSR-0103301 |
| 1 | 96.13 | 87.50 | 87.10 | 111.69 | 83.24 | 122.16 |
| 2 | 98.95 | 89.23 | 68.59 | 110.87 | 145.74 | 111.76 |
| 3 | 100.66 | 147.70 | 81.57 | 118.51 | 86.36 | 86.66 |
| 4 | 102.65 | 107.22 | 100.47 | 63.14 | 90.02 | 89.57 |
| 5 | 101.61 | 160.56 | 62.98 | 79.63 | 74.25 | 117.66 |
| Mean | 100.00 | 118.44 | 80.14 | 96.77 | 95.92 | 105.56 |

[1596] Table 84. shows 00 mouse APP mRNA remaining relative to PBS control in the brown adipose tissue 7 days post dosing. N=5. N.D.: Not determined.

| | % remaining of mAPP mRNA | | | | | |
|---|---|---|---|---|---|---|
| animal No. | PBS | DSR-0103199 | DSR-0103216 | DSR-0103299 | DSR-0103300 | DSR-0103301 |
| 1 | 98.64 | 87.16 | 53.93 | 68.76 | 53.89 | 56.82 |
| 2 | 103.60 | 78.20 | 59.43 | 40.22 | 75.71 | 57.52 |
| 3 | 115.72 | 75.22 | 59.11 | 62.40 | 58.59 | 58.58 |
| 4 | 106.25 | 76.82 | 48.27 | 47.05 | 50.93 | 57.52 |
| 5 | 75.80 | 85.23 | 47.40 | 51.04 | 69.98 | 75.92 |
| Mean | 100.00 | 80.53 | 53.63 | 53.89 | 61.82 | 61.27 |

[1597] Table 85. shows 0% mouse APP mRNA remaining relative to PBS control in the sciatic nerve 7 days post dosing. N=5. N.D.: Not determined.

| | % remaining of mAPP mRNA | | | | | |
|---|---|---|---|---|---|---|
| animal No. | PBS | DSR-0103199 | DSR-0103216 | DSR-0103299 | DSR-0103300 | DSR-0103301 |
| 1 | 83.92 | 130.05 | 106.24 | 95.43 | 100.69 | 106.78 |
| 2 | 109.97 | 106.48 | 112.25 | 92.31 | 106.98 | 93.03 |
| 3 | 99.66 | 86.13 | 94.10 | 105.63 | 95.61 | 121.80 |
| 4 | 123.80 | 114.09 | 88.33 | 109.07 | 102.57 | 123.55 |
| 5 | 82.65 | 112.82 | 89.68 | 95.35 | 107.03 | 130.62 |
| Mean | 100.00 | 109.91 | 98.12 | 99.56 | 102.57 | 115.16 |

[1598] Table 86. shows 00 mouse APP mRNA remaining relative to PBS control in the kidney 28 days post dosing. N=5. N.D.: Not determined.

| | % remaining of mAPP mRNA | | | | | |
|---|---|---|---|---|---|---|
| animal No. | PBS | DSR-0103199 | DSR-0103216 | DSR-0103299 | DSR-0103300 | DSR-0103301 |
| 1 | 142.83 | 105.21 | 61.95 | 48.40 | 53.98 | 55.48 |
| 2 | 89.54 | 108.78 | 61.85 | 41.58 | 58.40 | 58.34 |
| 3 | 115.84 | 110.45 | 54.66 | 46.97 | 51.19 | 47.22 |
| 4 | 81.76 | 59.46 | 60.62 | 47.92 | 71.17 | 45.28 |
| 5 | 70.04 | 66.05 | 64.74 | 72.52 | 53.80 | 44.73 |
| Mean | 100.00 | 89.99 | 60.76 | 51.48 | 57.71 | 50.21 |

[1599] Table 87. shows 00 mouse APP mRNA remaining relative to PBS control in the white adipose tissue 28 days post dosing. N=5. N.D.: Not determined.

| | % remaining of mAPP mRNA | | | | | |
|---|---|---|---|---|---|---|
| animal No. | PBS | DSR-0103199 | DSR-0103216 | DSR-0103299 | DSR-0103300 | DSR-0103301 |
| 1 | 105.68 | 43.35 | 64.44 | 52.30 | 23.07 | 18.15 |
| 2 | 106.98 | 54.95 | 50.36 | 35.22 | 30.17 | 28.18 |
| 3 | 75.05 | 51.67 | 38.09 | 47.91 | 34.75 | 25.35 |
| 4 | 102.13 | 41.01 | 59.99 | 40.19 | 36.47 | 23.06 |
| 5 | 110.15 | 47.19 | 35.53 | 40.97 | 31.37 | 18.93 |
| Mean | 100.00 | 47.63 | 49.68 | 43.32 | 31.17 | 22.73 |

[1600] Table 88. shows 00 mouse APP mRNA remaining relative to PBS control in the lung 28 days post dosing. N=5. N.D.: Not determined.

| | % remaining of mAPP mRNA | | | | | |
|---|---|---|---|---|---|---|
| animal No. | PBS | DSR-0103199 | DSR-0103216 | DSR-0103299 | DSR-0103300 | DSR-0103301 |
| 1 | 87.37 | 60.12 | 80.64 | 83.06 | 88.84 | 86.21 |
| 2 | 95.25 | 54.70 | 50.24 | 57.44 | 98.53 | 76.04 |
| 3 | 133.07 | 85.99 | 86.28 | 80.34 | 115.05 | 120.09 |
| 4 | 108.00 | 99.91 | 80.82 | 93.62 | 106.36 | 108.49 |
| 5 | 76.30 | 103.14 | 72.38 | 102.19 | 104.54 | 118.93 |
| Mean | 100.00 | 80.77 | 74.07 | 83.33 | 102.66 | 101.95 |

[1601] Table 89. shows 0 mouse APP mRNA remaining relative to PBS control in the sciatic nerve 28 days post dosing. N=5. N.D.: Not determined.

| | % remaining of mAPP mRNA | | | | | |
|---|---|---|---|---|---|---|
| animal No. | PBS | DSR-0103199 | DSR-0103216 | DSR-0103299 | DSR-0103300 | DSR-0103301 |
| 1 | 97.55 | 109.13 | 92.94 | 89.25 | 115.20 | 120.54 |
| 2 | 94.03 | 133.87 | 101.66 | 97.61 | 56.72 | 130.48 |
| 3 | 84.73 | 117.17 | 96.62 | 115.81 | 117.36 | 123.16 |
| 4 | 113.86 | 90.40 | 78.62 | 117.32 | 114.89 | 108.30 |
| 5 | 109.83 | 164.38 | 72.38 | 126.63 | 142.37 | 134.97 |
| Mean | 100.00 | 122.99 | 88.44 | 109.32 | 109.31 | 123.49 |

[1602] Table 90. shows 00 mouse APP mRNA remaining relative to PBS control in the liver 28 days post dosing. N=5. N.D.: Not determined.

| | % remaining of mAPP mRNA | | | | | |
|---|---|---|---|---|---|---|
| animal No. | PBS | DSR-0103199 | DSR-0103216 | DSR-0103299 | DSR-0103300 | DSR-0103301 |
| 1 | 120.64 | 29.60 | 37.96 | 37.93 | 70.51 | 28.43 |
| 2 | 110.00 | 34.08 | 30.67 | 62.85 | 34.50 | 25.48 |
| 3 | 97.39 | 38.12 | 53.76 | 70.08 | 24.32 | 33.28 |
| 4 | 97.99 | 25.30 | 29.45 | 18.96 | 24.34 | 42.90 |
| 5 | 73.97 | 27.57 | 43.56 | 21.19 | 39.88 | 26.65 |
| Mean | 100.00 | 30.94 | 39.08 | 42.20 | 38.71 | 31.35 |

[1603] Table 91. shows 00 mouse APP mRNA remaining relative to PBS control in the quad 28 days post dosing. N=5. N.D.: Not determined.

| | % remaining of mAPP mRNA | | | | | |
|---|---|---|---|---|---|---|
| animal No. | PBS | DSR-0103199 | DSR-0103216 | DSR-0103299 | DSR-0103300 | DSR-0103301 |
| 1 | 95.16 | 66.82 | 57.30 | 55.46 | 68.68 | 67.90 |
| 2 | 120.59 | 92.11 | 53.32 | 32.47 | 60.84 | 61.95 |
| 3 | 74.23 | 59.65 | 57.08 | 73.37 | 70.74 | 67.48 |
| 4 | 99.66 | 82.46 | 50.96 | 51.96 | 68.29 | 71.28 |
| 5 | 110.35 | 87.01 | 45.35 | 49.89 | 67.97 | 66.58 |
| Mean | 100.00 | 77.61 | 52.80 | 52.63 | 67.31 | 67.04 |

[1604] Table 92. shows % mouse APP mRNA remaining relative to PBS control in the heart 28 days post dosing. N=5. N.D.: Not determined.

| | % remaining of mAPP mRNA | | | | | |
|---|---|---|---|---|---|---|
| animal No. | PBS | DSR-0103199 | DSR-0103216 | DSR-0103299 | DSR-0103300 | DSR-0103301 |
| 1 | 95.78 | 93.83 | 69.95 | 104.65 | 93.97 | 96.06 |
| 2 | 81.11 | 108.10 | 80.18 | 79.32 | 94.20 | 89.34 |
| 3 | 113.00 | 89.21 | 78.66 | 93.32 | 92.11 | 85.11 |
| 4 | 103.33 | 113.18 | 75.98 | 101.30 | 87.40 | 84.47 |
| 5 | 106.77 | 102.96 | 65.41 | 99.61 | 98.10 | 107.25 |
| Mean | 100.00 | 101.46 | 74.04 | 95.64 | 93.16 | 92.45 |

[1605] Table 93. shows % mouse APP mRNA remaining relative to PBS control in the brown adipose tissue 28 days post dosing. N=5. N.D.: Not determined.

| | % remaining of mAPP mRNA | | | | | |
|---|---|---|---|---|---|---|
| animal No. | PBS | DSR-0103199 | DSR-0103216 | DSR-0103299 | DSR-0103300 | DSR-0103301 |
| 1 | 90.51 | 68.67 | 44.32 | 39.35 | 63.71 | 71.65 |
| 2 | 72.38 | 53.59 | 55.12 | 29.34 | 53.43 | 54.67 |
| 3 | 106.20 | 61.32 | 43.70 | 29.84 | 70.51 | 57.92 |
| 4 | 141.92 | 49.80 | 38.68 | 33.32 | 0.00 | 42.33 |
| 5 | 89.00 | 39.05 | 50.65 | 45.76 | 61.68 | 77.61 |
| Mean | 100.00 | 54.49 | 46.50 | 35.52 | 49.86 | 60.84 |

[1606] Table 94. shows % mouse APP mRNA remaining relative to PBS control in the diaphragm 28 days post dosing. N=5. N.D.: Not determined.

| | % remaining of mAPP mRNA | | | | | |
|---|---|---|---|---|---|---|
| animal No. | PBS | DSR-0103199 | DSR-0103216 | DSR-0103299 | DSR-0103300 | DSR-0103301 |
| 1 | 93.20 | 90.54 | 50.00 | 65.63 | 47.80 | 95.23 |
| 2 | 107.68 | 82.19 | 62.21 | 40.27 | 79.21 | 89.17 |
| 3 | 107.34 | 126.09 | 67.31 | 60.95 | 79.69 | 88.75 |
| 4 | 121.54 | 89.87 | 57.14 | 61.48 | 85.73 | 88.29 |
| 5 | 70.24 | 97.75 | 71.41 | 62.35 | 68.53 | 89.27 |
| Mean | 100.00 | 97.29 | 61.61 | 58.13 | 72.19 | 90.14 |

[1607] Table 95. shows 00 mouse APP mRNA remaining relative to PBS control in the spleen 28 days post dosing. N=5. N.D.: Not determined. PGP-522j12

| | % remaining of mAPP mRNA | | | | | |
|---|---|---|---|---|---|---|
| animal No. | PBS | DSR-0103199 | DSR-0103216 | DSR-0103299 | DSR-0103300 | DSR-0103301 |
| 1 | 99.75 | 115.40 | 101.33 | 150.07 | 137.19 | 139.26 |
| 2 | 84.89 | 114.64 | 104.16 | 145.16 | 111.57 | 155.64 |
| 3 | 117.16 | 123.92 | 102.77 | 102.47 | 131.90 | 117.07 |
| 4 | 99.68 | 153.03 | 108.68 | 143.43 | 125.83 | 151.01 |
| 5 | 98.51 | 128.75 | 111.11 | 149.40 | 139.82 | 107.25 |
| Mean | 100.00 | 127.15 | 105.61 | 138.11 | 129.26 | 134.05 |

[1608] Table 96. shows serum ALT relative to PBS control in the Black/6 mice on 7 days and 28 days post dosing. N=5. N.D.: Not determined.

| | animal | ALT (U/L) | | | | | |
|---|---|---|---|---|---|---|---|
| | No. | PBS | DSR-0103301 | DSR-0103300 | DSR-0103299 | DSR-0103216 | DSR-0103199 |
| 7 days | 1 | 23.00 | 17.00 | 20.00 | 19.00 | 18.00 | 20.00 |
| post | 2 | 23.00 | 16.00 | 33.00 | 23.00 | 23.00 | 19.00 |
| dosing | 3 | 23.00 | 21.00 | 21.00 | 34.00 | 23.00 | 23.00 |
| | 4 | 17.00 | 18.00 | 24.00 | 84.00 | 20.00 | 23.00 |
| | 5 | 23.00 | 26.00 | 92.00 | 27.00 | 24.00 | 20.00 |
| | Mean | 21.80 | 19.60 | 38.00 | 37.40 | 21.60 | 21.00 |
| 28 days | 1 | 20.00 | 17.00 | 19.00 | 27.00 | 26.00 | N.D |
| post | 2 | 20.00 | 31.00 | 33.00 | 18.00 | 41.00 | 19.00 |
| dosing | 3 | 17.00 | 21.00 | 19.00 | 19.00 | 21.00 | 19.00 |
| | 4 | N.D | 16.00 | 21.00 | 21.00 | 22.00 | 27.00 |
| | 5 | 25.00 | 21.00 | 19.00 | 22.00 | 23.00 | 22.00 |
| | Mean | 16.40 | 21.20 | 22.20 | 21.40 | 26.60 | 17.40 |

[1609] Table 97. shows serum AST relative to PBS control in the Black/6 mice on 7 days and 28 days post dosing. N=5. N.D.: Not determined.

| | animal | AST (U/L) | | | | | |
|---|---|---|---|---|---|---|---|
| | No. | PBS | DSR-0103301 | DSR-0103300 | DSR-0103299 | DSR-0103216 | DSR-0103199 |
| 7 days | 1 | 49.00 | 41.00 | 61.00 | 72.00 | 107.00 | 119.00 |
| post | 2 | 70.00 | 39.00 | 65.00 | 62.00 | 88.00 | 62.00 |
| dosing | 3 | 51.00 | 60.00 | 91.00 | 206.00 | 111.00 | 90.00 |
| | 4 | 80.00 | 59.00 | 59.00 | 279.00 | 61.00 | 113.00 |
| | 5 | 132.00 | 50.00 | 201.00 | 87.00 | 146.00 | 82.00 |
| | Mean | 76.40 | 49.80 | 95.40 | 141.20 | 102.60 | 93.20 |
| 28 days | 1 | 127.00 | 42.00 | 44.00 | 65.00 | 161.00 | N.D |
| post | 2 | 57.00 | 59.00 | 79.00 | 48.00 | 84.00 | 58.00 |
| dosing | 3 | 57.00 | 108.00 | 86.00 | 56.00 | 61.00 | 46.00 |
| | 4 | ND | 56.00 | 77.00 | 62.00 | 55.00 | 86.00 |
| | 5 | 113.00 | 70.00 | 88.00 | 45.00 | 69.00 | 80.00 |
| | Mean | 70.80 | 67.00 | 74.80 | 55.20 | 86.00 | 54.00 |

[1610] Table 98. shows serum ALP relative to PBS control in the Black/6 mice on 7 days and 28 days post dosing. N=5. N.D.: Not determined.

| | animal | ALP (U/L) | | | | | |
|---|---|---|---|---|---|---|---|
| | No. | PBS | DSR-0103301 | DSR-0103300 | DSR-0103299 | DSR-0103216 | DSR-0103199 |
| 7 days | 1 | N.D | 129.00 | 125.00 | 103.00 | 170.00 | 105.00 |
| post | 2 | 138.00 | 126.00 | 99.00 | N.D | 152.00 | N.D |
| dosing | 3 | N.D | N.D | 78.00 | N.D | 138.00 | N.D |
| | 4 | 146.00 | N.D | N.D | N.D | 147.00 | N.D |
| | 5 | N.D | 118.00 | N.D | 130.00 | 130.00 | N.D |
| | Mean | 56.80 | 74.60 | 60.40 | 46.60 | 147.40 | 21.00 |
| 28 days | 1 | 96.00 | N.D | 104.00 | N.D | N.D | N.D |
| post | 2 | 116.00 | 122.00 | N.D | 112.00 | 136.00 | 127.00 |
| dosing | 3 | 142.00 | 113.00 | N.D | N.D | 112.00 | N.D |
| | 4 | N.D | 123.00 | N.D | 130.00 | N.D | N.D |
| | 5 | N.D | 119.00 | 113.00 | 136.00 | 152.00 | 127.00 |
| | Mean | 70.80 | 95.40 | 43.40 | 75.60 | 80.00 | 50.80 |

[1611] Table 99. shows serum GLDH relative to PBS control in the Black/6 mice on 7 days and 28 days post dosing. N=5. N.D.: Not determined.

| | animal | GLDH (U/L) | | | | | |
|---|---|---|---|---|---|---|---|
| | No. | PBS | DSR-0103301 | DSR-0103300 | DSR-0103299 | DSR-0103216 | DSR-0103199 |
| 7 days | 1 | 10.20 | 10.90 | 9.20 | 8.50 | 10.90 | 9.00 |
| post | 2 | 8.60 | 7.30 | 10.40 | 13.20 | 10.00 | 8.00 |
| dosing | 3 | 9.50 | 12.60 | 11.40 | 21.40 | 11.90 | 6.90 |
| | 4 | 7.90 | 6.20 | 12.30 | 18.00 | 9.10 | 7.40 |
| | 5 | 8.50 | 15.30 | 14.20 | 12.80 | 9.80 | 7.40 |
| | Mean | 8.94 | 10.46 | 11.50 | 14.78 | 10.34 | 7.74 |
| 28 days | 1 | 9.90 | 8.50 | 7.10 | 12.40 | 13.30 | N.D |
| post | 2 | 6.90 | 9.60 | 12.70 | 9.70 | 15.00 | 8.20 |
| dosing | 3 | 7.90 | 8.90 | 8.00 | 9.10 | 12.50 | 11.70 |
| | 4 | N.D | 12.30 | 8.60 | 9.20 | 10.40 | 8.20 |
| | 5 | 9.00 | 8.50 | 8.50 | 10.40 | 12.70 | 8.10 |
| | Mean | 6.74 | 9.56 | 8.98 | 10.16 | 12.78 | 7.24 |

[1612] Table 100. shows serum UREAN relative to PBS control in the Black/6 mice on 7 days and 28 days post dosing. N=5. N.D.: Not determined.

| | animal | UREAN (mg/dL) | | | | | |
|---|---|---|---|---|---|---|---|
| | No. | PBS | DSR-0103301 | DSR-0103300 | DSR-0103299 | DSR-0103216 | DSR-0103199 |
| 7 days | 1 | 24.00 | 19.00 | 24.00 | 26.00 | 22.00 | 29.00 |
| post | 2 | 26.00 | 28.00 | 23.00 | 25.00 | 27.00 | N.D |
| dosing | 3 | 25.00 | 23.00 | 29.00 | N.D | 25.00 | N.D |
| | 4 | 30.00 | 27.00 | 25.00 | N.D | 27.00 | 26.00 |
| | 5 | 33.00 | 28.00 | 26.00 | 26.00 | 26.00 | 26.00 |
| | Mean | 27.60 | 25.00 | 25.40 | 15.40 | 25.40 | 16.20 |
| 28 days | 1 | 31.00 | 29.00 | 24.00 | N.D | 25.00 | N.D |
| post | 2 | 30.00 | 27.00 | 28.00 | 31.00 | 26.00 | 28.00 |
| dosing | 3 | 26.00 | 30.00 | 26.00 | N.D | 26.00 | N.D |
| | 4 | N.D | 25.00 | 27.00 | 31.00 | 29.00 | 31.00 |
| | 5 | 33.00 | 27.00 | 27.00 | 24.00 | 24.00 | 28.00 |
| | Mean | 24.00 | 27.60 | 26.40 | 17.20 | 26.00 | 17.40 |

[1613] Table 101. shows serum CREAT relative to PBS control in the Black/6 mice on 7 days and 28 days post dosing. N=5. N.D.: Not determined.

| | animal | CREAT (mg/dL) | | | | | |
|---|---|---|---|---|---|---|---|
| | No. | PBS | DSR-0103301 | DSR-0103300 | DSR-0103299 | DSR-0103216 | DSR-0103199 |
| 7 days | 1 | 0.30 | 0.30 | 0.20 | 0.30 | 0.30 | 0.30 |
| post | 2 | 0.30 | 0.20 | 0.20 | 0.30 | 0.30 | 0.50 |
| dosing | 3 | 0.30 | 0.30 | 0.30 | 0.30 | 0.30 | 0.30 |
| | 4 | 0.40 | 0.40 | 0.30 | 0.30 | 0.30 | 0.40 |
| | 5 | 0.40 | 0.30 | 0.40 | 0.30 | 0.30 | 0.30 |
| | Mean | 0.34 | 0.30 | 0.28 | 0.30 | 0.30 | 0.36 |
| 28 days | 1 | 0.30 | 0.20 | 0.30 | 0.20 | 0.30 | N.D |
| post | 2 | 0.30 | 0.20 | 0.30 | 0.30 | 0.30 | 0.30 |
| dosing | 3 | 0.30 | 0.30 | 0.30 | 0.30 | 0.30 | 0.30 |
| | 4 | N.D | 0.20 | 0.30 | 0.40 | 0.30 | 0.40 |
| | 5 | 0.40 | 0.30 | 0.30 | 0.30 | 0.30 | 0.30 |
| | Mean | 0.26 | 0.24 | 0.30 | 0.30 | 0.30 | 0.26 |

[1614] Table 102. shows serum TBIL relative to PBS control in the Black/6 mice on 7 days and 28 days post dosing. N=5. N.D.: Not determined.

| | animal | TBIL (mg/dL) | | | | | |
|---|---|---|---|---|---|---|---|
| | No. | PBS | DSR-0103301 | DSR-0103300 | DSR-0103299 | DSR-0103216 | DSR-0103199 |
| 7 days | 1 | 0.04 | 0.04 | 0.06 | 0.04 | 0.13 | 0.07 |
| post | 2 | 0.05 | 0.05 | 0.07 | 0.05 | 0.06 | N.D |
| dosing | 3 | 0.07 | 0.06 | 0.06 | N.D | 0.07 | N.D |
| | 4 | 0.01 | 0.06 | 0.09 | N.D | 0.06 | 0.06 |
| | 5 | 0.04 | 0.04 | 0.05 | 0.04 | 0.08 | 0.07 |
| | Mean | 0.04 | 0.05 | 0.07 | 0.03 | 0.08 | 0.04 |
| 28 days | 1 | 0.05 | 0.07 | 0.05 | N.D | 0.06 | N.D |
| post | 2 | 0.04 | 0.08 | 0.08 | 0.07 | 0.04 | 0.08 |
| dosing | 3 | 0.09 | 0.07 | 0.09 | N.D | 0.04 | N.D |
| | 4 | N.D | 0.18 | 0.07 | 0.05 | 0.05 | 0.04 |
| | 5 | 0.07 | 0.06 | 0.08 | 0.06 | 0.13 | 0.06 |
| | Mean | 0.05 | 0.09 | 0.07 | 0.04 | 0.06 | 0.04 |

[1615] Table 103. shows the accumulation of antisense strand in the kidney at 7 days and 28 days post dosing. N=5. N.D.: Not determined.

| | animal | Kidney Guide Strand PK (ug oligo/g tissue) | | | | | |
|---|---|---|---|---|---|---|---|
| | No. | PBS | DSR-0103199 | DSR-0103216 | DSR-0103299 | DSR-0103300 | DSR-0103301 |
| 7 days | 1 | 0.00 | 18.41 | 28.59 | 69.40 | 48.56 | 60.33 |
| post | 2 | 0.00 | 19.33 | 22.90 | 63.28 | 48.54 | 70.44 |
| dosing | 3 | 0.00 | 21.00 | 30.52 | 62.15 | 60.84 | 68.75 |
| | 4 | 0.00 | 17.13 | 16.84 | 76.81 | 51.11 | 77.24 |
| | 5 | 0.00 | 20.10 | 32.42 | 82.56 | 49.74 | 84.28 |
| | Mean | 0.00 | 19.19 | 26.26 | 70.84 | 51.76 | 72.21 |
| 28 days | 1 | 0.00 | 2.52 | 4.21 | 7.21 | 6.84 | 6.88 |
| post | 2 | 0.00 | 1.66 | 4.59 | 11.92 | 5.56 | 6.19 |
| dosing | 3 | 0.00 | 2.44 | 3.33 | 12.82 | 7.08 | 8.53 |
| | 4 | 0.00 | 2.24 | 3.73 | 9.33 | 6.03 | 12.31 |
| | 5 | 0.00 | 2.14 | 5.67 | 7.90 | 7.66 | 8.22 |
| | Mean | 0.00 | 2.20 | 4.31 | 9.84 | 6.63 | 8.43 |

[1616] Table 104. shows the accumulation of antisense strand in the liver at 7 days and 28 days post dosing. N=5. N.D.: Not determined.

| | animal | Liver Guide Strand PK (ug oligo/g tissue) | | | | | |
|---|---|---|---|---|---|---|---|
| | No. | PBS | DSR-0103199 | DSR-0103216 | DSR-0103299 | DSR-0103300 | DSR-0103301 |
| 7 days | 1 | 0.00 | 14.68 | 23.94 | 34.05 | 29.04 | 38.68 |
| post | 2 | 0.00 | 17.64 | 31.55 | 45.08 | 28.22 | 42.87 |
| dosing | 3 | 0.00 | 18.92 | 22.71 | 30.85 | 35.84 | 35.55 |
| | 4 | 0.00 | 12.85 | 23.54 | 30.60 | 29.88 | 46.55 |
| | 5 | 0.00 | 22.04 | 25.97 | 33.40 | 28.82 | 37.78 |
| | Mean | 0.00 | 17.23 | 25.54 | 34.80 | 30.36 | 40.29 |
| 28 days | 1 | 0.00 | 12.14 | 22.00 | 32.62 | 32.67 | 29.44 |
| post | 2 | 0.00 | 12.81 | 20.99 | 38.26 | 32.74 | 30.33 |
| dosing | 3 | 0.00 | 14.64 | 18.81 | 41.06 | 34.65 | 29.40 |
| | 4 | 0.00 | 11.62 | 23.46 | 45.41 | 26.00 | 38.92 |
| | 5 | 0.00 | 11.09 | 23.03 | 41.72 | 29.83 | 34.23 |
| | Mean | 0.00 | 12.46 | 21.66 | 39.81 | 31.18 | 32.46 |

[1617] Table 105. shows the accumulation of antisense strand in the spleen at 7 days and 28 days post dosing. N=5. N.D.: Not determined.

| | animal | Spleen Guide Strand PK (ug oligo/g tissue) | | | | | |
|---|---|---|---|---|---|---|---|
| | No. | PBS | DSR-0103199 | DSR-0103216 | DSR-0103299 | DSR-0103300 | DSR-0103301 |
| 7 days | 1 | 0.00 | 5.52 | 9.17 | 9.97 | 9.47 | 13.43 |
| post | 2 | 0.00 | 6.42 | 8.22 | 11.63 | 10.55 | 12.29 |
| dosing | 3 | 0.00 | 7.49 | 9.00 | 9.73 | 13.39 | 14.34 |
| | 4 | 0.00 | 5.37 | 9.36 | 10.76 | 11.35 | 14.39 |
| | 5 | 0.00 | 7.03 | 9.33 | 11.35 | 11.13 | 14.18 |
| | Mean | 0.00 | 6.37 | 9.02 | 10.69 | 11.18 | 13.73 |
| 28 days | 1 | 0.00 | 3.55 | 9.00 | 8.80 | 7.84 | 9.60 |
| post | 2 | 0.00 | 3.28 | 8.73 | 10.43 | 7.44 | 10.77 |
| dosing | 3 | 0.00 | 3.58 | 9.13 | 10.14 | 8.01 | 9.10 |
| | 4 | 0.00 | 3.18 | 10.30 | 9.43 | 7.85 | 13.05 |
| | 5 | 0.00 | 2.76 | 11.68 | 14.06 | 7.40 | N.D |
| | Mean | 0.00 | 3.27 | 9.77 | 10.57 | 7.71 | 8.51 |

[1618] Table 106. shows the accumulation of antisense strand in the brown adipose at 7 days and 28 days post dosing. N=5. N.D.: Not determined.

| | animal | Brown adipose Guide Strand PK (ug oligo/g tissue) | | | | | |
|---|---|---|---|---|---|---|---|
| | No. | PBS | DSR-0103199 | DSR-0103216 | DSR-0103299 | DSR-0103300 | DSR-0103301 |
| 7 days | 1 | 0.00 | 2.66 | 7.12 | 11.14 | 4.98 | 21.30 |
| post | 2 | 0.00 | 3.58 | 5.20 | 7.68 | 4.18 | 6.15 |
| dosing | 3 | 0.00 | 1.65 | 4.99 | 7.29 | 6.47 | 23.87 |
| | 4 | 0.00 | 2.66 | 4.65 | 13.80 | 6.43 | 12.59 |
| | 5 | 0.00 | 1.88 | 5.24 | 7.38 | 3.20 | 9.00 |
| | Mean | 0.00 | 2.48 | 5.44 | 9.46 | 5.05 | 14.58 |
| 28 days | 1 | 0.00 | 4.89 | 10.79 | 14.20 | 2.95 | 9.20 |
| post | 2 | 0.00 | 2.50 | 5.45 | 12.64 | 10.21 | 10.93 |
| dosing | 3 | 0.00 | 5.66 | 8.39 | 11.47 | 3.88 | 9.66 |
| | 4 | 0.00 | 3.56 | 9.46 | 7.86 | N.D | 10.93 |
| | 5 | 0.00 | 1.92 | 12.25 | 11.99 | 7.24 | 5.52 |
| | Mean | 0.00 | 3.71 | 9.27 | 11.63 | 4.86 | 9.25 |

[1619] Table 107. shows the accumulation of antisense strand in the diaphragm at 7 days and 28 days post dosing. N=5. N.D.: Not determined.

| | animal | Diaphragm Guide Strand PK (ug oligo/g tissue) | | | | | |
|---|---|---|---|---|---|---|---|
| | No. | PBS | DSR-0103199 | DSR-0103216 | DSR-0103299 | DSR-0103300 | DSR-0103301 |
| 7 days | 1 | 0.00 | 1.86 | 5.36 | 4.51 | 2.43 | 3.70 |
| post | 2 | 0.00 | 3.26 | 4.87 | 4.31 | 3.39 | 3.72 |
| dosing | 3 | 0.00 | 2.61 | 3.29 | 3.42 | 3.90 | 3.71 |
| | 4 | 0.00 | 2.56 | 4.14 | 4.92 | 3.16 | 3.69 |
| | 5 | 0.00 | 2.31 | 3.82 | 4.90 | 3.59 | 3.96 |
| | Mean | 0.00 | 2.52 | 4.29 | 4.41 | 3.29 | 3.75 |
| 28 days | 1 | 0.00 | 0.94 | 2.91 | 2.50 | 2.36 | 2.20 |
| post | 2 | 0.00 | 1.73 | 3.41 | 4.28 | 2.49 | 2.44 |
| dosing | 3 | 0.00 | 1.00 | 4.53 | 3.50 | 2.20 | 2.34 |
| | 4 | 0.00 | 1.11 | 3.80 | 3.34 | 2.24 | 3.44 |
| | 5 | 0.00 | 1.05 | 3.07 | 3.26 | 2.49 | 2.54 |
| | Mean | 0.00 | 1.16 | 3.54 | 3.37 | 2.36 | 2.59 |

[1620] Table 108. shows the accumulation of antisense strand in the lung at 7 days and 28 days post dosing. N=5. N.D.: Not determined.

| | animal | Lung Guide Strand PK (ug oligo/g tissue) | | | | | |
|---|---|---|---|---|---|---|---|
| | No. | PBS | DSR-0103199 | DSR-0103216 | DSR-0103299 | DSR-0103300 | DSR-0103301 |
| 7 days | 1 | 0.00 | 0.85 | 2.46 | 3.44 | 1.11 | 4.55 |
| post | 2 | 0.00 | 1.01 | 2.18 | 1.82 | 1.67 | 3.45 |
| dosing | 3 | 0.00 | 1.12 | 1.89 | 2.73 | 2.87 | 2.25 |
| | 4 | 0.00 | 0.90 | 2.39 | 4.13 | 2.19 | 3.35 |
| | 5 | 0.00 | 1.58 | 3.28 | 4.04 | 2.93 | 2.35 |
| | Mean | 0.00 | 1.09 | 2.44 | 3.23 | 2.15 | 3.19 |
| 28 days | 1 | 0.00 | 0.66 | 2.61 | 3.41 | 2.20 | 2.60 |
| post | 2 | 0.00 | 0.81 | 2.42 | 3.43 | 2.53 | 2.34 |
| dosing | 3 | 0.00 | 0.82 | 2.51 | 3.27 | 2.03 | 2.61 |
| | 4 | 0.00 | 0.61 | 3.90 | 3.75 | 1.57 | 3.53 |
| | 5 | 0.00 | 0.54 | 4.41 | 4.56 | 2.68 | 3.25 |
| | Mean | 0.00 | 0.69 | 3.17 | 3.68 | 2.20 | 2.87 |

[1621] Table 109. shows the accumulation of antisense strand in the heart at 7 days and 28 days post dosing. N=5. N.D.: Not determined.

| | animal | Heart Guide Strand PK (ug oligo/g tissue) | | | | | |
|---|---|---|---|---|---|---|---|
| | No. | PBS | DSR-0103199 | DSR-0103216 | DSR-0103299 | DSR-0103300 | DSR-0103301 |
| 7 days | 1 | 0.00 | 1.47 | 2.91 | 2.27 | 1.69 | 4.35 |
| post | 2 | 0.00 | 1.75 | 2.37 | 2.55 | 2.39 | 4.02 |
| dosing | 3 | 0.00 | 2.86 | 2.42 | 2.63 | 2.56 | 3.10 |
| | 4 | 0.00 | 1.63 | 3.94 | 2.18 | 1.57 | 3.28 |
| | 5 | 0.00 | 1.68 | 2.86 | 3.10 | 2.53 | 3.51 |
| | Mean | 0.00 | 1.88 | 2.90 | 2.55 | 2.15 | 3.65 |
| 28 days | 1 | 0.00 | 1.09 | 1.28 | 2.03 | 1.94 | 2.46 |
| post | 2 | 0.00 | 1.05 | 1.75 | 2.31 | 1.92 | 3.03 |
| dosing | 3 | 0.00 | 1.47 | 1.84 | 2.11 | 1.45 | 2.56 |
| | 4 | 0.00 | 1.34 | 2.08 | 2.23 | 1.66 | 3.56 |
| | 5 | 0.00 | 1.15 | 2.56 | 2.52 | 1.92 | 2.66 |
| | Mean | 0.00 | 1.22 | 1.90 | 2.24 | 1.78 | 2.85 |

[1622] Table 110. shows the accumulation of antisense strand in the quad at 7 days and 28 days post dosing. N=5. N.D.: Not determined.

| | animal | Quad Guide Strand PK (ug oligo/g tissue) | | | | | |
|---|---|---|---|---|---|---|---|
| | No. | PBS | DSR-0103199 | DSR-0103216 | DSR-0103299 | DSR-0103300 | DSR-0103301 |
| 7 days | 1 | 0.00 | 0.59 | 2.41 | 2.34 | 1.27 | 0.98 |
| post | 2 | 0.00 | 1.22 | 2.17 | 2.72 | 1.82 | 2.50 |
| dosing | 3 | 0.00 | 1.64 | 1.51 | 2.68 | 1.77 | 1.84 |
| | 4 | 0.00 | 1.14 | 2.16 | 1.92 | 2.00 | 1.46 |
| | 5 | 0.00 | 1.38 | 1.91 | 2.33 | 1.15 | 1.96 |
| | Mean | 0.00 | 1.19 | 2.03 | 2.40 | 1.60 | 1.75 |
| 28 days | 1 | 0.00 | 0.83 | 1.65 | 0.97 | 1.25 | 1.01 |
| post | 2 | 0.00 | 0.52 | 1.74 | 1.97 | 1.09 | 1.06 |
| dosing | 3 | 0.00 | 1.05 | 1.64 | 1.10 | 1.09 | 0.88 |
| | 4 | 0.00 | 0.70 | 1.80 | 1.77 | 1.22 | 1.34 |
| | 5 | 0.00 | 0.57 | 0.98 | 1.46 | 1.63 | 1.67 |
| | Mean | 0.00 | 0.74 | 1.56 | 1.45 | 1.26 | 1.19 |

[1623] Table 111. shows the accumulation of antisense strand in the white adipose at 7 days and 28 days post dosing. N=5. N.D.: Not determined.

| | animal | White adipose Guide Strand PK (ug oligo/g tissue) | | | | | |
|---|---|---|---|---|---|---|---|
| | No. | PBS | DSR-0103199 | DSR-0103216 | DSR-0103299 | DSR-0103300 | DSR-0103301 |
| 7 days | 1 | 0.00 | 1.09 | 1.45 | 1.49 | 0.93 | 1.11 |
| post | 2 | 0.00 | 1.46 | 0.99 | 1.33 | 0.84 | 2.52 |
| dosing | 3 | 0.00 | 1.08 | 0.96 | 1.71 | 2.17 | 1.64 |
| | 4 | 0.00 | 0.89 | 1.01 | 1.69 | 0.93 | 2.62 |
| | 5 | 0.00 | 1.05 | 0.96 | 3.26 | 1.39 | 1.79 |
| | Mean | 0.00 | 1.11 | 1.07 | 1.90 | 1.25 | 1.93 |
| 28 days | 1 | 0.00 | 0.60 | 0.81 | 1.39 | 0.49 | 0.99 |
| post | 2 | 0.00 | 0.71 | 0.71 | 1.05 | 1.00 | 2.16 |
| dosing | 3 | 0.00 | 0.72 | 0.72 | 0.66 | 0.77 | 1.15 |
| | 4 | 0.00 | 0.46 | 0.93 | 0.61 | 0.73 | 2.45 |
| | 5 | 0.00 | 0.47 | 1.01 | 1.54 | 1.37 | 2.33 |
| | Mean | 0.00 | 0.59 | 0.84 | 1.05 | 0.87 | 1.82 |

[1624] Table 112. shows Ago 2 loading of guide strand relative to mi-143 in liver. N=3

| | Ct: | Ct: | Ct: | Ct: | Relative |
|---|---|---|---|---|---|
| | mAPP/ | miR- | mAPP/ | miR- | mAPP/miR- |
| | Ago2 | 143/Ago2 | IgG | 143/IgG | 143 |
| | Day 7 | | | | |
| DSR-0103199-1 | 30.56 | 32.94 | 33.38 | 40 | 0.053 |
| DSR-0103199-2 | 30.06 | 31.57 | 33.1 | 40 | 0.024 |
| DSR-0103199-3 | 29.73 | 31.45 | 33.24 | 40 | 0.030 |
| DSR-0103216-1 | 28.16 | 29.58 | 31.82 | 40 | 0.018 |
| DSR-0103216-2 | 28.63 | 30.07 | 30.12 | 39.35 | 0.005 |
| DSR-0103216-3 | 29.18 | 31.35 | 30.32 | 39.47 | 0.006 |
| DSR-0103299-1 | 28.74 | 30.02 | 31.16 | 39.24 | 0.009 |
| DSR-0103299-2 | 27.84 | 29.62 | 31.07 | 36.47 | 0.081 |
| DSR-0103299-3 | 28.15 | 30.81 | 30.61 | 38.94 | 0.020 |
| DSR-0103300-1 | 27.42 | 31.22 | 29.5 | 39.16 | 0.017 |
| DSR-0103300-2 | 26.92 | 30.49 | 30.07 | 39.65 | 0.016 |
| DSR-0103300-3 | 26.93 | 30.7 | 29.75 | 38.87 | 0.025 |
| DSR-0103301-1 | 27.18 | 29.31 | 31.16 | 38.87 | 0.021 |
| DSR-0103301-2 | 27.15 | 28.75 | 31.4 | 38.32 | 0.025 |
| DSR-0103301-3 | 27.23 | 29.63 | 31.32 | 39.28 | 0.021 |
| | Day 28 | | | | |
| DSR-0103199-1 | 28.66 | 28.68 | 32.72 | 40 | 0.007 |
| DSR-0103199-2 | 28.61 | 28.29 | 32.96 | 40 | 0.006 |
| DSR-0103199-3 | 28.66 | 28.32 | 32.92 | 40 | 0.006 |
| DSR-0103216-1 | 27.54 | 28.45 | 30.99 | 39.53 | 0.005 |
| DSR-0103216-2 | 27.29 | 28.09 | 31.22 | 40 | 0.004 |
| DSR-0103216-3 | 27.51 | 28.33 | 31.07 | 39.76 | 0.004 |
| DSR-0103299-1 | 27.95 | 28.25 | 31.59 | 39.96 | 0.004 |
| DSR-0103299-2 | 27.91 | 28.85 | 31.79 | 40 | 0.006 |
| DSR-0103299-3 | 28.09 | 28.92 | 31.76 | 40 | 0.006 |
| DSR-0103300-1 | 27.38 | 28.92 | 31.81 | 39.32 | 0.016 |
| DSR-0103300-2 | 27.90 | 29.44 | 31.88 | 40 | 0.010 |
| DSR-0103300-3 | 28.46 | 30.86 | 31.2 | 40 | 0.012 |
| DSR-0103301-1 | 27.96 | 29.25 | 31.52 | 40 | 0.007 |
| DSR-0103301-2 | 27.68 | 29.32 | 31.67 | 40 | 0.010 |
| DSR-0103301-3 | 28.16 | 29.41 | 31.66 | 40 | 0.007 |

[1625] Table 113. shows Ago 2 loading of guide strand relative to miR-143 in kidney. N=3

| | Ct: | Ct: | Ct: | Ct: | Relative |
|---|---|---|---|---|---|
| | mAPP/ | miR- | mAPP/ | miR- | mAPP/miR- |
| | Ago2 | 143/Ago2 | IgG | 143/IgG | 143 |
| | Day 7 | | | | |
| DSR-0103199-1 | 28.37 | 31.75 | 29.03 | 34.13 | 0.304 |
| DSR-0103199-2 | 26.74 | 31.26 | 29.22 | 34.03 | 0.818 |
| DSR-0103199-3 | 27.29 | 31.43 | 28.57 | 33.6 | 0.540 |
| DSR-0103216-1 | 27.21 | 31.54 | 29.21 | 34.08 | 0.688 |
| DSR-0103216-2 | 27.90 | 31.49 | 29.11 | 33.41 | 0.611 |
| DSR-0103216-3 | 28.19 | 31.76 | 29.72 | 33.49 | 0.871 |
| DSR-0103299-1 | 28.46 | 31.56 | 28.9 | 32.38 | 0.768 |
| DSR-0103299-2 | 29.44 | 32.15 | 29.6 | 30.25 | 4.170 |
| DSR-0103299-3 | 29.16 | 31.4 | 29.93 | 33.62 | 0.366 |
| DSR-0103300-1 | 30.26 | 31.82 | 30.51 | 32.62 | 0.683 |
| DSR-0103300-2 | 30.47 | 31.67 | 30.77 | 33.84 | 0.274 |
| DSR-0103300-3 | 30.38 | 31.89 | 30.65 | 33.99 | 0.281 |
| DSR-0103301-1 | 20.57 | 31.75 | 19.45 | 32.26 | 0.323 |
| DSR-0103301-2 | 21.10 | 31.71 | 19.64 | 32.5 | 0.210 |
| DSR-0103301-3 | 21.12 | 31.68 | 20.9 | 32.93 | 0.361 |
| | Day 28 | | | | |
| DSR-0103199-1 | 31.33 | 33.46 | 31.05 | 34.73 | 0.342 |
| DSR-0103199-2 | 31.15 | 31.63 | 30.52 | 33.73 | 0.151 |
| DSR-0103199-3 | 31.21 | 33.54 | 30.67 | 36.01 | 0.124 |
| DSR-0103216-1 | 30.81 | 32.08 | 30.11 | 33 | 0.325 |
| DSR-0103216-2 | 30.79 | 32.5 | 30.26 | 33.28 | 0.403 |
| DSR-0103216-3 | 30.73 | 32.3 | 30.32 | 33.82 | 0.262 |
| DSR-0103299-1 | 30.73 | 31.9 | 30.52 | 33.06 | 0.387 |
| DSR-0103299-2 | 30.69 | 31.86 | 30.34 | 33.68 | 0.222 |
| DSR-0103299-3 | 30.30 | 31.26 | 30.58 | 34.16 | 0.163 |
| DSR-0103300-1 | 30.37 | 30.6 | 30.41 | 33.48 | 0.140 |
| DSR-0103300-2 | 30.41 | 31.69 | 30.64 | 33.32 | 0.379 |
| DSR-0103300-3 | 30.68 | 32.63 | 30.4 | 35.03 | 0.156 |
| DSR-0103301-1 | 27.45 | 33.29 | 26.84 | 34.67 | 0.252 |
| DSR-0103301-2 | 27.47 | 31.64 | 25.9 | 33.48 | 0.094 |
| DSR-0103301-3 | 25.69 | 32.27 | 24.7 | 33.04 | 0.295 |

[1626] Table 114. shows Ago 2 loading of guide strand relative to mi-143 in white adipose tissue. N=3

| | Ct: | Ct: | Ct: | Ct: | Relative |
|---|---|---|---|---|---|
| | mAPP/ | miR- | mAPP/ | miR- | mAPP/miR- |
| | Ago2 | 143/Ago2 | IgG | 143/IgG | 143 |
| | Day 7 | | | | |
| DSR-0103199-1 | 30.25 | 24.04 | 30.11 | 32.59 | 0.002 |
| DSR-0103199-2 | 30.18 | 24.18 | 30.7 | 32.59 | 0.004 |
| DSR-0103199-3 | 30.11 | 22.66 | 30.97 | 32.77 | 0.002 |
| DSR-0103216-1 | 30.08 | 23.41 | 30.6 | 32.83 | 0.002 |
| DSR-0103216-2 | 30.36 | 23.41 | 31.01 | 33.39 | 0.002 |
| DSR-0103216-3 | 30.60 | 23.23 | 31.03 | 33.61 | 0.001 |
| DSR-0103299-1 | 30.42 | 24.24 | 31.06 | 33.82 | 0.002 |
| DSR-0103299-2 | 30.49 | 23.29 | 30.88 | 32.18 | 0.003 |
| DSR-0103299-3 | 30.41 | 23.46 | 31.18 | 34.16 | 0.001 |
| DSR-0103300-1 | 30.46 | 24.4 | 31.04 | 33.78 | 0.002 |
| DSR-0103300-2 | 30.56 | 24.05 | 31.35 | 34.85 | 0.001 |
| DSR-0103300-3 | 30.51 | 24.58 | 31.28 | 34.4 | 0.002 |
| DSR-0103301-1 | 25.50 | 23.23 | 26.5 | 31.54 | 0.006 |
| DSR-0103301-2 | 25.60 | 23.07 | 26.86 | 31.64 | 0.006 |
| DSR-0103301-3 | 24.64 | 22.27 | 25.85 | 31.52 | 0.004 |
| | Day 28 | | | | |
| DSR-0103199-1 | 29.23 | 23.17 | 29.17 | 31.1 | 0.004 |
| DSR-0103199-2 | 30.78 | 24.38 | 30.93 | 31.56 | 0.008 |
| DSR-0103199-3 | 30.16 | 23.29 | 30.12 | 31.03 | 0.005 |
| DSR-0103216-1 | 30.78 | 22.74 | 30.4 | 31.35 | 0.002 |
| DSR-0103216-2 | 30.78 | 22.56 | 30.47 | 31.04 | 0.002 |
| DSR-0103216-3 | 30.62 | 23.99 | 30.82 | 31.42 | 0.007 |
| DSR-0103299-1 | 30.64 | 23.6 | 31.24 | 33.3 | 0.002 |
| DSR-0103299-2 | 30.58 | 23.46 | 31.05 | 32.04 | 0.004 |
| DSR-0103299-3 | 30.43 | 23.4 | 31.27 | 33.13 | 0.002 |
| DSR-0103300-1 | 30.66 | 24.48 | 31.33 | 34.57 | 0.001 |
| DSR-0103300-2 | 30.25 | 24.24 | 32.26 | 37.54 | 0.000 |
| DSR-0103300-3 | 30.45 | 25.01 | 31.2 | 33.97 | 0.003 |
| DSR-0103301-1 | 26.03 | 21.96 | 26.95 | 31.16 | 0.003 |
| DSR-0103301-2 | 25.47 | 22.76 | 26.71 | 31.96 | 0.004 |
| DSR-0103301-3 | 26.71 | 23.73 | 26.58 | 32.18 | 0.003 |

### Example 13. Provided Oligonucleotides and Compositions are Active In Vivo

[1627] All animal procedures were performed under IACUC guidelines. Male 8-9 weeks of age C57BL/6 mice underwent surgery for the implantation of intracerebroventricular cannulas. At 10-11 weeks of age the same mice were dosed 100 μg on Day 0 by intracerebroventricular injection. After 8 weeks animals in groups 1-5 were euthanized by CO₂ asphyxiation followed by thoracotomy. After cardiac perfusion with PBS brain samples were taken from both hemispheres (cortex, striatum, hippocampus, cerebellum, and brain stem) and flash frozen on dry ice. After 12 weeks animals in groups 6-10 were euthanized by CO₂ asphyxiation followed by thoracotomy and terminal blood collection. After cardiac perfusion with PBS brain samples were taken from both hemispheres (cortex, striatum, hippocampus, cerebellum, brain stem, and spinal cord) and flash frozen on dry ice. After 16 weeks animals in groups 11-15 were euthanized by CO₂ asphyxiation followed by thoracotomy and terminal blood collection. After cardiac perfusion with PBS brain samples were taken from both hemispheres (cortex, striatum, hippocampus, cerebellum, brain stem, and spinal cord) and flash frozen on dry ice. One animals from each group had the right hemisphere of their brain placed in buffered 10% formalin. Total RNA from different CNS regions was extracted using RNeasy 96 kit (Qiagen), after tissue lysis with TRIzol and chloroform. cDNA production from RNA samples were performed using High-Capacity cDNA Reverse Transcription kit (Thermo Fisher) following manufacturer's instructions and qPCR analysis performed in CFX System using iQ Multiplex Powermix (Bio-Rad). For mouse APP mRNA, the following qPCR assay were utilized: Thermofisher Taqman qPCR assay ID Mm01344172-ml. Mouse HPRT was used as normalizer (Forward 5′CAAACTTTGCTTTCCCTGGTT3′, Reverse 5′TGGCCTGTATCCAACACTTC3′, Probe 5′/5HEX/ACCAGCAAG/Zen/CTTGCAACCTTAACC/3IABkFQ/3′. Thermofisher Taqman qPCR assay ID for Calb1: Mm00486647_m1, Grid2: Mm00515047_m1, Pcp2: Mm00435514_m1, Gfap: Mm01253033_m1, Aif1: Mm00479862-g1. Thermofisher Taqman qPCR assay ID Mouse Tubb3 which was used as normalizer: Mm00727586-s1. Oligonucleotide accumulation in CNS regions was determined by sandwich ELISA.

[1628] To evaluate the safety of siRNAs used, serum NfL levels were measured at 4-, 6-, and 8-weeks following administration. Monoclonal antibody UD1 (Uman Diagnotics) was covalently coupled to MagPlex-C Microspheres #12 (MC10012-01, Luminex) using xMAP Antibody Coupling Kit (#40-50016, Luminex). Serum samples from mice were diluted as 1:4 with Specimen Diluent Buffer (Quidel #A3670) and incubated with UD1 coupled microspheres (2500 beads/well) in a 96-well plate for 18-20 hours at 4 C on an orbital plated shaker. Following three washes with Wash Buffer (EMD Millipore #L-WB), the wells were subjected to an incubation step with 25 μL of Detection antibody (1:500, UD3, Uman Diagnostics) on a plate shaker for 2 hours at ambient temperature. 25 μL of Streptavidin-Phycoerthrin (EMD Millipore #LB-SAPE10) was introduced into each well, followed by an incubation period of 30 minutes with continuous agitation. Following three rounds of washing, 150 microliters of Sheath Fluid PLUS (EMD Millipore #40-50021) was introduced, and subsequently, the beads were resuspended on a plate shaker for a duration of 5 minutes. The fluorescence intensity signal of the beads was measured using FLEXMAP 3D (Luminex) instrument with xPONENT software (Luminex). The analyses were conducted in duplicate to ensure accuracy and reliability. The standard NfL protein (Progen #RPC20469) was used to prepare five standards at the concentration from 30 to 200,000 μg/ml in Assay buffer (EMD Millipore #L-AB) Unspiked assay buffer was used as blank. Standard curves were fitted using 5-Parameter Logistic regression analysis by XPONENT software. Average NfL concentration of each group was calculated and plotted using GraphPad Prism. Minimal changes in the serum levels of NfL were observed in the mice treated with siRNA, in comparison to the group treated with PBS. There was no statistically significant difference observed between the groups.

[1629] Cerebellum total RNA extracted from mice treated with PBS, DSR-0103432, DSR-0103299, DSR-0103300, and DSR-0103301 (3 animals from each group) were RNA-sequenced and Fastq's were obtained from Novogene. nf-core/rnaseq (version 3.10.1) pipeline was used to process the data, with the specific packages following. Adapters were trimmed using Trim Galore!(Version 0.6.7 & cutadapt version 3.4) then aligned using STAR (version 2.7.9a) and transcript counts quantified using Salmon (version 1.9.0). Aligned bam files were processed using R (version 4.3.0) and differential expression results calculated using DEseq2 (version 1.40.2) and plotted using EnhancedVolcano (version 1.18.0) with cutoffs greater than |log 2foldChange|>1 and padj (Benjamini-Hochberg) less than 0.01.

[1630] Table 115. shows % mouse APP mRNA remaining relative to PBS control in the cerebellum 8 weeks post dosing. N=6. N.D. Not determined.

| | % remaining of mAPP mRNA | | | | |
|---|---|---|---|---|---|
| | | DSR- | DSR- | DSR- | DSR- |
| animal No. | PBS | 0103432 | 0103299 | 0103300 | 0103301 |
| 1 | 97.70 | 136.10 | 36.10 | 32.00 | 21.10 |
| 2 | 91.50 | 140.50 | 23.60 | 86.90 | 24.20 |
| 3 | 115.60 | 113.50 | 25.90 | 19.30 | 15.40 |
| 4 | 99.50 | 102.90 | 31.30 | 42.50 | 24.30 |
| 5 | 90.10 | 115.40 | 23.40 | 19.90 | 17.80 |
| 6 | 105.50 | 81.00 | 27.20 | 20.30 | 17.30 |
| Mean | 99.98 | 114.90 | 27.92 | 36.82 | 20.02 |

[1631] Table 116. shows 0% mouse APP mRNA remaining relative to PBS control in the spinal cord 8 weeks post dosing. N=6. N.D.: Not determined.

| | % remaining of mAPP mRNA | | | | |
|---|---|---|---|---|---|
| | | DSR- | DSR- | DSR- | DSR- |
| animal No. | PBS | 0103432 | 0103299 | 0103300 | 0103301 |
| 1 | 94.30 | 109.80 | 26.90 | 12.70 | 7.60 |
| 2 | 97.70 | 99.20 | 16.60 | 76.30 | 8.10 |
| 3 | 103.30 | 119.30 | 18.90 | 15.40 | 8.60 |
| 4 | 88.80 | 110.20 | 26.20 | 29.10 | 9.60 |
| 5 | 106.60 | 148.50 | 20.90 | 9.40 | 8.30 |
| 6 | 109.30 | 115.30 | 24.60 | 14.60 | 5.50 |
| Mean | 100.00 | 117.05 | 22.35 | 26.25 | 7.95 |

[1632] Table 117. shows 00 mouse APP mRNA remaining relative to PBS control in the cortex 8 weeks post dosing. N=6. N.D.: Not determined.

| | % remaining of mAPP mRNA | | | | |
|---|---|---|---|---|---|
| | | DSR- | DSR- | DSR- | DSR- |
| animal No. | PBS | 0103432 | 0103299 | 0103300 | 0103301 |
| 1 | 98.30 | 92.30 | 36.90 | 22.00 | 17.00 |
| 2 | 99.00 | 100.60 | 35.70 | 32.10 | 28.80 |
| 3 | 93.80 | 110.10 | 21.30 | 23.20 | 21.50 |
| 4 | 102.00 | 97.50 | 30.50 | 54.80 | 22.00 |
| 5 | 96.50 | 119.70 | 36.60 | 17.90 | 7.90 |
| 6 | 110.50 | 116.20 | 18.60 | 18.70 | 10.00 |
| Mean | 100.02 | 106.07 | 29.93 | 28.12 | 17.87 |

[1633] Table 118. shows 0% mouse APP mRNA remaining relative to PBS control in the hippocampus 8 weeks post dosing. N=6. N.D.: Not determined.

| | % remaining of mAPP mRNA | | | | |
|---|---|---|---|---|---|
| | | DSR- | DSR- | DSR- | DSR- |
| animal No. | PBS | 0103432 | 0103299 | 0103300 | 0103301 |
| 1 | 93.10 | 105.20 | 20.70 | 10.10 | 7.40 |
| 2 | 103.50 | 98.90 | 16.00 | 15.30 | 11.60 |
| 3 | 112.20 | 113.50 | 10.00 | 9.70 | 9.30 |
| 4 | 94.30 | 116.50 | 18.00 | 30.80 | 13.30 |
| 5 | 92.30 | 107.90 | 11.90 | 10.20 | 5.90 |
| 6 | 104.60 | 107.90 | 10.90 | 8.80 | 8.60 |
| Mean | 100.00 | 108.32 | 14.58 | 14.15 | 9.35 |

[1634] Table 119. shows 00 mouse APP mRNA remaining relative to PBS control in the striatum 8 weeks post dosing. N=6. N.D.: Not determined.

| | % remaining of mAPP mRNA | | | | |
|---|---|---|---|---|---|
| | | DSR- | DSR- | DSR- | DSR- |
| animal No. | PBS | 0103432 | 0103299 | 0103300 | 0103301 |
| 1 | 105.20 | 116.30 | 27.70 | 24.40 | 22.60 |
| 2 | 107.90 | 85.40 | 42.60 | 28.50 | 45.60 |
| 3 | 95.10 | 97.00 | 20.10 | 18.30 | 15.50 |
| 4 | 97.80 | 97.40 | 23.20 | 51.70 | 24.30 |
| 5 | 95.90 | 95.50 | 26.70 | 10.60 | 13.70 |
| 6 | 98.00 | 94.70 | 25.50 | 12.30 | 13.60 |
| Mean | 99.98 | 97.72 | 27.63 | 24.30 | 22.55 |

[1635] Table 120. shows 0% mouse APP mRNA remaining relative to PBS control in the brainstem 8 weeks post dosing. N=6. N.D.: Not determined.

| | % remaining of mAPP mRNA | | | | |
|---|---|---|---|---|---|
| | | DSR- | DSR- | DSR- | DSR- |
| animal No. | PBS | 0103432 | 0103299 | 0103300 | 0103301 |
| 1 | 103.90 | 126.80 | 33.40 | 16.80 | 13.30 |
| 2 | 117.40 | 109.70 | 22.60 | 59.00 | 13.70 |
| 3 | 99.50 | 108.80 | 15.80 | 17.50 | 10.60 |
| 4 | 92.00 | 101.60 | 20.20 | 42.60 | 13.80 |
| 5 | 94.30 | 98.00 | 16.40 | 13.20 | 10.00 |
| 6 | 92.90 | 101.10 | 20.60 | 12.30 | 8.80 |
| Mean | 100.00 | 107.67 | 21.50 | 26.90 | 11.70 |

[1636] Table 121. shows 00 mouse APP mRNA remaining relative to PBS control in the brainstem 12 weeks post dosing. N=6. N.D.: Not determined.

| | % remaining of mAPP mRNA | | | | |
|---|---|---|---|---|---|
| | | DSR- | DSR- | DSR- | DSR- |
| animal No. | PBS | 0103432 | 0103299 | 0103300 | 0103301 |
| 1 | 110.00 | 103.40 | 21.00 | 17.70 | 18.00 |
| 2 | 104.20 | 99.10 | 31.60 | 12.00 | 10.40 |
| 3 | 101.00 | 101.80 | 17.30 | 14.10 | 10.60 |
| 4 | 94.20 | 82.60 | 16.90 | 16.90 | N.D |
| 5 | 110.00 | 107.10 | 35.40 | 19.90 | 10.00 |
| 6 | 80.60 | 86.70 | 23.50 | 12.10 | 13.10 |
| Mean | 100.00 | 96.78 | 24.28 | 15.45 | 10.35 |

[1637] Table 122. shows 0% mouse APP mRNA remaining relative to PBS control in the striatum 12 weeks post dosing. N=6. N.D.: Not determined.

| | % remaining of mAPP mRNA | | | | |
|---|---|---|---|---|---|
| | | DSR- | DSR- | DSR- | DSR- |
| animal No. | PBS | 0103432 | 0103299 | 0103300 | 0103301 |
| 1 | 83.30 | 103.80 | 41.00 | 18.80 | 31.70 |
| 2 | 125.60 | 71.30 | 44.00 | 11.10 | 10.40 |
| 3 | 95.30 | 96.00 | 16.20 | 25.70 | 13.20 |
| 4 | 104.40 | 98.90 | 24.30 | 44.20 | N.D |
| 5 | 98.70 | 84.30 | 52.80 | 75.70 | 15.40 |
| 6 | 92.70 | 89.00 | 69.20 | 11.40 | 31.20 |
| Mean | 100.00 | 90.55 | 41.25 | 31.15 | 16.98 |

[1638] Table 123. shows 00 mouse APP mRNA remaining relative to PBS control in the hippocampus 12 weeks post dosing. N=6. N.D.: Not determined.

| | % remaining of mAPP mRNA | | | | |
|---|---|---|---|---|---|
| | | DSR- | DSR- | DSR- | DSR- |
| animal No. | PBS | 0103432 | 0103299 | 0103300 | 0103301 |
| 1 | 102.50 | 92.20 | 18.70 | 8.20 | 8.50 |
| 2 | 110.30 | 107.20 | 25.00 | 8.10 | 7.70 |
| 3 | 90.20 | 90.40 | 9.10 | 8.70 | 7.00 |
| 4 | 97.50 | 109.60 | 12.40 | 18.50 | N.D |
| 5 | 89.60 | 99.10 | 33.10 | 21.60 | 10.80 |
| 6 | 109.90 | 109.50 | 36.80 | 7.50 | 23.00 |
| Mean | 100.00 | 101.33 | 22.52 | 12.10 | 9.50 |

[1639] Table 124. shows 0% mouse APP mRNA remaining relative to PBS control in the cortex 12 weeks post dosing. N=6. N.D.: Not determined.

| | % remaining of mAPP mRNA | | | | |
|---|---|---|---|---|---|
| | | DSR- | DSR- | DSR- | DSR- |
| animal No. | PBS | 0103432 | 0103299 | 0103300 | 0103301 |
| 1 | 98.70 | 116.60 | 37.20 | 29.70 | 24.00 |
| 2 | 95.30 | 116.40 | 47.20 | 20.90 | 18.20 |
| 3 | 94.10 | 108.00 | 15.20 | 21.00 | 12.20 |
| 4 | 100.00 | 118.40 | 25.70 | 36.40 | N.D |
| 5 | 108.10 | 96.10 | 62.90 | 48.60 | 17.50 |
| 6 | 103.90 | 104.90 | 56.50 | 8.10 | 33.50 |
| Mean | 100.02 | 110.07 | 40.78 | 27.45 | 17.57 |

[1640] Table 125. shows 00 mouse APP mRNA remaining relative to PBS control in the spinal cord 12 weeks post dosing. N=6. N.D.: Not determined.

| | % remaining of mAPP mRNA | | | | |
|---|---|---|---|---|---|
| | | DSR- | DSR- | DSR- | DSR- |
| animal No. | PBS | 0103432 | 0103299 | 0103300 | 0103301 |
| 1 | 111.00 | 90.10 | 25.80 | 15.70 | 10.40 |
| 2 | 105.60 | 101.80 | 27.70 | 11.80 | 8.20 |
| 3 | 103.30 | 75.60 | 17.30 | 13.20 | 9.50 |
| 4 | 106.30 | 106.40 | 22.10 | 12.90 | N.D |
| 5 | 90.70 | 102.90 | 50.90 | 18.30 | 8.70 |
| 6 | 83.00 | 104.20 | 45.00 | 10.40 | 8.80 |
| Mean | 99.98 | 96.83 | 31.47 | 13.72 | 7.60 |

[1641] Table 126. shows 0% mouse APP mRNA remaining relative to PBS control in the cerebellum 12 weeks post dosing. N=6. N.D.: Not determined.

| | % remaining of mAPP mRNA | | | | |
|---|---|---|---|---|---|
| | | DSR- | DSR- | DSR- | DSR- |
| animal No. | PBS | 0103432 | 0103299 | 0103300 | 0103301 |
| 1 | 99.50 | 111.20 | 20.10 | 16.10 | 15.80 |
| 2 | 94.30 | 96.40 | 34.80 | 17.90 | 14.30 |
| 3 | 98.00 | 101.70 | 21.00 | 14.50 | 14.90 |
| 4 | 96.30 | 108.80 | 21.60 | 25.90 | N.D |
| 5 | 97.20 | 112.40 | 44.40 | 35.00 | 16.60 |
| 6 | 114.60 | 116.40 | 43.00 | 21.30 | 18.60 |
| Mean | 99.98 | 107.82 | 30.82 | 21.78 | 13.37 |

[1642] Table 126A. Shows 00 mouse APP mRNA remaining relative to PBS control in the brainstem 16 weeks post dosing. N=6. N.D.: Not determined.

| | % remaining of mAPP mRNA | | | | |
|---|---|---|---|---|---|
| | | DSR- | DSR- | DSR- | DSR- |
| animal No. | PBS | 0103432 | 0103299 | 0103300 | 0103301 |
| 1 | 106.90 | 96.90 | 32.30 | 20.20 | 14.50 |
| 2 | 88.10 | 103.30 | 29.90 | 18.50 | 13.80 |
| 3 | 99.30 | 84.60 | 27.30 | 16.30 | 36.00 |
| 4 | 95.80 | 94.50 | 38.30 | 27.30 | 13.80 |
| 5 | N.D | 106.20 | 37.30 | 19.10 | 14.60 |
| 6 | 109.80 | 100.20 | 40.00 | 17.70 | 17.50 |
| Mean | 99.98 | 97.62 | 34.18 | 19.85 | 18.37 |

[1643] Table 126B. Shows 0% mouse APP mRNA remaining relative to PBS control in the striatum 16 weeks post dosing. N=6. N.D.: Not determined.

| | % remaining of mAPP mRNA | | | | |
|---|---|---|---|---|---|
| | | DSR- | DSR- | DSR- | DSR- |
| animal No. | PBS | 0103432 | 0103299 | 0103300 | 0103301 |
| 1 | 91.20 | 109.70 | 34.00 | 76.90 | 26.70 |
| 2 | 105.90 | 91.40 | 46.50 | 32.30 | 25.20 |
| 3 | 107.10 | 110.40 | 26.10 | 33.10 | 48.60 |
| 4 | 98.30 | 97.30 | 30.00 | 30.10 | 14.60 |
| 5 | N.D | 92.60 | 38.20 | 28.00 | 17.80 |
| 6 | 97.60 | 91.70 | 30.60 | 24.20 | 22.50 |
| Mean | 100.02 | 98.85 | 34.23 | 37.43 | 25.90 |

[1644] Table 126C. Shows 00 mouse APP mRNA remaining relative to PBS control in the hippocampus 16 weeks post dosing. N=6. N.D.: Not determined.

| | % remaining of mAPP mRNA | | | | |
|---|---|---|---|---|---|
| | | DSR- | DSR- | DSR- | DSR- |
| animal No. | PBS | 0103432 | 0103299 | 0103300 | 0103301 |
| 1 | 98.00 | 101.60 | 23.70 | 16.10 | 10.50 |
| 2 | 113.50 | 91.70 | 33.80 | 13.00 | 11.50 |
| 3 | 85.60 | 75.60 | 41.10 | 11.70 | 32.80 |
| 4 | 92.40 | 101.20 | 40.90 | 26.20 | 6.40 |
| 5 | N.D | 89.30 | 28.80 | 22.40 | 7.80 |
| 6 | 110.60 | 82.40 | 33.70 | 9.20 | 7.40 |
| Mean | 100.02 | 90.30 | 33.67 | 16.43 | 12.73 |

[1645] Table 126D. Shows 0% mouse APP mRNA remaining relative to PBS control in the cortex 16 weeks post dosing. N=6. N.D.: Not determined.

| | % remaining of mAPP mRNA | | | | |
|---|---|---|---|---|---|
| | | DSR- | DSR- | DSR- | DSR- |
| animal No. | PBS | 0103432 | 0103299 | 0103300 | 0103301 |
| 1 | 113.70 | 108.00 | 34.90 | 40.00 | 21.00 |
| 2 | 101.30 | 117.60 | 50.50 | 31.70 | 40.10 |
| 3 | 106.20 | 103.60 | 61.30 | 29.60 | 32.80 |
| 4 | 99.10 | 90.00 | 49.60 | 43.20 | 11.60 |
| 5 | N.D | 98.00 | 50.00 | 33.80 | 18.10 |
| 6 | 79.70 | 88.80 | 47.90 | 23.20 | 20.20 |
| Mean | 100.00 | 101.00 | 49.03 | 33.58 | 23.97 |

[1646] Table 126E. Shows 00 mouse APP mRNA remaining relative to PBS control in the spinal cord 16 weeks post dosing. N=6. N.D.: Not determined.

| | % remaining of mAPP mRNA | | | | |
|---|---|---|---|---|---|
| | | DSR- | DSR- | DSR- | DSR- |
| animal No. | PBS | 0103432 | 0103299 | 0103300 | 0103301 |
| 1 | 104.20 | 88.00 | 39.50 | 22.40 | 26.00 |
| 2 | 97.00 | 84.30 | 38.30 | 17.00 | 51.50 |
| 3 | 90.00 | 118.30 | 48.70 | 15.00 | 14.10 |
| 4 | 98.30 | 113.40 | 61.90 | 19.00 | 15.90 |
| 5 | N.D | 99.70 | 49.50 | 24.50 | 20.20 |
| 6 | 110.40 | 112.40 | 59.20 | 17.50 | 20.40 |
| Mean | 99.98 | 102.68 | 49.52 | 19.23 | 24.68 |

[1647] Table 126F. Shows 00 mouse APP mRNA remaining relative to PBS control in the cerebellum 16 weeks post dosing. N=6. N.D.: Not determined.

| | % remaining of mAPP mRNA | | | | |
|---|---|---|---|---|---|
| | | DSR- | DSR- | DSR- | DSR- |
| animal No. | PBS | 0103432 | 0103299 | 0103300 | 0103301 |
| 1 | 92.50 | 102.00 | 36.50 | 26.30 | 17.30 |
| 2 | 89.40 | 86.60 | 29.50 | 29.60 | 21.10 |
| 3 | 91.00 | 89.60 | 38.10 | 24.50 | 51.30 |
| 4 | 109.50 | 114.10 | 32.60 | 26.30 | 24.70 |
| 5 | N.D | 108.70 | 41.70 | 25.90 | 29.00 |
| 6 | 117.70 | 105.00 | 49.00 | 33.40 | 24.10 |
| Mean | 100.02 | 101.00 | 37.90 | 27.67 | 27.92 |

[1648] Table 126G. Shows the accumulation of antisense strand in the cortex at 8 weeks, 12 weeks and 16 weeks post dosing. N=5. N.D.: Not determined.

| | animal | Cortex Guide Strand PK (ug oligo/g tissue) | | | | |
|---|---|---|---|---|---|---|
| | No. | PBS | DSR-0103432 | DSR-0103299 | DSR-0103300 | DSR-0103301 |
| 8 weeks | 1 | 0.00 | 0.63 | 1.66 | 1.23 | 2.47 |
| post | 2 | 0.00 | 0.71 | 2.37 | 2.24 | 2.08 |
| dosing | 3 | 0.00 | 0.04 | 2.09 | 0.82 | 2.94 |
| | 4 | 0.00 | 1.29 | 2.57 | 2.93 | 8.67 |
| | 5 | 0.00 | 0.28 | 7.81 | 2.52 | 9.00 |
| | Mean | 0.00 | 0.59 | 3.30 | 1.95 | 5.03 |
| 12 weeks | 1 | 0.01 | 3.77 | 3.54 | 4.99 | 3.20 |
| post | 2 | 0.00 | 1.25 | 1.76 | 1.59 | 4.92 |
| dosing | 3 | 0.00 | 3.84 | 1.90 | 1.45 | N.D. |
| | 4 | 0.00 | 4.20 | 0.56 | 0.78 | 4.01 |
| | 5 | 0.07 | 0.48 | 1.86 | 12.68 | 1.32 |
| | Mean | 0.02 | 2.71 | 1.92 | 4.30 | 3.36 |
| 16 weeks | 1 | 0.00 | 0.66 | 1.75 | 0.73 | 1.73 |
| post | 2 | 0.00 | 0.94 | 0.97 | 2.73 | 7.52 |
| dosing | 3 | 0.00 | 0.95 | 0.77 | 0.73 | 1.57 |
| | 4 | N.D. | 0.67 | 1.58 | 2.13 | 2.56 |
| | 5 | 0.00 | 0.98 | 2.14 | 3.03 | 1.93 |
| | Mean | 0.00 | 0.84 | 1.44 | 1.87 | 3.06 |

[1649] Table 126H. Shows the accumulation of antisense strand in the spinal cord at 8 weeks, 12 weeks and 16 weeks post dosing. N=6. N.D.: Not determined.

| | | Spinal cord Guide Strand PK (ug oligo/g tissue) | | | | |
|---|---|---|---|---|---|---|
| | Animal | PBS | DSR-0103432 | DSR-0103299 | DSR-0103300 | DSR-0103301 |
| 8 weeks | 1 | 0.00 | 0.25 | 0.76 | 1.26 | 1.94 |
| post | 2 | 0.00 | 0.20 | N.D. | 0.07 | 2.01 |
| dosing | 3 | 0.00 | 0.21 | 0.94 | 1.65 | 2.53 |
| | 4 | 0.00 | 0.63 | 0.85 | 0.41 | 1.41 |
| | 5 | 0.00 | 0.53 | 1.13 | 2.81 | 2.04 |
| | 6 | 0.00 | 0.07 | 0.69 | 2.28 | 3.13 |
| | Mean | 0.00 | 0.31 | 0.87 | 1.41 | 2.18 |
| 12 weeks | 1 | 0.00 | 0.24 | 0.61 | 1.01 | 2.15 |
| post | 2 | 0.00 | 0.32 | 0.57 | 0.53 | 3.01 |
| dosing | 3 | 0.00 | 0.28 | 0.97 | 1.63 | 3.13 |
| | 4 | 0.00 | 0.32 | 0.88 | 1.55 | N.D. |
| | 5 | 0.00 | 0.28 | 0.31 | 0.74 | 2.69 |
| | 6 | 0.00 | 0.05 | 0.26 | 2.38 | 2.56 |
| | Mean | 0.00 | 0.25 | 0.60 | 1.31 | 2.71 |
| 16 weeks | 1 | 0.00 | 0.14 | 0.31 | 0.87 | 0.84 |
| post | 2 | 0.00 | 0.10 | 0.49 | 0.44 | 0.32 |
| dosing | 3 | 0.00 | 0.09 | 0.45 | 1.34 | 1.66 |
| | 4 | 0.00 | 0.20 | 0.24 | 0.64 | 1.43 |
| | 5 | N.D. | 0.12 | 0.24 | 0.95 | 1.41 |
| | 6 | 0.00 | 0.20 | 0.32 | 1.25 | 0.99 |
| | Mean | 0.00 | 0.14 | 0.34 | 0.92 | 1.11 |

[1650] Table 126I. Shows the accumulation of antisense strand in the hippocampus at 8 weeks, 12 weeks and 16 weeks post dosing. N=5. N.D.: Not determined.

| | animal | Hippocampus Guide Strand PK (ug oligo/g tissue) | | | | |
|---|---|---|---|---|---|---|
| | No. | PBS | DSR-0103432 | DSR-0103299 | DSR-0103300 | DSR-0103301 |
| 8 weeks | 1 | 0.00 | 0.67 | 1.45 | 2.30 | 5.95 |
| post | 2 | 0.00 | 0.88 | 2.15 | 3.09 | 5.67 |
| dosing | 3 | 0.00 | 2.37 | 1.15 | 5.31 | 8.51 |
| | 4 | 0.00 | 1.07 | 7.34 | 5.48 | 14.08 |
| | 5 | 0.00 | 0.18 | 10.66 | 5.44 | 18.04 |
| | Mean | 0.00 | 1.03 | 4.55 | 4.32 | 10.45 |
| 12 weeks | 1 | 0.00 | 2.57 | 1.87 | 5.37 | 3.93 |
| post | 2 | 0.00 | 1.26 | 2.94 | 2.27 | 6.44 |
| dosing | 3 | 0.00 | 2.68 | 2.41 | 1.50 | N.D. |
| | 4 | 0.00 | 6.98 | 0.65 | 0.97 | 7.95 |
| | 5 | 0.00 | 0.39 | 2.08 | 23.47 | 2.51 |
| | Mean | 0.00 | 2.78 | 1.99 | 6.72 | 5.21 |
| 16 weeks | 1 | 0.00 | 0.47 | 1.52 | 2.18 | 2.45 |
| post | 2 | 0.00 | 1.06 | 1.36 | 5.13 | 4.29 |
| dosing | 3 | 0.00 | 1.00 | 0.88 | 1.26 | 1.34 |
| | 4 | 0.00 | 0.57 | 1.39 | 2.38 | 6.67 |
| | 5 | 0.00 | 0.91 | 2.22 | 3.45 | 1.72 |
| | Mean | 0.00 | 0.80 | 1.47 | 2.88 | 3.29 |

[1651] Table 126J. Shows the accumulation of antisense strand in the striatum at 8 weeks, 12 weeks and 16 weeks post dosing. N=5. N.D.: Not determined.

| | animal | Striatum Guide Strand PK (ug oligo/g tissue) | | | | |
|---|---|---|---|---|---|---|
| | No. | PBS | DSR-0103432 | DSR-0103299 | DSR-0103300 | DSR-0103301 |
| 8 weeks | 1 | 0.00 | 0.52 | 0.68 | 1.39 | 2.23 |
| post | 2 | 0.00 | 0.96 | 1.59 | 2.02 | 2.68 |
| dosing | 3 | 0.00 | 1.53 | 1.51 | 1.28 | 2.47 |
| | 4 | 0.00 | 0.96 | 1.46 | 2.21 | 3.74 |
| | 5 | 0.00 | 0.22 | 2.59 | 2.76 | 4.02 |
| | Mean | 0.00 | 0.84 | 1.57 | 1.93 | 3.03 |
| 12 weeks | 1 | 0.01 | 1.89 | 1.64 | 3.65 | 7.41 |
| post | 2 | 0.00 | 0.91 | 1.13 | 1.83 | 3.74 |
| dosing | 3 | 0.00 | 2.66 | 1.50 | 1.79 | N.D |
| | 4 | 0.00 | 3.15 | 0.59 | 0.44 | 4.27 |
| | 5 | 0.01 | 0.42 | 1.58 | 6.46 | 1.22 |
| | Mean | 0.00 | 1.80 | 1.29 | 2.83 | 4.16 |
| 16 weeks | 1 | 0.01 | 0.85 | 0.76 | 0.33 | 2.00 |
| post | 2 | 0.01 | 0.56 | 0.58 | 1.36 | 3.90 |
| dosing | 3 | 0.01 | 1.22 | 0.60 | 0.52 | 0.61 |
| | 4 | N.D | 0.57 | 0.67 | 1.87 | 2.15 |
| | 5 | 0.01 | 0.38 | 2.34 | 1.48 | 2.45 |
| | Mean | 0.01 | 0.72 | 0.99 | 1.11 | 2.22 |

[1652] Table 126K. Shows changes in mouse AIF1 mRNA relative to PBS control in the spinal cord 8 weeks, 12 weeks and 16 weeks post dosing. N=6. N.D.: Not determined.

| | Animal | PBS | DSR-0103432 | DSR-0103299 | DSR-0103300 | DSR-0103301 |
|---|---|---|---|---|---|---|
| 8 weeks | 1 | 1.04 | 1.21 | 1.15 | 1.05 | 1.54 |
| post | 2 | 0.99 | 0.59 | 0.67 | 1.25 | 0.92 |
| dosing | 3 | 1.05 | 1.15 | 1.41 | 1.49 | 1.07 |
| | 4 | 0.84 | 0.95 | 1.06 | 1.33 | 0.91 |
| | 5 | 1.20 | 1.34 | 1.22 | 1.34 | 1.41 |
| | 6 | 0.89 | 1.09 | 0.89 | 1.24 | 1.50 |
| | Mean | 1.00 | 1.06 | 1.07 | 1.28 | 1.23 |
| 12 weeks | 1 | 1.39 | 0.82 | 1.12 | 1.78 | 1.06 |
| post | 2 | 0.95 | 0.75 | 0.61 | 0.71 | 0.65 |
| dosing | 3 | 0.77 | 0.59 | 0.78 | 0.58 | 0.67 |
| | 4 | 0.97 | 0.85 | 0.92 | 0.77 | N.D |
| | 5 | 1.08 | 0.85 | 0.93 | 0.66 | 0.63 |
| | 6 | 0.83 | 1.52 | 1.01 | 0.80 | 0.92 |
| | Mean | 1.00 | 0.90 | 0.89 | 0.88 | 0.79 |
| 16 weeks | 1 | 1.32 | 1.10 | 1.09 | 0.78 | 1.01 |
| post | 2 | 0.97 | 0.61 | 1.03 | 0.96 | 1.04 |
| dosing | 3 | 0.79 | 1.13 | 0.92 | 0.84 | 0.87 |
| | 4 | 0.91 | 0.78 | 1.05 | 0.80 | 0.68 |
| | 5 | N.D | 0.75 | 1.08 | 1.02 | 1.01 |
| | 6 | 1.01 | 1.00 | 0.94 | 0.66 | 0.86 |
| | Mean | 1.00 | 0.90 | 1.02 | 0.84 | 0.91 |

[1653] Table 126L. Shows changes in mouse GFAP mRNA relative to PBS control in the spinal cord 8 weeks, 12 weeks and 16 weeks post dosing. N=6. N.D.: Not determined.

| | | | DSR- | DSR- | DSR- | DSR- |
|---|---|---|---|---|---|---|
| | Animal | PBS | 0103432 | 0103299 | 0103300 | 0103301 |
| 8 | 1 | 0.95 | 1.09 | 1.23 | 1.09 | 1.26 |
| weeks | 2 | 0.83 | 0.71 | 0.73 | 1.19 | 0.91 |
| post | 3 | 1.06 | 0.92 | 1.50 | 1.40 | 1.15 |
| dosing | 4 | 0.83 | 1.06 | 0.99 | 1.18 | 1.06 |
| | 5 | 1.29 | 1.55 | 1.35 | 1.31 | 1.36 |
| | 6 | 1.04 | 1.33 | 0.82 | 1.52 | 1.26 |
| | Mean | 1.00 | 1.11 | 1.10 | 1.28 | 1.17 |
| 12 | 1 | 1.36 | 1.00 | 1.09 | 1.48 | 1.00 |
| weeks | 2 | 0.91 | 0.80 | 0.75 | 0.95 | 0.74 |
| post | 3 | 0.86 | 0.71 | 1.01 | 0.84 | 0.87 |
| dosing | 4 | 0.95 | 1.00 | 1.28 | 0.97 | N.D |
| | 5 | 0.98 | 0.96 | 1.37 | 0.68 | 0.79 |
| | 6 | 0.94 | 1.42 | 1.31 | 0.97 | 0.81 |
| | Mean | 1.00 | 0.98 | 1.14 | 0.98 | 0.85 |
| 16 | 1 | 1.04 | 1.27 | 1.23 | 0.87 | 1.17 |
| weeks | 2 | 1.02 | 0.55 | 1.04 | 0.97 | 1.08 |
| post | 3 | 0.76 | 1.25 | 1.15 | 1.10 | 0.95 |
| dosing | 4 | 0.94 | 0.91 | 1.24 | 1.01 | 0.96 |
| | 5 | N.D | 0.88 | 1.49 | 1.33 | 1.44 |
| | 6 | 1.23 | 1.21 | 1.47 | 0.94 | 1.04 |
| | Mean | 1.00 | 1.01 | 1.27 | 1.04 | 1.11 |

[1654] Table 126M. Shows changes in mouse AIF1 mRNA relative to PBS control in the cerebellum 8 weeks, 12 weeks and 16 weeks post dosing. N=6. N.D.: Not determined.

| | | | DSR- | DSR- | DSR- | DSR- |
|---|---|---|---|---|---|---|
| | Animal | PBS | 0103432 | 0103299 | 0103300 | 0103301 |
| 8 | 1 | 1.01 | 0.71 | 0.72 | 0.75 | 0.91 |
| weeks | 2 | 0.99 | 0.63 | 1.01 | 0.63 | 0.91 |
| post | 3 | 0.92 | 0.95 | 1.11 | 0.68 | 1.07 |
| dosing | 4 | 1.10 | 0.72 | 1.06 | 0.67 | 0.99 |
| | 5 | 0.91 | 0.46 | 1.26 | 0.76 | 1.42 |
| | 6 | 1.07 | 0.96 | 1.29 | 0.65 | 0.97 |
| | Mean | 1.00 | 0.74 | 1.07 | 0.69 | 1.05 |
| 12 | 1 | 0.98 | 0.84 | 1.46 | 0.90 | 1.06 |
| weeks | 2 | 1.03 | 0.75 | 1.42 | 1.01 | 1.20 |
| post | 3 | 0.94 | 0.75 | 1.25 | 1.50 | 1.42 |
| dosing | 4 | 1.08 | 0.92 | 1.46 | 1.24 | |
| | 5 | 1.02 | 0.94 | 1.37 | 1.16 | 1.05 |
| | 6 | 0.94 | 1.63 | 0.79 | 1.22 | 0.78 |
| | Mean | 1.00 | 0.97 | 1.29 | 1.17 | 1.10 |
| 16 | 1 | 1.55 | 0.87 | 0.99 | 0.62 | 0.88 |
| weeks | 2 | 0.89 | 0.79 | 1.17 | 0.99 | 0.82 |
| post | 3 | 0.92 | 0.90 | 0.91 | 0.71 | 0.81 |
| dosing | 4 | 0.84 | 0.95 | 0.72 | 0.64 | 0.90 |
| | 5 | N.D | 0.84 | 1.07 | 0.64 | 0.81 |
| | 6 | 0.79 | 0.98 | 0.91 | 0.72 | 0.69 |
| | Mean | 1.00 | 0.89 | 0.96 | 0.72 | 0.82 |

[1655] Table 126N. Shows changes in mouse GFAP mRNA relative to PBS control in the cerebellum 8 weeks, 12 weeks and 16 weeks post dosing. N=6. N.D. Not determined.

| | | | DSR- | DSR- | DSR- | DSR- |
|---|---|---|---|---|---|---|
| | Animal | PBS | 0103432 | 0103299 | 0103300 | 0103301 |
| 8 | 1 | 1.17 | 1.37 | 0.79 | 1.33 | 1.63 |
| weeks | 2 | 0.63 | 1.36 | 0.96 | 1.30 | 0.97 |
| post | 3 | 0.92 | 1.33 | 1.05 | 1.68 | 1.27 |
| dosing | 4 | 0.96 | 1.16 | 0.85 | 1.24 | 0.80 |
| | 5 | 0.95 | 0.76 | 1.03 | 1.55 | 1.41 |
| | 6 | 1.36 | 1.13 | 0.92 | 1.16 | 0.96 |
| | Mean | 1.00 | 1.18 | 0.93 | 1.38 | 1.17 |
| 12 | 1 | 0.70 | 1.17 | 0.35 | 1.27 | 0.98 |
| weeks | 2 | 1.02 | 0.97 | 0.91 | 1.42 | 1.10 |
| post | 3 | 0.92 | 1.10 | 0.85 | 0.93 | 1.42 |
| dosing | 4 | 1.10 | 1.35 | 0.75 | 1.49 | N.D |
| | 5 | 1.01 | 0.99 | 1.14 | 1.29 | 1.08 |
| | 6 | 1.24 | 1.27 | 1.14 | 1.02 | 0.97 |
| | Mean | 1.00 | 1.14 | 0.86 | 1.23 | 1.11 |
| 16 | 1 | 0.98 | 1.06 | 1.10 | 0.86 | 1.15 |
| weeks | 2 | 0.96 | 0.80 | 1.08 | 1.26 | 1.09 |
| post | 3 | 1.01 | 0.86 | 1.21 | 1.15 | 0.95 |
| dosing | 4 | 0.99 | 1.18 | 0.69 | 0.93 | 1.21 |
| | 5 | N.D | 1.04 | 1.40 | 0.90 | 1.11 |
| | 6 | 1.06 | 1.18 | 1.37 | 1.20 | 1.00 |
| | Mean | 1.00 | 1.02 | 1.14 | 1.05 | 1.08 |

[1656] Table 126O. Shows changes in mouse PCP2 mRNA relative to PBS control in the cerebellum 8 weeks, 12 weeks and 16 weeks post dosing. N=6. N.D.: Not determined.

| | | | DSR- | DSR- | DSR- | DSR- |
|---|---|---|---|---|---|---|
| | Animal | PBS | 0103432 | 0103299 | 0103300 | 0103301 |
| 8 weeks | 1 | 1.10 | 1.06 | 1.04 | 1.46 | 1.87 |
| post | 2 | 0.99 | 1.33 | 1.30 | 1.27 | 1.37 |
| dosing | 3 | 1.05 | 1.10 | 1.31 | 1.09 | 1.27 |
| | 4 | 1.09 | 1.32 | 1.08 | 1.30 | 1.17 |
| | 5 | 0.95 | 1.19 | 1.26 | 1.26 | 1.14 |
| | 6 | 0.82 | 1.07 | 1.12 | 1.20 | 0.93 |
| | Mean | 1.00 | 1.18 | 1.19 | 1.26 | 1.29 |
| 12 | 1 | 0.85 | 1.20 | 0.04 | 0.68 | 0.85 |
| weeks | 2 | 0.88 | 0.92 | 0.84 | 1.23 | 1.14 |
| post | 3 | 0.98 | 1.07 | 0.82 | 0.00 | 1.09 |
| dosing | 4 | 1.18 | 1.33 | 0.84 | 1.29 | N.D |
| | 5 | 1.04 | 1.25 | 1.01 | 1.27 | 1.29 |
| | 6 | 1.08 | 0.94 | 1.24 | 1.16 | 1.06 |
| | Mean | 1.00 | 1.12 | 0.80 | 0.94 | 1.09 |
| 16 | 1 | 0.78 | 0.92 | 1.03 | 0.98 | 0.72 |
| weeks | 2 | 0.90 | 0.84 | 1.09 | 0.96 | 1.14 |
| post | 3 | 0.98 | 0.45 | 0.68 | 0.80 | 1.13 |
| dosing | 4 | 1.14 | 0.96 | 0.97 | 0.91 | 0.90 |
| | 5 | N.D | 0.57 | 1.06 | 1.02 | 1.26 |
| | 6 | 1.20 | 1.01 | 1.18 | 0.83 | 1.64 |
| | Mean | 1.00 | 0.79 | 1.00 | 0.92 | 1.13 |

[1657] Table 126P. Shows changes in mouse GRID2 mRNA relative to PBS control in the cerebellum 8 weeks, 12 weeks and 16 weeks post dosing. N=6. N.D.: Not determined.

| | | | DSR- | DSR- | DSR- | DSR- |
|---|---|---|---|---|---|---|
| | Animal | PBS | 0103432 | 0103299 | 0103300 | 0103301 |
| 8 | 1 | 1.15 | 0.97 | 0.89 | 1.09 | 1.32 |
| weeks | 2 | 1.07 | 1.03 | 1.12 | 0.93 | 0.96 |
| post | 3 | 0.92 | 1.05 | 1.14 | 0.95 | 1.18 |
| dosing | 4 | 1.05 | 0.86 | 0.91 | 0.99 | 0.98 |
| | 5 | 0.94 | 0.70 | 1.14 | 0.86 | 1.14 |
| | 6 | 0.87 | 0.78 | 1.02 | 0.78 | 0.83 |
| | Mean | 1.00 | 0.90 | 1.03 | 0.93 | 1.07 |
| 12 | 1 | 0.93 | 1.00 | 0.14 | 0.63 | 0.92 |
| weeks | 2 | 1.05 | 0.88 | 0.88 | 1.08 | 1.26 |
| post | 3 | 0.87 | 0.93 | 0.82 | 0.08 | 1.03 |
| dosing | 4 | 1.12 | 0.99 | 0.82 | 1.05 | N.D |
| | 5 | 0.96 | 1.02 | 0.94 | 1.12 | 1.06 |
| | 6 | 1.07 | 0.94 | 1.11 | 1.23 | 0.82 |
| | Mean | 1.00 | 0.96 | 0.78 | 0.87 | 1.02 |
| 16 | 1 | 0.92 | 0.90 | 1.19 | 0.90 | 0.82 |
| weeks | 2 | 0.94 | 0.83 | 1.10 | 0.98 | 1.30 |
| post | 3 | 0.95 | 0.58 | 0.77 | 0.82 | 1.15 |
| dosing | 4 | 0.98 | 0.94 | 0.87 | 0.96 | 0.81 |
| | 5 | N.D | 0.76 | 0.96 | 1.15 | 0.97 |
| | 6 | 1.20 | 1.16 | 1.01 | 1.09 | 1.02 |
| | Mean | 1.00 | 0.86 | 0.98 | 0.98 | 1.01 |

[1658] Table 126Q. Shows changes in mouse CALB1 mRNA relative to PBS control in the cerebellum 8 weeks, 12 weeks and 16 weeks post dosing. N=6. N.D.: Not determined.

| | | | DSR- | DSR- | DSR- | DSR- |
|---|---|---|---|---|---|---|
| | Animal | PBS | 0103432 | 0103299 | 0103300 | 0103301 |
| 8 | 1 | 1.29 | 1.01 | 0.96 | 1.10 | 1.75 |
| weeks | 2 | 0.98 | 0.98 | 1.30 | 1.00 | 0.84 |
| post | 3 | 0.92 | 1.30 | 1.06 | 1.34 | 1.29 |
| dosing | 4 | 0.75 | 1.47 | 0.98 | 1.50 | 0.66 |
| | 5 | 1.20 | 0.75 | 1.40 | 1.03 | 1.13 |
| | 6 | 0.87 | 1.32 | 1.07 | 0.96 | 0.56 |
| | Mean | 1.00 | 1.14 | 1.13 | 1.16 | 1.04 |
| 12 | 1 | 0.91 | 1.17 | 0.13 | 0.82 | 0.82 |
| weeks | 2 | 0.96 | 1.11 | 0.89 | 1.25 | 1.02 |
| post | 3 | 0.90 | 1.19 | 0.85 | 0.08 | 0.88 |
| dosing | 4 | 1.04 | 1.25 | 0.79 | 1.27 | N.D |
| | 5 | 1.03 | 1.10 | 1.08 | 1.27 | 0.88 |
| | 6 | 1.17 | 1.05 | 1.23 | 1.19 | 0.90 |
| | Mean | 1.00 | 1.14 | 0.83 | 0.98 | 0.90 |
| 16 | 1 | 0.94 | 1.71 | 1.33 | 1.32 | 0.82 |
| weeks | 2 | 0.94 | 1.49 | 1.21 | 1.56 | 1.27 |
| post | 3 | 0.99 | 0.85 | 0.76 | 1.06 | 1.11 |
| dosing | 4 | 1.11 | 1.27 | 1.06 | 1.31 | 0.77 |
| | 5 | N.D | 0.99 | 1.03 | 1.29 | 0.82 |
| | 6 | 1.01 | 1.37 | 1.00 | 1.12 | 1.10 |
| | Mean | 1.00 | 1.28 | 1.06 | 1.28 | 0.98 |

[1659] Table 126R. Shows changes in mouse serum NfL relative to PBS control 16 weeks post dosing. N=6. N.D.: Not determined.

| | | DSR- | DSR- | DSR- | DSR- |
|---|---|---|---|---|---|
| Animal | PBS | 0103432 | 0103299 | 0103300 | 0103301 |
| 1 | 930.4 | 532.9 | 1185.1 | 556.4 | 627.0 |
| 2 | 767.5 | 367.3 | 1346.2 | 673.8 | 199.5 |
| 3 | 579.9 | 1092.7 | 1277.4 | 461.4 | 1000.1 |
| 4 | 414.8 | 953.6 | 438.4 | 907.2 | 484.8 |
| 5 | N.D. | 697.4 | 1023.1 | 1069.5 | 603.6 |
| 6 | 720.7 | 391.1 | 462.2 | 790.1 | 391.1 |
| Mean | 682.7 | 672.5 | 955.4 | 743.1 | 551.0 |

### Provided Oligonucleotides and Compositions are Active In Situ

[1660] Various siRNAs for APP protein knockdown in brain tissues were designed and constructed. A number of siRNAs were tested in situ using an Immunohistochemistry (IHC) Assay. Example protocol for Immunohistochemistry Assay: Mouse brain hemisphere biopsies were fixed and embedded in paraffin as described above. 10 um sections were cut and followed by standard IHC staining methods using anti-APP Rabbit mAb #19389 (E3F3P) and isotype control Rabbit mAb #3900 (DA1E) (Cell Signaling Technology), followed by Polymer-HRP 2nd Detection antibody, and developed with DAB (brown) for 10 min and counterstained with hematoxylin (blue). The representative digital images were generated using a Zeiss Axio Observer microscope (Zeiss, Thornwood, NY, USA) under brightfield.

[1661] IHC results show potent and sustainable APP KD across all the different brain regions of interest, including Frontal Cx, Striatum, Hippocampus, Brain stem (MidBrain and Medulla) and Cerebellum, for up to 16 weeks after single ICV administration of siRNA. APP protein prominently expressed in Neuron cells in all key brain regions, and potent APP protein KD were observed in these Neuron cells. Although only detectable level of APP protein was seen in Oligodendrocytes, and very low or no detectable APP protein expression in Astrocytes and Microglia. Furthermore, no differences of APP knockdown were observed between two time-points of 12 weeks and 16 weeks for each individual siRNA compounds.

### Example 14. Provided Oligonucleotides and Compositions are Active In Vivo

[1662] All animal procedures were performed under IACUC guidelines. To evaluate the potency and liver exposure of provided oligonucleotides and compositions, male 8-10 weeks of age C57BL/6 mice were dose at 5 mg/kg on Day 0 by subcutaneous administration. Animals were euthanized on Day 14 or 28 by CO2 asphyxiation followed by thoracotomy and terminal blood collection. After cardiac perfusion with PBS, various tissue samples were harvested and flash-frozen in dry ice. Total RNA was extracted using RNeasy 96 kit (Qiagen), after tissue lysis with TRIzol and chloroform. cDNA production from RNA samples were performed using High-Capacity cDNA Reverse Transcription kit (Thermo Fisher) following manufacturer's instructions and qPCR analysis performed in CFX System using iQ Multiplex Powermix (Bio-Rad for mouse SOD1 mRNA, the following qPCR assay were utilized: mouse Sod1 from IDT (Integrated DNA Technologies) qPCR assay ID Mm.PT.58.12368303. Mouse HPRT was used as normalizer (Forward 5′CAAACTTTGCTTTCCCTGGTT3′, Reverse 5′TGGCCTGTATCCAACACTTC3′, Probe 5′/5HEX/ACCAGCAAG/Zen/CTTGCAACCTTAACC/3IABkFQ/3′. Oligonucleotide accumulation was determined by sandwich ELISA.

[1663] Table 127. shows % mouse SOD1 mRNA remaining relative to PBS control in the quad 14 days post dosing. N=5. N.D.: Not determined.

| | animal No. | | | | | |
|---|---|---|---|---|---|---|
| siRNA | 1 | 2 | 3 | 4 | 5 | Mean |
| PBS | 113.30 | 101.49 | 99.58 | 95.38 | 90.26 | 100.00 |
| DSR- | 81.53 | 85.53 | 92.84 | 76.08 | 78.33 | 82.86 |
| 0103301 | | | | | | |
| DSR- | 71.27 | 66.66 | 75.66 | 70.10 | 75.14 | 71.76 |
| 0103966 | | | | | | |
| DSR- | 63.81 | 65.26 | 58.77 | 59.10 | 61.60 | 61.71 |
| 0103967 | | | | | | |
| DSR- | 59.72 | 62.65 | 65.81 | 61.38 | 57.37 | 61.38 |
| 0103968 | | | | | | |
| DSR- | 42.78 | 53.38 | 46.17 | 61.90 | 56.02 | 52.05 |
| 0103969 | | | | | | |
| DSR- | 71.38 | 72.15 | 67.96 | 68.31 | 56.63 | 67.28 |
| 0103970 | | | | | | |
| DSR- | 60.24 | 56.92 | 61.07 | 65.48 | 56.70 | 60.08 |
| 0103971 | | | | | | |
| DSR- | 61.59 | 61.97 | 65.67 | 62.31 | 67.48 | 63.80 |
| 0103972 | | | | | | |
| DSR- | 73.24 | 77.14 | 82.19 | 79.50 | 76.85 | 77.78 |
| 0103973 | | | | | | |

[1664] Table 128. shows % mouse SOD1 mRNA remaining relative to PBS control in the liver 14 days post dosing. N=5. N.D.: Not determined.

| | animal No. | | | | | |
|---|---|---|---|---|---|---|
| siRNA | 1 | 2 | 3 | 4 | 5 | Mean |
| PBS | 99.87 | 105.72 | 94.66 | 107.34 | 92.41 | 100.00 |
| DSR- | 108.78 | 100.15 | 112.64 | 92.71 | 89.65 | 100.79 |
| 0103301 | | | | | | |
| DSR- | 92.95 | 82.34 | 75.88 | 63.38 | 50.96 | 73.10 |
| 0103966 | | | | | | |
| DSR- | 66.05 | 47.41 | 49.65 | 41.66 | 29.74 | 46.90 |
| 0103967 | | | | | | |
| DSR- | 80.98 | 57.11 | 60.94 | 50.65 | 33.93 | 56.72 |
| 0103968 | | | | | | |
| DSR- | 57.31 | 57.10 | 36.40 | 38.92 | 40.18 | 45.98 |
| 0103969 | | | | | | |
| DSR- | 89.18 | 70.46 | 85.49 | 44.57 | 59.49 | 69.84 |
| 0103970 | | | | | | |
| DSR- | 63.71 | 59.85 | 44.64 | 52.05 | 44.59 | 52.97 |
| 0103971 | | | | | | |
| DSR- | 41.51 | 49.36 | 49.34 | 46.58 | 41.21 | 45.60 |
| 0103972 | | | | | | |
| DSR- | 77.74 | 75.75 | 78.11 | 72.26 | 76.41 | 76.05 |
| 0103973 | | | | | | |

[1665] Table 129. shows % mouse SOD1 mRNA remaining relative to PBS control in the lung 14 days post dosing. N=5. N.D.: Not determined.

| | animal No. | | | | | |
|---|---|---|---|---|---|---|
| siRNA | 1 | 2 | 3 | 4 | 5 | Mean |
| PBS | 144.11 | 100.58 | 54.30 | 117.86 | 83.14 | 100.00 |
| DSR- | 111.07 | 65.80 | 93.41 | 103.28 | 99.48 | 94.61 |
| 0103301 | | | | | | |
| DSR- | 89.60 | 103.54 | 102.34 | 97.63 | 97.62 | 98.15 |
| 0103966 | | | | | | |
| DSR- | 127.70 | 82.95 | 74.17 | 100.48 | 68.01 | 90.66 |
| 0103967 | | | | | | |
| DSR- | 95.88 | 104.18 | 96.00 | 106.81 | 78.98 | 96.37 |
| 0103968 | | | | | | |
| DSR- | 71.26 | 86.56 | 75.25 | 86.95 | 90.04 | 82.01 |
| 0103969 | | | | | | |
| DSR- | 120.52 | 80.04 | 100.37 | 70.25 | 107.07 | 95.65 |
| 0103970 | | | | | | |
| DSR- | 127.88 | 106.71 | 85.71 | 125.39 | 87.48 | 106.64 |
| 0103971 | | | | | | |
| DSR- | 44.81 | 78.44 | 85.17 | 29.87 | 71.07 | 61.87 |
| 0103972 | | | | | | |
| DSR- | 80.77 | 90.34 | 92.41 | 71.71 | 75.12 | 82.07 |
| 0103973 | | | | | | |

[1666] Table 130. shows % mouse SOD1 mRNA remaining relative to PBS control in the white adipose tissue 14 days post dosing. N=5. N.D.: Not determined.

| | animal No. | | | | | |
|---|---|---|---|---|---|---|
| siRNA | 1 | 2 | 3 | 4 | 5 | Mean |
| PBS | 62.01 | 149.52 | 92.68 | 79.84 | 115.95 | 100.00 |
| DSR- | 119.78 | 137.31 | 105.19 | 74.89 | 118.17 | 111.07 |
| 0103301 | | | | | | |
| DSR- | 106.64 | 137.95 | 110.05 | 117.07 | 107.04 | 115.75 |
| 0103966 | | | | | | |
| DSR- | 69.85 | 99.61 | 63.45 | 81.87 | 88.47 | 80.65 |
| 0103967 | | | | | | |
| DSR- | 65.54 | 84.67 | 51.20 | 48.11 | 28.31 | 55.57 |
| 0103968 | | | | | | |
| DSR- | 8.87 | 22.79 | 18.96 | 25.58 | 30.18 | 21.27 |
| 0103969 | | | | | | |
| DSR- | 76.04 | 75.88 | 67.01 | 53.61 | 57.89 | 66.08 |
| 0103970 | | | | | | |
| DSR- | 32.94 | 26.87 | 51.32 | 36.73 | 45.84 | 38.74 |
| 0103971 | | | | | | |
| DSR- | 44.25 | 52.44 | 58.82 | 39.40 | 33.26 | 45.63 |
| 0103972 | | | | | | |
| DSR- | 70.48 | 93.79 | 45.42 | 57.55 | 53.03 | 64.05 |
| 0103973 | | | | | | |

[1667] Table 131. shows 0% mouse SOD1 mRNA remaining relative to PBS control in the diaphragm 14 days post dosing. N=5. N.D.: Not determined.

| | animal No. | | | | | |
|---|---|---|---|---|---|---|
| siRNA | 1 | 2 | 3 | 4 | 5 | Mean |
| PBS | 144.92 | 99.33 | 101.93 | 77.94 | 75.89 | 100.00 |
| DSR- | 71.24 | 109.36 | 91.45 | 90.45 | 89.24 | 90.35 |
| 0103301 | | | | | | |
| DSR- | 72.45 | 74.99 | 64.46 | 53.97 | 44.24 | 62.02 |
| 0103966 | | | | | | |
| DSR- | 51.69 | 49.49 | 45.69 | 61.79 | 54.62 | 52.66 |
| 0103967 | | | | | | |
| DSR- | 46.83 | 44.75 | 35.78 | 40.42 | 31.43 | 39.84 |
| 0103968 | | | | | | |
| DSR- | 41.18 | 66.70 | 23.14 | 33.42 | 50.21 | 42.93 |
| 0103969 | | | | | | |
| DSR- | 51.31 | 56.94 | 40.89 | 50.61 | 47.58 | 49.47 |
| 0103970 | | | | | | |
| DSR- | 46.69 | 45.35 | 44.82 | 47.79 | 53.08 | 47.54 |
| 0103971 | | | | | | |
| DSR- | 32.06 | 32.69 | 50.27 | 39.15 | 31.33 | 37.10 |
| 0103972 | | | | | | |
| DSR- | 61.49 | 82.46 | 64.69 | 55.92 | 55.05 | 63.92 |
| 0103973 | | | | | | |

[1668] Table 132. shows 00 mouse SOD1 mRNA remaining relative to PBS control in the kidney 14 days post dosing. N=5. N.D.: Not determined.

| | animal No. | | | | | |
|---|---|---|---|---|---|---|
| siRNA | 1 | 2 | 3 | 4 | 5 | Mean |
| PBS | 74.03 | 135.48 | 74.55 | 125.76 | 90.18 | 100.00 |
| DSR- | 153.76 | 117.75 | 160.86 | 141.15 | 157.42 | 146.19 |
| 0103301 | | | | | | |
| DSR- | 64.17 | 46.23 | 51.26 | 51.97 | 56.40 | 54.01 |
| 0103966 | | | | | | |
| DSR- | 72.54 | 72.16 | 73.68 | 55.02 | 65.81 | 67.84 |
| 0103967 | | | | | | |
| DSR- | 48.32 | 55.39 | 81.81 | 70.76 | 45.83 | 60.42 |
| 0103968 | | | | | | |
| DSR- | 48.05 | 67.41 | 46.72 | 46.74 | 65.31 | 54.85 |
| 0103969 | | | | | | |
| DSR- | 39.30 | 39.37 | 31.29 | 28.99 | 28.17 | 33.42 |
| 0103970 | | | | | | |
| DSR- | 48.38 | 54.30 | 47.44 | 47.42 | 48.37 | 49.18 |
| 0103971 | | | | | | |
| DSR- | 45.75 | 48.74 | 49.47 | 44.88 | 40.72 | 45.91 |
| 0103972 | | | | | | |
| DSR- | 56.97 | 58.43 | 62.70 | 58.76 | 62.54 | 59.88 |
| 0103973 | | | | | | |

[1669] Table 133. shows % mouse SOD1 mRNA remaining relative to PBS control in the heart 14 days post dosing. N=5. N.D.: Not determined.

| | animal No. | | | | | |
|---|---|---|---|---|---|---|
| siRNA | 1 | 2 | 3 | 4 | 5 | Mean |
| PBS | 91.79 | 89.69 | 117.44 | 96.54 | 104.55 | 100.00 |
| DSR- | 88.86 | 89.56 | 86.37 | 54.16 | 57.16 | 75.22 |
| 0103301 | | | | | | |
| DSR- | 83.51 | 86.09 | 75.36 | 93.07 | 92.15 | 86.04 |
| 0103966 | | | | | | |
| DSR- | 62.10 | 67.18 | 53.06 | 60.65 | 48.43 | 58.28 |
| 0103967 | | | | | | |
| DSR- | 46.27 | 61.16 | 48.35 | 48.72 | 33.29 | 47.56 |
| 0103968 | | | | | | |
| DSR- | 39.43 | 28.22 | 28.00 | 30.86 | 52.83 | 35.87 |
| 0103969 | | | | | | |
| DSR- | 59.02 | 50.14 | 43.80 | 47.55 | 48.31 | 49.76 |
| 0103970 | | | | | | |
| DSR- | 44.01 | 52.12 | 54.20 | 43.53 | 42.61 | 47.30 |
| 0103971 | | | | | | |
| DSR- | 40.97 | 41.53 | 41.05 | 33.81 | 34.29 | 38.33 |
| 0103972 | | | | | | |
| DSR- | 49.31 | 47.09 | 43.57 | 40.82 | 54.54 | 47.07 |
| 0103973 | | | | | | |

[1670] Table 134. shows % mouse SOD1 mRNA remaining relative to PBS control in the brown adipose tissue 14 days post dosing. N=5. N.D.: Not determined.

| | animal No. | | | | | |
|---|---|---|---|---|---|---|
| siRNA | 1 | 2 | 3 | 4 | 5 | Mean |
| PBS | 115.33 | 61.22 | 110.89 | 96.12 | 116.45 | 100.00 |
| DSR- | 87.99 | 107.63 | 100.08 | 95.56 | 84.66 | 95.18 |
| 0103301 | | | | | | |
| DSR- | 45.56 | 75.35 | 81.71 | 89.80 | 85.48 | 75.58 |
| 0103966 | | | | | | |
| DSR- | 66.17 | 19.37 | 52.57 | 60.09 | 44.20 | 48.48 |
| 0103967 | | | | | | |
| DSR- | 34.38 | 77.87 | 49.98 | 39.96 | 30.47 | 46.53 |
| 0103968 | | | | | | |
| DSR- | 22.80 | 30.54 | 28.58 | 33.18 | 41.67 | 31.35 |
| 0103969 | | | | | | |
| DSR- | 66.32 | 68.81 | 72.18 | 61.66 | 60.39 | 65.87 |
| 0103970 | | | | | | |
| DSR- | 45.50 | 77.53 | 70.70 | 48.28 | 50.06 | 58.41 |
| 0103971 | | | | | | |
| DSR- | 64.15 | 35.70 | 37.35 | 34.49 | 25.57 | 39.45 |
| 0103972 | | | | | | |
| DSR- | 17.71 | 18.62 | 14.44 | 19.55 | 16.60 | 17.38 |
| 0103973 | | | | | | |

[1671] Table 135. shows 0 mouse SOD1 mRNA remaining relative to PBS control in the sciatic nerve 14 days post dosing. N=5. N.D.: Not determined.

| | animal No. | | | | | |
|---|---|---|---|---|---|---|
| siRNA | 1 | 2 | 3 | 4 | 5 | Mean |
| PBS | 107.08 | 118.32 | 70.75 | 84.99 | 118.85 | 100.00 |
| DSR- | 64.26 | 53.99 | 54.35 | 74.62 | 58.95 | 61.23 |
| 0103301 | | | | | | |
| DSR- | 77.13 | 61.46 | 73.76 | 78.31 | 44.48 | 67.03 |
| 0103966 | | | | | | |
| DSR- | 52.63 | 87.92 | 88.42 | 48.29 | 123.15 | 80.08 |
| 0103967 | | | | | | |
| DSR- | 70.46 | 84.33 | 92.46 | 84.62 | 114.57 | 89.29 |
| 0103968 | | | | | | |
| DSR- | 72.02 | 72.06 | 83.91 | 74.07 | 93.48 | 79.11 |
| 0103969 | | | | | | |
| DSR- | 66.91 | 79.45 | 158.02 | 77.31 | 70.56 | 90.45 |
| 0103970 | | | | | | |
| DSR- | 58.28 | 84.77 | 81.38 | 82.78 | 66.61 | 74.77 |
| 0103971 | | | | | | |
| DSR- | 90.88 | 90.53 | 84.72 | 112.18 | 111.85 | 98.03 |
| 0103972 | | | | | | |
| DSR- | 93.07 | 87.41 | 71.50 | 126.02 | 93.91 | 94.38 |
| 0103973 | | | | | | |

[1672] Table 136. shows % mouse SOD1 mRNA remaining relative to PBS control in the kidney 28 days post dosing. N=5. N.D.: Not determined.

| | animal No. | | | | | |
|---|---|---|---|---|---|---|
| siRNA | 1 | 2 | 3 | 4 | 5 | Mean |
| PBS | 84.31 | 109.05 | 83.68 | 86.11 | 136.86 | 100.00 |
| DSR- | 108.99 | 80.43 | 89.94 | 76.17 | 77.62 | 86.63 |
| 0103301 | | | | | | |
| DSR- | 71.84 | 36.95 | 33.35 | 45.02 | 48.13 | 47.06 |
| 0103966 | | | | | | |
| DSR- | 57.45 | 47.72 | 61.47 | 52.38 | 44.79 | 52.76 |
| 0103967 | | | | | | |
| DSR- | 86.61 | 58.64 | 51.98 | 84.41 | 132.57 | 82.84 |
| 0103968 | | | | | | |
| DSR- | 35.54 | 46.64 | 52.21 | 48.39 | 48.21 | 46.20 |
| 0103969 | | | | | | |
| DSR- | 31.27 | 39.31 | 29.94 | 27.64 | 48.00 | 35.23 |
| 0103970 | | | | | | |
| DSR- | 32.86 | 41.89 | 38.76 | 45.97 | 38.74 | 39.64 |
| 0103971 | | | | | | |
| DSR- | 33.42 | 43.23 | 44.58 | 39.15 | 36.90 | 39.45 |
| 0103972 | | | | | | |
| DSR- | 46.37 | 64.79 | 103.57 | 42.23 | 50.00 | 61.39 |
| 0103973 | | | | | | |

[1673] Table 137. shows % mouse SOD1 mRNA remaining relative to PBS control in the liver 28 days post dosing. N=5. N.D.: Not determined.

| | animal No. | | | | | |
|---|---|---|---|---|---|---|
| siRNA | 1 | 2 | 3 | 4 | 5 | Mean |
| PBS | 144.45 | 85.98 | 122.11 | 79.00 | 68.47 | 100.00 |
| DSR- | 100.54 | 73.36 | 48.72 | 68.00 | 36.30 | 65.39 |
| 0103301 | | | | | | |
| DSR- | 95.02 | 68.33 | 51.90 | 33.43 | 28.66 | 55.47 |
| 0103966 | | | | | | |
| DSR- | 43.88 | N.D | 47.76 | 29.06 | 34.07 | 30.95 |
| 0103967 | | | | | | |
| DSR- | 48.97 | 51.65 | 42.01 | 29.62 | 62.28 | 46.91 |
| 0103968 | | | | | | |
| DSR- | 64.86 | 28.88 | 43.79 | 58.65 | 29.79 | 45.19 |
| 0103969 | | | | | | |
| DSR- | 105.47 | 63.17 | 36.19 | 47.94 | 113.20 | 73.20 |
| 0103970 | | | | | | |
| DSR- | 36.45 | 48.36 | 36.05 | 69.46 | 36.58 | 45.38 |
| 0103971 | | | | | | |
| DSR- | 16.03 | 23.57 | 15.49 | 33.22 | N.D | 17.66 |
| 0103972 | | | | | | |
| DSR- | 29.89 | 28.62 | 31.19 | 35.31 | 25.30 | 30.06 |
| 0103973 | | | | | | |

[1674] Table 138. shows % mouse SOD1 mRNA remaining relative to PBS control in the lung 28 days post dosing. N=5. N.D.: Not determined.

| | animal No. | | | | | |
|---|---|---|---|---|---|---|
| siRNA | 1 | 2 | 3 | 4 | 5 | Mean |
| PBS | 131.58 | 91.47 | 110.52 | 84.16 | 82.27 | 100.00 |
| DSR- | 123.81 | 118.74 | 120.00 | 103.64 | 119.99 | 117.24 |
| 0103301 | | | | | | |
| DSR- | 98.33 | 98.60 | 115.33 | 66.64 | 83.48 | 92.48 |
| 0103966 | | | | | | |
| DSR- | 69.92 | 84.41 | 94.34 | 118.71 | 66.82 | 86.84 |
| 0103967 | | | | | | |
| DSR- | 131.02 | 72.71 | 71.77 | 73.20 | 132.83 | 96.31 |
| 0103968 | | | | | | |
| DSR- | 131.78 | 113.43 | 91.18 | 91.31 | 60.40 | 97.62 |
| 0103969 | | | | | | |
| DSR- | 186.84 | 155.21 | 85.99 | 141.00 | 91.62 | 132.13 |
| 0103970 | | | | | | |
| DSR- | 279.94 | 220.40 | 174.03 | 173.51 | 151.51 | 199.88 |
| 0103971 | | | | | | |
| DSR- | 109.99 | 108.93 | 91.98 | 100.72 | 100.21 | 102.37 |
| 0103972 | | | | | | |
| DSR- | 88.64 | 69.07 | 85.09 | 70.41 | 94.20 | 81.48 |
| 0103973 | | | | | | |

[1675] Table 139. shows % mouse SOD1 mRNA remaining relative to PBS control in the white adipose tissue 28 days post dosing. N=5. N.D.: Not determined.

| | animal No. | | | | | |
|---|---|---|---|---|---|---|
| siRNA | 1 | 2 | 3 | 4 | 5 | Mean |
| PBS | 94.07 | 102.55 | 68.52 | 117.52 | 117.34 | 100.00 |
| DSR- | 125.24 | 170.45 | 112.01 | 186.45 | 173.61 | 153.55 |
| 0103301 | | | | | | |
| DSR- | 82.01 | 149.20 | 109.65 | 91.63 | 110.98 | 108.70 |
| 0103966 | | | | | | |
| DSR- | 91.09 | 93.73 | 87.28 | 53.31 | 81.97 | 81.48 |
| 0103967 | | | | | | |
| DSR- | 59.79 | 59.79 | 51.43 | 63.19 | 59.41 | 58.72 |
| 0103968 | | | | | | |
| DSR- | 28.52 | 99.87 | 26.45 | 29.90 | 25.19 | 41.98 |
| 0103969 | | | | | | |
| DSR- | 87.01 | 119.88 | 103.78 | 91.24 | 153.19 | 111.02 |
| 0103970 | | | | | | |
| DSR- | 79.54 | 112.65 | 100.26 | 66.54 | 98.24 | 91.45 |
| 0103971 | | | | | | |
| DSR- | 14.19 | 44.21 | 34.07 | 31.42 | 48.54 | 34.49 |
| 0103972 | | | | | | |
| DSR- | 87.60 | 93.56 | 99.00 | 131.83 | 118.41 | 106.08 |
| 0103973 | | | | | | |

[1676] Table 140. shows % mouse SOD1 mRNA remaining relative to PBS control in the brown adipose tissue 28 days post dosing. N=5. N.D.: Not determined.

| | animal No. | | | | | |
|---|---|---|---|---|---|---|
| siRNA | 1 | 2 | 3 | 4 | 5 | Mean |
| PBS | 106.11 | 93.51 | 85.87 | 110.31 | 104.20 | 100.00 |
| DSR- | 119.27 | 114.23 | 136.73 | 113.12 | 110.21 | 118.71 |
| 0103301 | | | | | | |
| DSR- | 76.10 | 81.39 | 54.23 | 68.75 | 64.02 | 68.90 |
| 0103966 | | | | | | |
| DSR- | 49.69 | 57.20 | 77.69 | 47.15 | 42.89 | 54.92 |
| 0103967 | | | | | | |
| DSR- | 46.00 | 47.95 | 34.80 | 39.24 | 55.35 | 44.67 |
| 0103968 | | | | | | |
| DSR- | 41.64 | 29.27 | 31.11 | 33.02 | 38.21 | 34.65 |
| 0103969 | | | | | | |
| DSR- | 90.01 | 74.38 | 67.29 | 52.89 | 56.31 | 68.17 |
| 0103970 | | | | | | |
| DSR- | 23.77 | 116.00 | 59.02 | 56.81 | 69.54 | 65.03 |
| 0103971 | | | | | | |
| DSR- | 38.11 | 50.34 | 37.78 | 31.89 | 46.08 | 40.84 |
| 0103972 | | | | | | |
| DSR- | 34.82 | 56.04 | 45.44 | 58.40 | 38.53 | 46.65 |
| 0103973 | | | | | | |

[1677] Table 141. shows % mouse SOD1 mRNA remaining relative to PBS control in the quad 28 days post dosing. N=5. N.D.: Not determined.

| | animal No. | | | | | |
|---|---|---|---|---|---|---|
| siRNA | 1 | 2 | 3 | 4 | 5 | Mean |
| PBS | 88.66 | 120.42 | 103.49 | 81.45 | 105.98 | 100.00 |
| DSR- | 96.11 | 114.54 | 102.34 | 121.09 | 104.74 | 107.76 |
| 0103301 | | | | | | |
| DSR- | 79.85 | 76.33 | 82.12 | 73.40 | 74.68 | 77.28 |
| 0103966 | | | | | | |
| DSR- | 73.59 | 75.45 | 57.53 | 71.99 | 63.18 | 68.35 |
| 0103967 | | | | | | |
| DSR- | 68.02 | 69.04 | 52.62 | 64.34 | 65.86 | 63.97 |
| 0103968 | | | | | | |
| DSR- | 56.00 | 61.96 | 50.33 | 50.52 | 50.30 | 53.82 |
| 0103969 | | | | | | |
| DSR- | 70.38 | 70.61 | 65.62 | 71.25 | 63.91 | 68.35 |
| 0103970 | | | | | | |
| DSR- | 66.26 | 68.94 | 68.27 | 64.51 | 59.40 | 65.48 |
| 0103971 | | | | | | |
| DSR- | 71.05 | 74.03 | 72.04 | 71.38 | 67.96 | 71.29 |
| 0103972 | | | | | | |
| DSR- | 97.33 | 96.61 | 86.43 | 100.79 | 85.05 | 93.24 |
| 0103973 | | | | | | |

[1678] Table 142. shows % mouse SOD1 mRNA remaining relative to PBS control in the diaphragm 28 days post dosing. N=5. N.D.: Not determined.

| | animal No. | | | | | |
|---|---|---|---|---|---|---|
| siRNA | 1 | 2 | 3 | 4 | 5 | Mean |
| PBS | 83.26 | 112.06 | 78.72 | 92.79 | 133.17 | 100.00 |
| DSR- | 62.33 | 76.97 | 70.93 | 78.78 | 100.03 | 77.81 |
| 0103301 | | | | | | |
| DSR- | 59.61 | 77.34 | 70.65 | 84.77 | 65.53 | 71.58 |
| 0103966 | | | | | | |
| DSR- | 87.58 | 64.29 | 58.83 | 57.11 | 66.80 | 66.92 |
| 0103967 | | | | | | |
| DSR- | 60.23 | 61.95 | 49.54 | 47.79 | 53.74 | 54.65 |
| 0103968 | | | | | | |
| DSR- | 49.18 | 62.02 | 69.92 | 48.91 | 46.98 | 55.40 |
| 0103969 | | | | | | |
| DSR- | 68.88 | 62.33 | 112.39 | 109.78 | 89.10 | 88.50 |
| 0103970 | | | | | | |
| DSR- | 58.38 | 78.39 | 84.39 | 76.11 | 73.13 | 74.08 |
| 0103971 | | | | | | |
| DSR- | 31.36 | 39.44 | 49.05 | 43.40 | 37.05 | 40.06 |
| 0103972 | | | | | | |
| DSR- | 74.04 | 76.44 | 71.23 | 75.46 | 80.24 | 75.48 |
| 0103973 | | | | | | |

[1679] Table 143. shows % mouse SOD1 mRNA remaining relative to PBS control in the nerve 28 days post dosing. N=5. N.D.: Not determined.

| | animal No. | | | | | |
|---|---|---|---|---|---|---|
| siRNA | 1 | 2 | 3 | 4 | 5 | Mean |
| PBS | 114.45 | 101.39 | 109.73 | 71.19 | 103.24 | 100.00 |
| DSR- | 140.20 | 49.68 | 94.50 | 124.83 | 160.04 | 113.85 |
| 0103301 | | | | | | |
| DSR- | 61.10 | 87.58 | 82.39 | 82.94 | 103.81 | 83.56 |
| 0103966 | | | | | | |
| DSR- | 176.57 | 101.67 | 108.07 | 83.77 | 137.56 | 121.53 |
| 0103967 | | | | | | |
| DSR- | 66.54 | 114.77 | 81.96 | 61.68 | 95.10 | 84.01 |
| 0103968 | | | | | | |
| DSR- | 39.54 | 64.27 | 66.82 | 128.64 | 104.96 | 80.85 |
| 0103969 | | | | | | |
| DSR- | 116.41 | 82.85 | 74.08 | 54.17 | 48.26 | 75.15 |
| 0103970 | | | | | | |
| DSR- | 117.84 | 103.90 | 67.49 | 117.58 | 84.41 | 98.24 |
| 0103971 | | | | | | |
| DSR- | 61.89 | 59.78 | 58.70 | 151.07 | 87.68 | 83.82 |
| 0103972 | | | | | | |
| DSR- | 114.05 | 214.60 | 87.80 | 285.22 | 132.29 | 166.79 |
| 0103973 | | | | | | |

[1680] Table 144. shows % mouse SOD1 mRNA remaining relative to PBS control in the heart 28 days post dosing. N=5. N.D.: Not determined.

| | animal No. | | | | | |
|---|---|---|---|---|---|---|
| siRNA | 1 | 2 | 3 | 4 | 5 | Mean |
| PBS | 166.90 | 69.60 | 70.84 | 68.86 | 123.80 | 100.00 |
| DSR- | 153.35 | 77.87 | 138.07 | 124.13 | 133.26 | 125.34 |
| 0103301 | | | | | | |
| DSR- | 141.58 | 118.97 | 64.38 | 103.39 | 84.04 | 102.47 |
| 0103966 | | | | | | |
| DSR- | 90.96 | 58.25 | 90.06 | 111.57 | 108.65 | 91.90 |
| 0103967 | | | | | | |
| DSR- | 103.28 | 43.46 | 64.24 | 39.05 | 40.87 | 58.18 |
| 0103968 | | | | | | |
| DSR- | 47.62 | 71.48 | 42.58 | 39.95 | 45.10 | 49.35 |
| 0103969 | | | | | | |
| DSR- | 66.54 | 64.13 | 64.72 | 56.31 | 57.79 | 61.90 |
| 0103970 | | | | | | |
| DSR- | 75.70 | 76.86 | 66.89 | 62.33 | 71.58 | 70.67 |
| 0103971 | | | | | | |
| DSR- | 48.01 | 57.20 | 51.45 | 44.47 | 46.92 | 49.61 |
| 0103972 | | | | | | |
| DSR- | 82.65 | 84.59 | 85.51 | 80.80 | 83.11 | 83.33 |
| 0103973 | | | | | | |

[1681] Table 145. shows the accumulation of antisense strand in the liver at 14 days and 28 days post dosing. N=5. N.D.: Not determined.

| | | animal No. | | | | | |
|---|---|---|---|---|---|---|---|
| | siRNA | 1 | 2 | 3 | 4 | 5 | Mean |
| 14 days | PBS | 0.00 | 0.00 | 0.00 | 0.00 | 0.00 | 0.00 |
| post | DSR- | 5.60 | 5.49 | 6.11 | N.D | 6.18 | 4.68 |
| dosing | 0103301 | | | | | | |
| | DSR- | 4.44 | 4.88 | 3.85 | 3.58 | 4.18 | 4.19 |
| | 0103966 | | | | | | |
| | DSR- | 6.12 | 8.59 | 7.32 | 7.15 | 7.77 | 7.39 |
| | 0103967 | | | | | | |
| | DSR- | 7.24 | 6.96 | 7.27 | 6.59 | 6.99 | 7.01 |
| | 0103968 | | | | | | |
| | DSR- | 6.48 | 6.65 | 7.15 | 6.56 | 8.35 | 7.03 |
| | 0103969 | | | | | | |
| | DSR- | 4.50 | 3.34 | 4.15 | 4.38 | 4.40 | 4.15 |
| | 0103970 | | | | | | |
| | DSR- | 6.69 | 6.67 | 6.88 | 6.51 | 8.64 | 7.08 |
| | 0103971 | | | | | | |
| | DSR- | 5.22 | 8.51 | 6.43 | 7.44 | 7.91 | 7.10 |
| | 0103972 | | | | | | |
| | DSR- | 5.64 | 6.13 | 5.04 | 5.94 | 4.99 | 5.55 |
| | 0103973 | | | | | | |
| 28 days | PBS | 0.00 | 0.00 | 0.00 | 0.00 | 0.00 | 0.00 |
| post | DSR- | 3.04 | 3.72 | 2.75 | 2.98 | 3.29 | 3.16 |
| dosing | 0103301 | | | | | | |
| | DSR- | 2.65 | 1.77 | 2.47 | 3.28 | 3.11 | 2.66 |
| | 0103966 | | | | | | |
| | DSR- | 3.91 | 4.31 | 4.17 | 4.66 | 5.28 | 4.47 |
| | 0103967 | | | | | | |
| | DSR- | 5.06 | 5.65 | 4.35 | 5.51 | 5.98 | 5.31 |
| | 0103968 | | | | | | |
| | DSR- | 4.51 | 5.99 | 4.92 | 4.94 | 7.19 | 5.51 |
| | 0103969 | | | | | | |
| | DSR- | 2.38 | 1.92 | 2.25 | 2.95 | 1.42 | 2.19 |
| | 0103970 | | | | | | |
| | DSR- | 4.53 | 5.84 | 4.77 | 6.31 | 8.37 | 5.96 |
| | 0103971 | | | | | | |
| | DSR- | 4.62 | 5.71 | 3.27 | 5.49 | 5.97 | 5.01 |
| | 0103972 | | | | | | |
| | DSR- | 1.90 | 2.82 | 3.73 | 2.94 | 6.15 | 3.51 |
| | 0103973 | | | | | | |

[1682] Table 146. shows the accumulation of antisense strand in the kidney at 14 days and 28 days post dosing. N=5. N.D.: Not determined.

| | | animal No. | | | | | |
|---|---|---|---|---|---|---|---|
| | siRNA | 1 | 2 | 3 | 4 | 5 | Mean |
| 14 days | PBS | 0.00 | 0.00 | 0.00 | 0.00 | 0.00 | 0.00 |
| post | DSR- | 3.47 | 4.22 | 3.91 | N.D | 4.56 | 3.23 |
| dosing | 0103301 | | | | | | |
| | DSR- | 7.71 | 7.52 | 7.67 | 8.30 | 7.75 | 7.79 |
| | 0103966 | | | | | | |
| | DSR- | 7.58 | 7.55 | 8.65 | 10.77 | 13.72 | 9.65 |
| | 0103967 | | | | | | |
| | DSR- | 1.81 | 1.57 | 2.62 | 2.09 | 2.73 | 2.17 |
| | 0103968 | | | | | | |
| | DSR- | 4.69 | 4.27 | 5.90 | 3.52 | 4.00 | 4.48 |
| | 0103969 | | | | | | |
| | DSR- | 7.35 | 6.96 | 11.60 | 18.41 | 13.33 | 11.53 |
| | 0103970 | | | | | | |
| | DSR- | 9.70 | 12.42 | 13.25 | 13.97 | 12.49 | 12.37 |
| | 0103971 | | | | | | |
| | DSR- | 1.80 | 3.35 | 2.09 | 2.48 | 2.99 | 2.54 |
| | 0103972 | | | | | | |
| | DSR- | 0.36 | 0.40 | 0.39 | 0.33 | 0.35 | 0.37 |
| | 0103973 | | | | | | |
| 28 days | PBS | 0.00 | 0.00 | 0.00 | 0.00 | 0.00 | 0.00 |
| post | DSR- | 2.40 | 2.20 | 2.35 | 2.03 | 2.17 | 2.23 |
| dosing | 0103301 | | | | | | |
| | DSR- | 3.47 | 6.05 | 5.40 | 4.99 | 4.09 | 4.80 |
| | 0103966 | | | | | | |
| | DSR- | 5.33 | 5.17 | 7.44 | 10.66 | 8.02 | 7.32 |
| | 0103967 | | | | | | |
| | DSR- | 1.84 | 2.16 | 2.05 | 2.06 | 2.39 | 2.10 |
| | 0103968 | | | | | | |
| | DSR- | 3.00 | 2.71 | 4.55 | 3.89 | 3.94 | 3.62 |
| | 0103969 | | | | | | |
| | DSR- | 3.88 | 4.35 | 3.84 | 3.72 | 4.89 | 4.14 |
| | 0103970 | | | | | | |
| | DSR- | 3.57 | 3.71 | 3.57 | 4.55 | 4.43 | 3.97 |
| | 0103971 | | | | | | |
| | DSR- | 2.04 | 1.32 | 1.62 | 1.86 | 1.66 | 1.70 |
| | 0103972 | | | | | | |
| | DSR- | 0.34 | 0.41 | 0.48 | 0.50 | 0.59 | 0.46 |
| | 0103973 | | | | | | |

[1683] Table 147. shows the accumulation of antisense strand in the lung at 14 days and 28 days post dosing. N=5. N.D.: Not determined.

| | | animal No. | | | | | |
|---|---|---|---|---|---|---|---|
| | siRNA | 1 | 2 | 3 | 4 | 5 | Mean |
| 14 days | PBS | 0.00 | 0.00 | 0.00 | 0.00 | 0.00 | 0.00 |
| post | DSR- | 0.13 | 0.22 | 0.19 | 0.01 | 0.16 | 0.14 |
| dosing | 0103301 | | | | | | |
| | DSR- | 0.37 | 0.36 | 0.14 | 0.20 | 0.21 | 0.26 |
| | 0103966 | | | | | | |
| | DSR- | 0.24 | 0.36 | 0.46 | 0.45 | 0.35 | 0.37 |
| | 0103967 | | | | | | |
| | DSR- | 0.22 | 0.17 | 0.20 | 0.26 | 0.20 | 0.21 |
| | 0103968 | | | | | | |
| | DSR- | 0.37 | 0.50 | 0.60 | 0.30 | 0.42 | 0.44 |
| | 0103969 | | | | | | |
| | DSR- | 0.27 | 0.24 | 0.22 | 0.27 | 0.33 | 0.27 |
| | 0103970 | | | | | | |
| | DSR- | 0.24 | 0.33 | 0.39 | 0.30 | 0.25 | 0.30 |
| | 0103971 | | | | | | |
| | DSR- | 0.28 | 0.35 | 0.32 | 0.31 | 0.36 | 0.32 |
| | 0103972 | | | | | | |
| | DSR- | 0.10 | 0.17 | 0.07 | 0.19 | 0.10 | 0.13 |
| | 0103973 | | | | | | |
| 28 days | PBS | 0.00 | 0.00 | 0.00 | 0.00 | 0.00 | 0.00 |
| post | DSR- | 0.16 | 0.13 | 0.07 | 0.07 | 0.13 | 0.11 |
| dosing | 0103301 | | | | | | |
| | DSR- | 0.08 | 0.10 | 0.10 | 0.10 | 0.09 | 0.09 |
| | 0103966 | | | | | | |
| | DSR- | 0.11 | 0.15 | 0.20 | 0.13 | 0.20 | 0.16 |
| | 0103967 | | | | | | |
| | DSR- | 0.15 | 0.15 | 0.15 | 0.21 | 0.20 | 0.17 |
| | 0103968 | | | | | | |
| | DSR- | 0.27 | 0.24 | 0.35 | 0.39 | 0.32 | 0.31 |
| | 0103969 | | | | | | |
| | DSR- | 0.07 | 0.09 | 0.09 | 0.07 | 0.14 | 0.09 |
| | 0103970 | | | | | | |
| | DSR- | 0.14 | 0.12 | 0.18 | 0.17 | 0.16 | 0.15 |
| | 0103971 | | | | | | |
| | DSR- | 0.18 | 0.08 | 0.14 | 0.17 | 0.16 | 0.15 |
| | 0103972 | | | | | | |
| | DSR- | 0.05 | 0.05 | 0.04 | 0.04 | 0.07 | 0.05 |
| | 0103973 | | | | | | |

[1684] Table 148. shows the accumulation of antisense strand in the heart at 14 days and 28 days post dosing. N=5. N.D.: Not determined.

| | | animal No. | | | | | |
|---|---|---|---|---|---|---|---|
| | siRNA | 1 | 2 | 3 | 4 | 5 | Mean |
| 14 days | PBS | 0.00 | 0.00 | 0.00 | 0.00 | 0.00 | 0.00 |
| post | DSR- | 0.30 | 0.46 | 0.37 | N.D | 0.34 | 0.30 |
| dosing | 0103301 | | | | | | |
| | DSR- | 0.20 | 0.23 | 0.24 | 0.20 | 0.21 | 0.20 |
| | 0103966 | | | | | | |
| | DSR- | 0.17 | 0.24 | 0.25 | 0.28 | 0.32 | 0.17 |
| | 0103967 | | | | | | |
| | DSR- | 0.20 | 0.16 | 0.33 | 0.21 | 0.27 | 0.20 |
| | 0103968 | | | | | | |
| | DSR- | 0.34 | 0.29 | 0.37 | 0.25 | 0.26 | 0.34 |
| | 0103969 | | | | | | |
| | DSR- | 0.33 | 0.30 | 0.35 | 0.50 | 0.31 | 0.33 |
| | 0103970 | | | | | | |
| | DSR- | 0.50 | 0.44 | 0.67 | 0.48 | 0.40 | 0.50 |
| | 0103971 | | | | | | |
| | DSR- | 0.28 | 0.37 | 0.35 | 0.26 | 0.38 | 0.28 |
| | 0103972 | | | | | | |
| | DSR- | 0.07 | 0.09 | 0.06 | 0.09 | 0.08 | 0.07 |
| | 0103973 | | | | | | |
| 28 days | PBS | 0.00 | 0.00 | 0.00 | 0.00 | 0.00 | 0.00 |
| post | DSR- | 0.23 | 0.22 | 0.19 | 0.21 | 0.24 | 0.22 |
| dosing | 0103301 | | | | | | |
| | DSR- | 0.16 | 0.25 | 0.26 | 0.18 | 0.21 | 0.21 |
| | 0103966 | | | | | | |
| | DSR- | 0.22 | 0.23 | 0.27 | 0.27 | 0.26 | 0.25 |
| | 0103967 | | | | | | |
| | DSR- | 0.27 | 0.23 | 0.19 | 0.37 | 0.37 | 0.29 |
| | 0103968 | | | | | | |
| | DSR- | 0.26 | 0.22 | 0.25 | 0.28 | 0.46 | 0.29 |
| | 0103969 | | | | | | |
| | DSR- | 0.18 | 0.11 | 0.16 | 0.19 | 0.18 | 0.16 |
| | 0103970 | | | | | | |
| | DSR- | 0.23 | 0.17 | 0.25 | 0.31 | 0.30 | 0.25 |
| | 0103971 | | | | | | |
| | DSR- | 0.21 | 0.21 | 0.32 | 0.24 | 0.25 | 0.25 |
| | 0103972 | | | | | | |
| | DSR- | 0.03 | 0.04 | 0.04 | 0.04 | 0.14 | 0.06 |
| | 0103973 | | | | | | |

[1685] Table 149. shows the accumulation of antisense strand in the diaphragm at 14 days and 28 days post dosing. N=5. N.D.: Not determined.

| | | animal No. | | | | | |
|---|---|---|---|---|---|---|---|
| | siRNA | 1 | 2 | 3 | 4 | 5 | Mean |
| 14 days | PBS | 0.00 | 0.00 | 0.00 | 0.00 | 0.00 | 0.00 |
| post | DSR- | 0.17 | 0.28 | 0.19 | N.D | 0.19 | 0.17 |
| dosing | 0103301 | | | | | | |
| | DSR- | 0.34 | 0.23 | 0.14 | 0.13 | 0.15 | 0.20 |
| | 0103966 | | | | | | |
| | DSR- | 0.63 | 0.83 | 0.57 | 2.23 | 0.35 | 0.92 |
| | 0103967 | | | | | | |
| | DSR- | 0.15 | 0.09 | 0.16 | 0.10 | 0.16 | 0.13 |
| | 0103968 | | | | | | |
| | DSR- | 0.34 | 0.29 | 1.15 | 0.15 | 0.45 | 0.48 |
| | 0103969 | | | | | | |
| | DSR- | 0.16 | 0.11 | 0.22 | 0.21 | 0.18 | 0.18 |
| | 0103970 | | | | | | |
| | DSR- | 0.29 | 0.31 | 0.27 | 0.25 | 0.18 | 0.26 |
| | 0103971 | | | | | | |
| | DSR- | 0.18 | 0.19 | 0.17 | 0.19 | 0.17 | 0.18 |
| | 0103972 | | | | | | |
| | DSR- | 0.25 | 0.12 | 0.80 | 0.05 | 0.16 | 0.28 |
| | 0103973 | | | | | | |
| 28 days | PBS | 0.00 | 0.00 | 0.00 | 0.00 | 0.00 | 0.00 |
| post | DSR- | 0.08 | 0.06 | 0.07 | 0.07 | 0.10 | 0.07 |
| dosing | 0103301 | | | | | | |
| | DSR- | 0.10 | 0.13 | 0.11 | 0.19 | 0.12 | 0.13 |
| | 0103966 | | | | | | |
| | DSR- | 0.09 | 0.09 | 0.11 | 0.07 | 0.11 | 0.09 |
| | 0103967 | | | | | | |
| | DSR- | 0.14 | 0.07 | 0.06 | 0.14 | 0.10 | 0.10 |
| | 0103968 | | | | | | |
| | DSR- | 0.15 | 0.30 | 0.17 | 0.09 | 0.12 | 0.17 |
| | 0103969 | | | | | | |
| | DSR- | 0.07 | 0.11 | 0.10 | 0.56 | 0.10 | 0.19 |
| | 0103970 | | | | | | |
| | DSR- | 0.16 | 0.28 | 0.35 | 0.20 | 0.14 | 0.23 |
| | 0103971 | | | | | | |
| | DSR- | 0.33 | 0.11 | 0.13 | 0.07 | 0.13 | 0.16 |
| | 0103972 | | | | | | |
| | DSR- | 0.02 | 0.02 | 0.02 | 0.02 | 0.03 | 0.02 |
| | 0103973 | | | | | | |

[1686] Table 150. shows the accumulation of antisense strand in the quad at 14 days and 28 days post dosing. N=5. N.D.: Not determined.

| | | animal No. | | | | | |
|---|---|---|---|---|---|---|---|
| | siRNA | 1 | 2 | 3 | 4 | 5 | Mean |
| 14 days | PBS | 0.00 | 0.00 | 0.00 | 0.00 | 0.00 | 0.00 |
| post | DSR- | 0.12 | 0.25 | 0.11 | 0.01 | 0.14 | 0.13 |
| dosing | 0103301 | | | | | | |
| | DSR- | 0.13 | 0.15 | 0.21 | 0.10 | 0.10 | 0.14 |
| | 0103966 | | | | | | |
| | DSR- | 0.10 | 0.11 | 0.20 | 0.12 | 0.15 | 0.14 |
| | 0103967 | | | | | | |
| | DSR- | 0.08 | 0.05 | 0.06 | 0.06 | 0.07 | 0.06 |
| | 0103968 | | | | | | |
| | DSR- | 0.13 | 0.09 | 0.09 | 0.07 | 0.08 | 0.09 |
| | 0103969 | | | | | | |
| | DSR- | 0.13 | 0.10 | 0.17 | 0.17 | 0.11 | 0.14 |
| | 0103970 | | | | | | |
| | DSR- | 0.14 | 0.12 | 0.19 | 0.10 | 0.17 | 0.15 |
| | 0103971 | | | | | | |
| | DSR- | 0.07 | 0.09 | 0.05 | 0.09 | 0.60 | 0.18 |
| | 0103972 | | | | | | |
| | DSR- | 0.01 | 0.01 | 0.01 | 0.02 | 0.01 | 0.01 |
| | 0103973 | | | | | | |
| 28 days | PBS | 0.00 | 0.00 | 0.00 | 0.00 | 0.00 | 0.00 |
| post | DSR- | 0.09 | 0.06 | 0.05 | 0.06 | 0.07 | 0.06 |
| dosing | 0103301 | | | | | | |
| | DSR- | 0.12 | 0.09 | 0.11 | 0.12 | 0.07 | 0.10 |
| | 0103966 | | | | | | |
| | DSR- | 0.07 | 0.07 | 0.08 | 0.08 | 0.09 | 0.08 |
| | 0103967 | | | | | | |
| | DSR- | 0.04 | 0.04 | 0.05 | 0.06 | 0.13 | 0.06 |
| | 0103968 | | | | | | |
| | DSR- | 0.05 | 0.04 | 0.07 | 0.03 | 0.07 | 0.05 |
| | 0103969 | | | | | | |
| | DSR- | 0.09 | 0.11 | 0.15 | 0.14 | 0.22 | 0.14 |
| | 0103970 | | | | | | |
| | DSR- | 0.07 | 0.10 | 0.09 | 0.09 | 0.11 | 0.09 |
| | 0103971 | | | | | | |
| | DSR- | 0.10 | 0.05 | 0.03 | 0.05 | 0.09 | 0.07 |
| | 0103972 | | | | | | |
| | DSR- | 0.01 | 0.01 | 0.00 | 0.01 | 0.00 | 0.01 |
| | 0103973 | | | | | | |

[1687] Table 151. shows the accumulation of antisense strand in the white adipose at 14 days and 28 days post dosing. N=5. N.D.: Not determined.

| | | animal No. | | | | | |
|---|---|---|---|---|---|---|---|
| | siRNA | 1 | 2 | 3 | 4 | 5 | Mean |
| 14 days | PBS | 0.00 | 0.00 | 0.00 | 0.00 | 0.00 | 0.00 |
| post | DSR- | 0.06 | 0.11 | 0.09 | 0.01 | 0.10 | 0.07 |
| dosing | 0103301 | | | | | | |
| | DSR- | 0.08 | 0.10 | 0.07 | 0.05 | 0.04 | 0.07 |
| | 0103966 | | | | | | |
| | DSR- | 0.12 | 0.29 | 0.11 | 0.10 | 0.12 | 0.15 |
| | 0103967 | | | | | | |
| | DSR- | 0.10 | 0.06 | 0.12 | 0.07 | 0.08 | 0.09 |
| | 0103968 | | | | | | |
| | DSR- | 0.15 | 0.11 | 0.22 | 0.10 | 0.09 | 0.13 |
| | 0103969 | | | | | | |
| | DSR- | 0.13 | 0.08 | 0.08 | 0.14 | 0.10 | 0.11 |
| | 0103970 | | | | | | |
| | DSR- | 0.13 | 0.06 | 0.13 | 0.08 | 0.12 | 0.10 |
| | 0103971 | | | | | | |
| | DSR- | 0.15 | 0.12 | 0.09 | 0.10 | 0.11 | 0.11 |
| | 0103972 | | | | | | |
| | DSR- | 0.03 | 0.03 | 0.02 | 0.03 | 0.02 | 0.03 |
| | 0103973 | | | | | | |
| 28 days | PBS | 0.00 | 0.00 | 0.00 | 0.00 | 0.00 | 0.00 |
| post | DSR- | 0.03 | 0.02 | 0.02 | 0.02 | 0.04 | 0.03 |
| dosing | 0103301 | | | | | | |
| | DSR- | 0.02 | 0.02 | 0.03 | 0.02 | 0.02 | 0.02 |
| | 0103966 | | | | | | |
| | DSR- | 0.04 | 0.05 | 0.06 | 0.05 | 0.05 | 0.05 |
| | 0103967 | | | | | | |
| | DSR- | 0.07 | 0.07 | 0.04 | 0.09 | 0.05 | 0.06 |
| | 0103968 | | | | | | |
| | DSR- | 0.12 | 0.11 | 0.15 | 0.07 | 0.16 | 0.12 |
| | 0103969 | | | | | | |
| | DSR- | 0.02 | 0.02 | 0.02 | 0.04 | 0.04 | 0.03 |
| | 0103970 | | | | | | |
| | DSR- | 0.05 | 0.06 | 0.05 | 0.03 | 0.06 | 0.05 |
| | 0103971 | | | | | | |
| | DSR- | 0.07 | 0.05 | 0.10 | 0.06 | 0.08 | 0.07 |
| | 0103972 | | | | | | |
| | DSR- | 0.02 | 0.02 | 0.02 | 0.01 | 0.05 | 0.02 |
| | 0103973 | | | | | | |

[1688] Table 152. shows the accumulation of antisense strand in the brown adipose at 14 days and 28 days post dosing. N=5. N.D.: Not determined.

| | | animal No. | | | | | |
|---|---|---|---|---|---|---|---|
| | siRNA | 1 | 2 | 3 | 4 | 5 | Mean |
| 14 days | PBS | 0.00 | 0.00 | 0.00 | 0.00 | 0.00 | 0.00 |
| post | DSR- | 0.45 | 1.34 | 1.86 | 0.01 | 0.83 | 0.90 |
| dosing | 0103301 | | | | | | |
| | DSR- | 0.34 | 0.90 | 1.04 | 0.52 | 0.97 | 0.75 |
| | 0103966 | | | | | | |
| | DSR- | 1.02 | 0.38 | 1.62 | 1.61 | 1.31 | 1.19 |
| | 0103967 | | | | | | |
| | DSR- | 0.96 | 1.05 | 1.26 | 0.79 | 0.86 | 0.98 |
| | 0103968 | | | | | | |
| | DSR- | 1.99 | 1.72 | 1.51 | 0.40 | 0.29 | 1.18 |
| | 0103969 | | | | | | |
| | DSR- | 1.06 | 0.10 | 0.90 | 0.51 | 0.29 | 0.57 |
| | 0103970 | | | | | | |
| | DSR- | 0.91 | 0.97 | 2.84 | 1.03 | 1.72 | 1.49 |
| | 0103971 | | | | | | |
| | DSR- | 1.78 | 1.97 | 2.02 | 2.48 | 1.50 | 1.95 |
| | 0103972 | | | | | | |
| | DSR- | 2.98 | 4.58 | 4.06 | 2.80 | 2.79 | 3.44 |
| | 0103973 | | | | | | |
| 28 days | PBS | 0.00 | 0.00 | 0.00 | 0.00 | 0.00 | 0.00 |
| post | DSR- | 0.45 | 0.63 | 0.55 | 0.98 | 0.26 | 0.57 |
| dosing | 0103301 | | | | | | |
| | DSR- | 0.80 | 0.54 | 0.34 | 0.67 | 1.10 | 0.69 |
| | 0103966 | | | | | | |
| | DSR- | 0.62 | 0.49 | 0.96 | 1.96 | 1.13 | 1.03 |
| | 0103967 | | | | | | |
| | DSR- | 1.16 | 2.00 | 0.81 | 2.98 | 1.13 | 1.62 |
| | 0103968 | | | | | | |
| | DSR- | 1.50 | 2.66 | 5.19 | 2.11 | 1.55 | 2.60 |
| | 0103969 | | | | | | |
| | DSR- | 0.38 | 0.36 | 0.48 | 1.37 | 0.55 | 0.63 |
| | 0103970 | | | | | | |
| | DSR- | 0.68 | 0.12 | 1.19 | 0.67 | 1.07 | 0.75 |
| | 0103971 | | | | | | |
| | DSR- | 1.68 | 1.65 | 1.69 | 1.09 | 0.97 | 1.42 |
| | 0103972 | | | | | | |
| | DSR- | 2.18 | 1.81 | 2.14 | 2.29 | 2.89 | 2.26 |
| | 0103973 | | | | | | |

[1689] Table 153. shows the accumulation of antisense strand in the sciatic nerve at 14 days and 28 days post dosing. N=5. N.D.: Not determined.

| | | animal No. | | | | | |
|---|---|---|---|---|---|---|---|
| | siRNA | 1 | 2 | 3 | 4 | 5 | Mean |
| 14 days | PBS | 0.00 | 0.00 | 0.00 | 0.00 | 0.00 | 0.00 |
| post | DSR- | 0.06 | 0.08 | 0.10 | 0.00 | 0.09 | 0.07 |
| dosing | 0103301 | | | | | | |
| | DSR- | 0.10 | 0.05 | 0.05 | 0.06 | 0.04 | 0.06 |
| | 0103966 | | | | | | |
| | DSR- | 0.04 | 0.05 | 0.06 | 0.03 | 0.09 | 0.05 |
| | 0103967 | | | | | | |
| | DSR- | 0.02 | 0.02 | 0.00 | 0.01 | 0.05 | 0.02 |
| | 0103968 | | | | | | |
| | DSR- | 0.07 | 0.04 | 0.03 | 0.03 | 0.03 | 0.04 |
| | 0103969 | | | | | | |
| | DSR- | 0.09 | 0.06 | 0.12 | 0.05 | 0.10 | 0.09 |
| | 0103970 | | | | | | |
| | DSR- | 0.08 | 0.14 | 0.06 | 0.03 | 0.05 | 0.07 |
| | 0103971 | | | | | | |
| | DSR- | 0.03 | 0.03 | 0.01 | 0.03 | 0.00 | 0.02 |
| | 0103972 | | | | | | |
| | DSR- | 0.02 | 0.00 | 0.00 | 0.00 | 0.00 | 0.00 |
| | 0103973 | | | | | | |
| 28 days | PBS | 0.00 | 0.00 | 0.00 | 0.00 | 0.00 | 0.00 |
| post | DSR- | 0.11 | 0.02 | 0.06 | 0.03 | 0.04 | 0.05 |
| dosing | 0103301 | | | | | | |
| | DSR- | 0.06 | 0.06 | 0.06 | 0.04 | 0.03 | 0.05 |
| | 0103966 | | | | | | |
| | DSR- | 0.03 | 0.07 | 0.03 | 0.03 | 0.05 | 0.04 |
| | 0103967 | | | | | | |
| | DSR- | 0.00 | 0.01 | 0.00 | 0.00 | 0.02 | 0.01 |
| | 0103968 | | | | | | |
| | DSR- | 0.00 | 0.01 | 0.00 | 0.01 | 0.00 | 0.01 |
| | 0103969 | | | | | | |
| | DSR- | 0.07 | 0.00 | 0.02 | 0.03 | 0.03 | 0.03 |
| | 0103970 | | | | | | |
| | DSR- | 0.05 | 0.03 | 0.01 | 0.03 | 0.02 | 0.03 |
| | 0103971 | | | | | | |
| | DSR- | 0.04 | 0.00 | 0.03 | 0.00 | 0.00 | 0.01 |
| | 0103972 | | | | | | |
| | DSR- | 0.00 | 0.00 | 0.00 | 0.00 | 0.00 | 0.00 |
| | 0103973 | | | | | | |

### Example 15. Provided Oligonucleotides and Compositions are Active In Vivo

[1690] All animal procedures were performed under IACUC guidelines. To evaluate the potency and liver exposure of provided oligonucleotides and compositions, male 8-10 weeks of age C57B3L/6 mice were dose at 5 mg/kg on Day 0 by subcutaneous administration. Animals were euthanized on Day 14 or 28 by CO2 asphyxiation followed by thoracotomy and terminal blood collection. After cardiac perfusion with PBS, various tissue samples were harvested and flash-frozen in dry ice. Total RNA was extracted using RNeasy 96 kit (Qiagen), after tissue lysis with TRIzol and chloroform. cDNA production from RNA samples were performed using High-Capacity cDNA Reverse Transcription kit (Thermo Fisher) following manufacturer's instructions and qPCR analysis performed in CFX System using iQ Multiplex Powermix (Bio-Rad for mouse APP mRNA, the following qPCR assay were utilized: mouse Sodl from IDT (Integrated DNA Technologies) qPCR assay ID Mm.PT.58.12368303. Mouse HPRT was used as normalizer (Forward 5′CAAACTTTGCTTTCCCTGGTT3′, Reverse 5′TGGCCTGTATCCAACACTTC3′, Probe 5′/5HEX/ACCAGCAAG/Zen/CTTGCAACCTTAACC/3IABkFQ/3′. Oligonucleotide accumulation was determined by sandwich ELISA.

[1691] Ago2 immunoprecipitation assay: Tissues were lysed in lysis buffer 50 mM Tris-HCl at pH 7.5, 200 mM NaCl, 0.5% Triton X-100, 2 mM EDTA, 1 mg/mL heparin) with protease inhibitor (Sigma-Aldrich). Lysate concentration was measured with a protein BCA kit (Pierce BCA protein assay kit or Bradford protein assay kit). Anti-Ago2 antibody was purchased from Wako Chemicals. Control mouse IgG was from eBioscience. Dynabeads (Invitrogen) were used to precipitate antibodies. Ago2-associated siRNA and endogenous miR122 were measured by Stem-Loop RT followed by TaqMan PCR analysis using Taqman miRNA and siRNA assay kit (Thermo fisher) based on manufacturer's methods.

[1692] Table 154. shows % mouse SOD1 mRNA remaining relative to PBS control in the quad 14 days post dosing. N=5. N.D.: Not determined.

% remaining of mSOD1 mRNA

| animal No. | PBS | DSR-0103969 | DSR-0104104 |
|---|---|---|---|
| 1 | 102.02 | 70.94 | 45.51 |
| 2 | 101.90 | 65.75 | 59.63 |
| 3 | 106.40 | 72.98 | 55.69 |
| 4 | 99.32 | 63.28 | 59.28 |
| 5 | 90.35 | 53.74 | 47.60 |
| Mean | 100.00 | 65.34 | 53.54 |

[1693] Table 155. shows % mouse SOD1 mRNA remaining relative to PBS control in the kidney 14 days post dosing. N=5. N.D.: Not determined.

% remaining of mSOD1 mRNA

| animal No. | PBS | DSR-0103969 | DSR-0104104 |
|---|---|---|---|
| 1 | 90.31 | 63.51 | 41.29 |
| 2 | 105.37 | 49.18 | 33.09 |
| 3 | 89.30 | 72.60 | 35.85 |
| 4 | 124.38 | 51.75 | 35.86 |
| 5 | 90.64 | 69.82 | 33.42 |
| Mean | 100.00 | 61.37 | 35.90 |

[1694] Table 156. shows % mouse SOD1 mRNA remaining relative to PBS control in the liver 14 days post dosing. N=5. N.D.: Not determined.

% remaining of mSOD1 mRNA

| animal No. | PBS | DSR-0103969 | DSR-0104104 |
|---|---|---|---|
| 1 | 97.47 | 35.94 | 10.38 |
| 2 | 99.35 | 30.93 | 14.89 |
| 3 | 93.07 | 36.56 | 13.13 |
| 4 | 105.18 | 25.63 | 13.04 |
| 5 | 104.92 | 32.74 | 10.78 |
| Mean | 100.00 | 32.36 | 12.45 |

[1695] Table 157. shows % mouse SOD1 mRNA remaining relative to PBS control in the heart 14 days post dosing. N=5. N.D.: Not determined.

% remaining of mSOD1 mRNA

| animal No. | PBS | DSR-0103969 | DSR-0104104 |
|---|---|---|---|
| 1 | 133.88 | 36.44 | 12.29 |
| 2 | 73.22 | 34.16 | 17.01 |
| 3 | 118.66 | 55.04 | 25.54 |
| 4 | 73.57 | 42.10 | 27.69 |
| 5 | 100.67 | 41.99 | 16.11 |
| Mean | 100.00 | 41.95 | 19.73 |

[1696] Table 158. shows % mouse SOD1 mRNA remaining relative to PBS control in the lung 14 days post dosing. N=5. N.D.: Not determined.

% remaining of mSOD1 mRNA

| animal No. | PBS | DSR-0103969 | DSR-0104104 |
|---|---|---|---|
| 1 | 111.31 | 93.91 | 77.56 |
| 2 | 103.46 | 79.21 | 53.76 |
| 3 | 105.29 | 96.75 | 58.84 |
| 4 | 92.42 | 92.80 | 82.50 |
| 5 | 87.53 | 100.69 | 70.26 |
| Mean | 100.00 | 92.67 | 68.59 |

[1697] Table 159. shows % mouse SOD1 mRNA remaining relative to PBS control in the brown adipose tissue 14 days post dosing. N=5. N.D.: Not determined.

% remaining of mSOD1 mRNA

| animal No. | PBS | DSR-0103969 | DSR-0104104 |
|---|---|---|---|
| 1 | 93.39 | 39.84 | 31.66 |
| 2 | 105.89 | 53.20 | 22.30 |
| 3 | 93.48 | 38.48 | 30.02 |
| 4 | 117.69 | 42.93 | 13.55 |
| 5 | 89.55 | 38.53 | 10.96 |
| Mean | 100.00 | 42.60 | 21.70 |

[1698] Table 160. shows % mouse SOD1 mRNA remaining relative to PBS control in the white adipose tissue 14 days post dosing. N=5. N.D.: Not determined.

% remaining of mSOD1 mRNA

| animal No. | PBS | DSR-0103969 | DSR-0104104 |
|---|---|---|---|
| 1 | 120.40 | 30.58 | 13.10 |
| 2 | 93.83 | 28.11 | 63.67 |
| 3 | 106.73 | 43.07 | 16.18 |
| 4 | 95.02 | 30.94 | 13.59 |
| 5 | 84.02 | 40.94 | 16.89 |
| Mean | 100.00 | 34.73 | 24.69 |

[1699] Table 161. shows % mouse SOD1 mRNA remaining relative to PBS control in the sciatic nerve 14 days post dosing. N=5. N.D. Not determined.

% remaining of mSOD1 mRNA

| animal No. | PBS | DSR-0103969 | DSR-0104104 |
|---|---|---|---|
| 1 | 94.08 | 155.52 | 104.44 |
| 2 | 97.98 | 126.78 | 98.92 |
| 3 | 90.62 | 95.06 | 120.87 |
| 4 | 108.16 | 120.99 | 95.01 |
| 5 | 109.15 | 116.63 | 85.83 |
| Mean | 100.00 | 123.00 | 101.01 |

[1700] Table 162. shows % mouse SOD1 mRNA remaining relative to PBS control in the diaphragm 14 days post dosing. N=5. N.D.; Not determined.

% remaining of mSOD1 mRNA

| animal No. | PBS | DSR-0103969 | DSR-0104104 |
|---|---|---|---|
| 1 | 117.76 | 48.63 | 32.82 |
| 2 | 115.31 | 54.70 | 34.53 |
| 3 | 105.64 | 51.48 | 29.51 |
| 4 | 74.27 | 41.64 | 20.87 |
| 5 | 87.02 | 36.54 | 26.86 |
| Mean | 100.00 | 46.60 | 28.92 |

[1701] Table 163. shows % mouse SOD1 mRNA remaining relative to PBS control in the quad 28 days post dosing. N=5. N.D.: Not determined.

% remaining of mSOD1 mRNA

| animal No. | PBS | DSR-0103969 | DSR-0104104 |
|---|---|---|---|
| 1 | 106.41 | 55.01 | 43.53 |
| 2 | 101.01 | 55.39 | 52.78 |
| 3 | 97.16 | 55.83 | 46.02 |
| 4 | 96.83 | 56.96 | 56.25 |
| 5 | 98.59 | 57.81 | 53.04 |
| Mean | 100.00 | 56.20 | 50.32 |

[1702] Table 164. shows % mouse SOD1 mRNA remaining relative to PBS control in the kidney 28 days post dosing. N=5. N.D.: Not determined.

% remaining of mSOD1 mRNA

| animal No. | PBS | DSR-0103969 | DSR-0104104 |
|---|---|---|---|
| 1 | 116.21 | 63.06 | 86.05 |
| 2 | 100.07 | 71.17 | 66.88 |
| 3 | 113.33 | 92.58 | 74.60 |
| 4 | 125.10 | 108.89 | 66.64 |
| 5 | 45.28 | 80.55 | 83.29 |
| Mean | 100.00 | 83.25 | 75.49 |

[1703] Table 165. shows % mouse SOD1 mRNA remaining relative to PBS control in the liver 28 days post dosing. N=5. N.D.: Not determined.

% remaining of mSOD1 mRNA

| animal No. | PBS | DSR-0103969 | DSR-0104104 |
|---|---|---|---|
| 1 | 100.18 | 26.85 | 20.53 |
| 2 | 100.78 | 28.22 | 13.20 |
| 3 | 89.83 | 36.84 | 12.02 |
| 4 | 107.46 | 23.22 | 12.82 |
| 5 | 101.74 | 27.66 | 20.87 |
| Mean | 100.00 | 28.56 | 15.89 |

[1704] Table 166. shows % mouse SOD1 mRNA remaining relative to PBS control in the heart 28 days post dosing. N=5. N.D.: Not determined.

% remaining of mSOD1 mRNA

| animal No. | PBS | DSR-0103969 | DSR-0104104 |
|---|---|---|---|
| 1 | 84.12 | 31.31 | 15.89 |
| 2 | 111.47 | 44.03 | 16.94 |
| 3 | 119.16 | 46.17 | 18.04 |
| 4 | 99.35 | 37.37 | 13.60 |
| 5 | 85.89 | 44.04 | 23.76 |
| Mean | 100.00 | 40.58 | 17.65 |

[1705] Table 167. shows % mouse SOD1 mRNA remaining relative to PBS control in the lung 28 days post dosing. N=5. N.D.: Not determined.

% remaining of mSOD1 mRNA

| animal No. | PBS | DSR-0103969 | DSR-0104104 |
|---|---|---|---|
| 1 | 66.59 | 112.11 | 51.64 |
| 2 | 94.07 | 87.96 | 77.26 |
| 3 | 111.54 | 114.55 | 61.94 |
| 4 | 150.46 | 120.53 | 71.26 |
| 5 | 77.34 | 97.47 | 71.83 |
| Mean | 100.00 | 106.52 | 66.79 |

[1706] Table 168. shows % mouse SOD1 mRNA remaining relative to PBS control in the brown adipose tissue 28 days post dosing. N=5. N.D.: Not determined.

% remaining of mSOD1 mRNA

| animal No. | PBS | DSR-0103969 | DSR-0104104 |
|---|---|---|---|
| 1 | 119.54 | 38.62 | 27.28 |
| 2 | 114.41 | 34.32 | 29.17 |
| 3 | 63.98 | 58.81 | 17.27 |
| 4 | 124.76 | 33.65 | 20.21 |
| 5 | 77.32 | 47.92 | 18.77 |
| Mean | 100.00 | 42.66 | 22.54 |

[1707] Table 169. shows % mouse SOD1 mRNA remaining relative to PBS control in the white adipose tissue 28 days post dosing. N=5. N.D.: Not determined.

% remaining of mSOD1 mRNA

| animal No. | PBS | DSR-0103969 | DSR-0104104 |
|---|---|---|---|
| 1 | 86.47 | 37.33 | 28.58 |
| 2 | 113.09 | 55.53 | 28.38 |
| 3 | 88.82 | 34.94 | 97.75 |
| 4 | 97.09 | 34.02 | 48.66 |
| 5 | 114.53 | 42.00 | 29.26 |
| Mean | 100.00 | 40.76 | 46.52 |

[1708] Table 170. shows % mouse SOD1 mRNA remaining relative to PBS control in the sciatic nerve 28 days post dosing. N=5. N.D.: Not determined.

% remaining of mSOD1 mRNA

| animal No. | PBS | DSR-0103969 | DSR-0104104 |
|---|---|---|---|
| 1 | 126.48 | 103.19 | 104.99 |
| 2 | 81.53 | 131.79 | 64.07 |
| 3 | 72.46 | 100.85 | 112.64 |
| 4 | 114.48 | 123.10 | 63.15 |
| 5 | 105.05 | 80.28 | 98.09 |
| Mean | 100.00 | 107.84 | 88.59 |

[1709] Table 171. shows % mouse SOD1 mRNA remaining relative to PBS control in the diaphragm 28 days post dosing. N=5. N.D.: Not determined.

% remaining of mSOD1 mRNA

| animal No. | PBS | DSR-0103969 | DSR-0104104 |
|---|---|---|---|
| 1 | 122.75 | 43.12 | 30.26 |
| 2 | 70.63 | 36.51 | 26.31 |
| 3 | 105.65 | 37.63 | 22.41 |
| 4 | 103.22 | 38.43 | 23.78 |
| 5 | 97.74 | 44.76 | 30.83 |
| Mean | 100.00 | 40.09 | 26.72 |

[1710] Table 171a. shows Ago2 loading of guide strand in the liver relative to miR-143 in 5 mg/kg treated mouse cohort 14 days and 28 days post dose

| | Ct: | Ct: | Ct: | Ct: | Relative |
|---|---|---|---|---|---|
| | mSOD1/ | miR- | mSOD1/ | miR- | mSOD1/miR- |
| | Ago2 | 143/Ago2 | IgG | 143/IgG | 143 |
| | Day 14 | | | | |
| PBS-1 | 35.13 | 28.37 | 35.27 | 37.61 | 0.002 |
| PBS-2 | 34.78 | 27.56 | 34.54 | 35.97 | 0.002 |
| PBS-3 | 35.24 | 28.27 | 34.32 | 37.63 | 0.001 |
| DSR- | 31.46 | 28.63 | 33.54 | 37.73 | 0.008 |
| 0103969- | | | | | |
| 1 | | | | | |
| DSR- | 31.65 | 29.02 | 33.8 | 36.22 | 0.030 |
| 0103969- | | | | | |
| 2 | | | | | |
| DSR- | 31.61 | 28.31 | 34.99 | 39.55 | 0.004 |
| 0103969- | | | | | |
| 3 | | | | | |
| DSR- | 28.86 | 28.42 | 32.79 | 37.09 | 0.037 |
| 0104104- | | | | | |
| 1 | | | | | |
| DSR- | 29.84 | 28.86 | 33.31 | 37.01 | 0.039 |
| 0104104- | | | | | |
| 2 | | | | | |
| DSR- | 29.48 | 28.31 | 33.09 | 37.65 | 0.019 |
| 0104104- | | | | | |
| 3 | | | | | |
| | Day 28 | | | | |
| DSR- | 32.43 | 28.48 | 34.77 | 38.25 | 0.006 |
| 0103969- | | | | | |
| 1 | | | | | |
| DSR- | 32.84 | 28.6 | 34.19 | 38.04 | 0.004 |
| 0103969- | | | | | |
| 2 | | | | | |
| DSR- | 33.95 | 30.09 | 34.48 | 37.43 | 0.009 |
| 0103969- | | | | | |
| 3 | | | | | |
| DSR- | 28.04 | 28.03 | 31.56 | 37.87 | 0.013 |
| 0104104- | | | | | |
| 1 | | | | | |
| DSR- | 27.88 | 27.68 | 33.58 | 35.89 | 0.176 |
| 0104104- | | | | | |
| 2 | | | | | |
| DSR- | 28.8 | 28.31 | 32.87 | 36.95 | 0.042 |
| 0104104- | | | | | |
| 3 | | | | | |

[1711] Table 171b. shows Ago2 loading of guide strand in the kidney relative to miR-143 in 5 mg/kg treated mouse cohort 14 days and 28 days post dose

| | Ct: | Ct: | Ct: | Ct: | Relative |
|---|---|---|---|---|---|
| | mSOD1/ | miR- | mSOD1/ | miR- | mSOD1/miR- |
| | Ago2 | 143/Ago2 | IgG | 143/IgG | 143 |
| | Day 14 | | | | |
| PBS-1 | 34.01 | 30.88 | 34.04 | 34.79 | 0.068 |
| PBS-2 | 34.37 | 30.78 | 34.5 | 34.64 | 0.075 |
| PBS-3 | 34.06 | 29.91 | 34.66 | 34.68 | 0.056 |
| DSR- | 31.07 | 30.28 | 34.29 | 35.69 | 0.219 |
| 0103969- | | | | | |
| 1 | | | | | |
| DSR- | 32.46 | 30.89 | 33.65 | 35.18 | 0.117 |
| 0103969- | | | | | |
| 2 | | | | | |
| DSR- | 32.26 | 30.43 | 32.64 | 35.18 | 0.048 |
| 0103969- | | | | | |
| 3 | | | | | |
| DSR- | 31.18 | 30.34 | 32.72 | 35.6 | 0.076 |
| 0104104- | | | | | |
| 1 | | | | | |
| DSR- | 30.75 | 30.07 | 32.82 | 34.31 | 0.222 |
| 0104104- | | | | | |
| 2 | | | | | |
| DSR- | 31.72 | 30.78 | 34.14 | 35.8 | 0.165 |
| 0104104- | | | | | |
| 3 | | | | | |
| | Day 28 | | | | |
| DSR- | 31.66 | 31.26 | 31.33 | 34.65 | 0.076 |
| 0103969- | | | | | |
| 1 | | | | | |
| DSR- | 32.67 | 31.97 | 32.48 | 34.48 | 0.154 |
| 0103969- | | | | | |
| 2 | | | | | |
| DSR- | 31.99 | 30.91 | 32.68 | 35.17 | 0.084 |
| 0103969- | | | | | |
| 3 | | | | | |
| DSR- | 30.47 | 30.68 | 31.89 | 35.43 | 0.099 |
| 0104104- | | | | | |
| 1 | | | | | |
| DSR- | 31.33 | 31.59 | 32.11 | 36.16 | 0.072 |
| 0104104- | | | | | |
| 2 | | | | | |
| DSR- | 30.93 | 30.66 | 31.09 | 34.45 | 0.081 |
| 0104104- | | | | | |
| 3 | | | | | |

[1712] Table 171c. shows Ago2 loading of guide strand in the white adipose tissue relative to miR-143 in 5 mg/kg treated mouse cohort 14 days and 28 days post dose

| | Ct: | Ct: | Ct: | Ct: | Relative |
|---|---|---|---|---|---|
| | mSOD1/ | miR- | mSOD1/ | miR- | mSOD1/miR- |
| | Ago2 | 143/Ago2 | IgG | 143/IgG | 143 |
| | Day 14 | | | | |
| PBS-1 | 33.88 | 28.25 | 35.85 | 36.21 | 0.016 |
| PBS-2 | 35.72 | 30.36 | 35.45 | 34.88 | 0.036 |
| PBS-3 | 34.60 | 29.23 | 35.34 | 35.00 | 0.031 |
| DSR- | 31.18 | 29.28 | 36.02 | 35.88 | 0.295 |
| 0103969- | | | | | |
| 1 | | | | | |
| DSR- | 31.47 | 30.05 | 32.86 | 36.15 | 0.038 |
| 0103969- | | | | | |
| 2 | | | | | |
| DSR- | 30.85 | 29.50 | 33.55 | 34.80 | 0.165 |
| 0103969- | | | | | |
| 3 | | | | | |
| DSR- | 29.58 | 29.68 | 33.44 | 35.47 | 0.262 |
| 0104104- | | | | | |
| 1 | | | | | |
| DSR- | 28.89 | 29.16 | 33.69 | 36.26 | 0.203 |
| 0104104- | | | | | |
| 2 | | | | | |
| DSR- | 28.23 | 29.50 | 32.77 | 34.83 | 0.578 |
| 0104104- | | | | | |
| 3 | | | | | |
| | Day 28 | | | | |
| DSR- | 31.26 | 28.84 | 34.44 | 34.88 | 0.138 |
| 0103969- | | | | | |
| 1 | | | | | |
| DSR- | 32.81 | 29.77 | 34.81 | 34.82 | 0.121 |
| 0103969- | | | | | |
| 2 | | | | | |
| DSR- | 36.11 | 31.05 | 34.29 | 34.74 | 0.022 |
| 0103969- | | | | | |
| 3 | | | | | |
| DSR- | 28.28 | 29.29 | 32.93 | 34.61 | 0.629 |
| 0104104- | | | | | |
| 1 | | | | | |
| DSR- | 27.20 | 27.24 | 32.88 | 33.55 | 0.646 |
| 0104104- | | | | | |
| 2 | | | | | |
| DSR- | 28.03 | 28.09 | 33.09 | 33.94 | 0.578 |
| 0104104- | | | | | |
| 3 | | | | | |

### Example 16. Provided Oligonucleotides and Compositions are Active In Vitro

[1713] Various siRNAs for mouse TTR were designed and constructed. A number of siRNAs were tested in vitro in mouse primary hepatocytes at one or a range of concentrations.

[1714] Example protocol for in vitro determination of siRNA activity in mouse primary hepatocytes: For determination of siRNAs activity, siRNAs at specific concentration were gymnotically delivered to mouse primary hepatocytes plated at 96-well plates, with 10,000 cells/well. Following 48 hours treatment, total RNA was extracted using SV96 Total RNA Isolation kit (Promega). cDNA production from RNA samples were performed using High-Capacity cDNA Reverse Transcription kit (Thermo Fisher) following manufacturer's instructions and qPCR analysis performed in CFX System using iQ Multiplex Powermix (Bio-Rad). For mouse TTR mRNA, the following qPCR assay were utilized: IDT PrimeTime predesigned qPCR Assay Mm.PT.58.11922308. Mouse HPRT was used as normalizer (Mm.PT.39a.22214828). mRNA knockdown levels were calculated as % mRNA remaining relative to mock treatment.

[1715] Table 172. shows 0% mouse TTR mRNA remaining (at 500 pM, 150 pM and 50 pM siRNA treatment) relative to mouse HPRT control. N=2. N.D.: Not determined.

| | 500 pM | | | 150 pM | | |
|---|---|---|---|---|---|---|
| | % remaining | % remaining | | % remaining | % remaining | |
| | mRNA | mRNA | | mRNA | mRNA | |
| | (mTTR/ | (mTTR/ | | (mTTR/ | (mTTR/ | |
| siRNA | mHPRT) − 1 | mHPRT) − 2 | Mean | mHPRT) − 1 | mHPRT) − 2 | Mean |
| DSR- | 44.914 | 13.442 | 29.18 | 61.248 | 37.444 | 49.35 |
| 0103330 | | | | | | |
| DSR- | 40.223 | 18.057 | 29.14 | 63.607 | 38.704 | 51.16 |
| 0103329 | | | | | | |
| DSR- | 53.107 | 18.136 | 35.62 | 62.262 | 38.074 | 50.17 |
| 0103328 | | | | | | |
| DSR- | 50.343 | 19.86 | 35.10 | 56.943 | 43.087 | 50.02 |
| 0103327 | | | | | | |
| DSR- | 24.61 | 6.02 | 15.32 | 34.349 | 25.768 | 30.06 |
| 0102524 | | | | | | |

| | 150 pM | | |
|---|---|---|---|
| | % remaining | % remaining | |
| | mRNA | mRNA | |
| | (mTTR/ | (mTTR/ | |
| siRNA | mHPRT) − 1 | mHPRT) − 2 | Mean |
| DSR- | 74.715 | 39.185 | 56.95 |
| 0103330 | | | |
| DSR- | 88.027 | 51.044 | 69.54 |
| 0103329 | | | |
| DSR- | 72.845 | 58.895 | 65.87 |
| 0103328 | | | |
| DSR- | 76.226 | 48.962 | 62.59 |
| 0103327 | | | |
| DSR- | 49.451 | 32.499 | 40.98 |
| 0102524 | | | |

[1716] Table 173. shows % mouse TTR mRNA remaining (at 500 pM, 150 pM and 50 pM siRNA treatment) relative to mouse HPRT control. N=2. N.D.: Not determined.

| | 500 pM | | | 150 pM | | |
|---|---|---|---|---|---|---|
| | % remaining | % remaining | | % remaining | % remaining | |
| | mRNA | mRNA | | mRNA | mRNA | |
| | (mTTR/ | (mTTR/ | | (mTTR/ | (mTTR/ | |
| siRNA | mHPRT) − 1 | mHPRT) − 2 | Mean | mHPRT) − 1 | mHPRT) − 2 | Mean |
| DSR- | 63.66 | 31.39 | 47.52 | 84.45 | 82.49 | 83.47 |
| 0103370- | | | | | | |
| 001-001 | | | | | | |
| DSR- | 37.34 | 13.41 | 25.37 | 76.07 | 56.59 | 66.33 |
| 0103028- | | | | | | |
| 010-001 | | | | | | |
| DSR- | 47.96 | 38.22 | 43.09 | 83.56 | 65.42 | 74.49 |
| 0103393- | | | | | | |
| 001-001 | | | | | | |
| DSR- | 29.32 | 17.64 | 23.48 | 65.62 | 43.76 | 54.69 |
| 0103392- | | | | | | |
| 001-001 | | | | | | |
| DSR- | 35.52 | 13.59 | 24.55 | 82.44 | 53.13 | 67.79 |
| 0103391- | | | | | | |
| 001-001 | | | | | | |
| DSR- | 37.87 | 14.15 | 26.01 | 82.49 | 57.92 | 70.21 |
| 0103368- | | | | | | |
| 001-001 | | | | | | |
| DSR- | 47.48 | 26.76 | 37.12 | 83.56 | 51.44 | 67.50 |
| 0103390- | | | | | | |
| 001-001 | | | | | | |
| DSR- | 40.44 | 25.79 | 33.12 | 72.90 | 58.79 | 65.85 |
| 0103380- | | | | | | |
| 001-001 | | | | | | |
| DSR- | 36.17 | 12.88 | 24.53 | 63.33 | 63.40 | 63.36 |
| 0103367- | | | | | | |
| 001-001 | | | | | | |
| DSR- | 43.64 | 23.82 | 33.73 | 72.78 | 69.23 | 71.01 |
| 0103372- | | | | | | |
| 001-001 | | | | | | |
| DSR- | 72.04 | 55.84 | 63.94 | 100.89 | 90.65 | 95.77 |
| 0103397- | | | | | | |
| 001-001 | | | | | | |
| DSR- | 61.28 | 29.19 | 45.23 | 79.97 | 76.43 | 78.20 |
| 0103363- | | | | | | |
| 001-001 | | | | | | |
| DSR- | 56.24 | 22.45 | 39.34 | 90.12 | 74.89 | 82.50 |
| 0103396- | | | | | | |
| 001-001 | | | | | | |
| DSR- | 45.97 | 20.13 | 33.05 | 90.30 | 64.04 | 77.17 |
| 0103366- | | | | | | |
| 001-001 | | | | | | |
| DSR- | 72.99 | 42.47 | 57.73 | 106.82 | 75.99 | 91.40 |
| 0103365- | | | | | | |
| 001-001 | | | | | | |
| DSR- | 39.85 | 30.43 | 35.14 | 81.03 | 64.18 | 72.60 |
| 0103379- | | | | | | |
| 001-001 | | | | | | |
| DSR- | 56.05 | 12.40 | 34.23 | 75.53 | 91.26 | 83.39 |
| 0103389- | | | | | | |
| 001-001 | | | | | | |
| DSR- | 35.87 | 19.91 | 27.89 | 77.15 | 68.67 | 72.91 |
| 0103378- | | | | | | |
| 001-001 | | | | | | |
| DSR- | 62.41 | 51.39 | 56.90 | 101.18 | 85.47 | 93.32 |
| 0103377- | | | | | | |
| 001-001 | | | | | | |
| DSR- | 104.43 | 110.61 | 107.52 | 94.10 | 95.24 | 94.67 |
| 0103376- | | | | | | |
| 001-001 | | | | | | |
| DSR- | 33.45 | 14.85 | 24.15 | 80.81 | 67.21 | 74.01 |
| 0103395- | | | | | | |
| 001-001 | | | | | | |
| DSR- | 15.78 | 12.43 | 14.11 | 59.69 | 41.97 | 50.83 |
| 0102524- | | | | | | |
| 014-001 | | | | | | |

| | 50 pM | | |
|---|---|---|---|
| | % remaining | % remaining | |
| | mRNA | mRNA | |
| | (mTTR/ | (mTTR/ | |
| siRNA | mHPRT) − 1 | mHPRT) − 2 | Mean |
| DSR- | 75.91 | 88.05 | 81.98 |
| 0103370- | | | |
| 001-001 | | | |
| DSR- | 59.64 | 80.80 | 70.22 |
| 0103028- | | | |
| 010-001 | | | |
| DSR- | 52.18 | 50.23 | 51.20 |
| 0103393- | | | |
| 001-001 | | | |
| DSR- | 56.03 | 54.13 | 55.08 |
| 0103392- | | | |
| 001-001 | | | |
| DSR- | 67.42 | 67.11 | 67.27 |
| 0103391- | | | |
| 001-001 | | | |
| DSR- | 62.35 | 67.23 | 64.79 |
| 0103368- | | | |
| 001-001 | | | |
| DSR- | 81.66 | 84.30 | 82.98 |
| 0103390- | | | |
| 001-001 | | | |
| DSR- | 91.97 | 92.40 | 92.19 |
| 0103380- | | | |
| 001-001 | | | |
| DSR- | 63.14 | 57.91 | 60.53 |
| 0103367- | | | |
| 001-001 | | | |
| DSR- | 70.03 | 69.09 | 69.56 |
| 0103372- | | | |
| 001-001 | | | |
| DSR- | 76.44 | 77.11 | 76.78 |
| 0103397- | | | |
| 001-001 | | | |
| DSR- | 83.23 | 72.99 | 78.11 |
| 0103363- | | | |
| 001-001 | | | |
| DSR- | 73.89 | 90.45 | 82.17 |
| 0103396- | | | |
| 001-001 | | | |
| DSR- | 69.56 | 83.56 | 76.56 |
| 0103366- | | | |
| 001-001 | | | |
| DSR- | 93.25 | 107.55 | 100.40 |
| 0103365- | | | |
| 001-001 | | | |
| DSR- | 80.16 | 102.49 | 91.33 |
| 0103379- | | | |
| 001-001 | | | |
| DSR- | 73.71 | 53.61 | 63.66 |
| 0103389- | | | |
| 001-001 | | | |
| DSR- | 62.78 | 56.42 | 59.60 |
| 0103378- | | | |
| 001-001 | | | |
| DSR- | 72.39 | 66.57 | 69.48 |
| 0103377- | | | |
| 001-001 | | | |
| DSR- | 88.23 | 90.90 | 89.57 |
| 0103376- | | | |
| 001-001 | | | |
| DSR- | 66.75 | 76.92 | 71.84 |
| 0103395- | | | |
| 001-001 | | | |
| DSR- | 50.86 | 82.76 | 66.81 |
| 0102524- | | | |
| 014-001 | | | |

[1717] Table 174. shows % mouse TTR mRNA remaining (at 500 pM, 150 pM and 50 pM siRNA treatment) relative to mouse HPRT control. N=2. N.D.: Not determined.

| | 500 pM | | | 150 pM | | |
|---|---|---|---|---|---|---|
| | % remaining | % remaining | | % remaining | % remaining | |
| | mRNA | mRNA | | mRNA | mRNA | |
| | (mTTR/ | (mTTR/ | | (mTTR/ | (mTTR/ | |
| siRNA | mHPRT) − 1 | mHPRT) − 2 | Mean | mHPRT) − 1 | mHPRT) − 2 | Mean |
| DSR- | 46.19 | 32.66 | 39.42 | 76.73 | 69.64 | 73.18 |
| 0103385- | | | | | | |
| 001-001 | | | | | | |
| DSR- | 56.78 | 47.17 | 51.97 | 83.86 | 81.04 | 82.45 |
| 0103375- | | | | | | |
| 001-001 | | | | | | |
| DSR- | 29.08 | 24.69 | 26.89 | 61.39 | 52.44 | 56.91 |
| 0103374- | | | | | | |
| 001-001 | | | | | | |
| DSR- | 34.47 | 28.43 | 31.45 | 69.52 | 60.36 | 64.94 |
| 0103384- | | | | | | |
| 001-001 | | | | | | |
| DSR- | 31.11 | 17.55 | 24.33 | 60.40 | 45.28 | 52.84 |
| 0103388- | | | | | | |
| 001-001 | | | | | | |
| DSR- | 41.88 | 21.61 | 31.74 | 91.27 | 63.17 | 77.22 |
| 0103373- | | | | | | |
| 001-001 | | | | | | |
| DSR- | 39.69 | 18.78 | 29.23 | 73.72 | 51.10 | 62.41 |
| 0103383- | | | | | | |
| 001-001 | | | | | | |
| DSR- | 50.75 | 34.12 | 42.43 | 77.93 | 67.21 | 72.57 |
| 0103364- | | | | | | |
| 001-001 | | | | | | |
| DSR- | 32.34 | 27.16 | 29.75 | 67.23 | 55.40 | 61.31 |
| 0103394- | | | | | | |
| 001-001 | | | | | | |
| DSR- | 35.48 | 20.81 | 28.15 | 67.58 | 64.45 | 66.02 |
| 0103382- | | | | | | |
| 001-001 | | | | | | |
| DSR- | 31.57 | 21.62 | 26.60 | 63.28 | 50.26 | 56.77 |
| 0103371- | | | | | | |
| 001-001 | | | | | | |
| DSR- | 15.78 | 12.43 | 14.11 | 59.69 | 41.97 | 50.83 |
| 0102524- | | | | | | |
| 014-001 | | | | | | |

| | 50 pM | | |
|---|---|---|---|
| | % remaining | % remaining | |
| | mRNA | mRNA | |
| | (mTTR/ | (mTTR/ | |
| siRNA | mHPRT) − 1 | mHPRT) − 2 | Mean |
| DSR- | 89.76 | 86.30 | 88.03 |
| 0103385- | | | |
| 001-001 | | | |
| DSR- | 74.30 | 77.99 | 76.14 |
| 0103375- | | | |
| 001-001 | | | |
| DSR- | 57.03 | 64.71 | 60.87 |
| 0103374- | | | |
| 001-001 | | | |
| DSR- | 55.88 | 60.95 | 58.42 |
| 0103384- | | | |
| 001-001 | | | |
| DSR- | 60.77 | 56.25 | 58.51 |
| 0103388- | | | |
| 001-001 | | | |
| DSR- | 79.91 | 82.16 | 81.04 |
| 0103373- | | | |
| 001-001 | | | |
| DSR- | 79.95 | 74.08 | 77.01 |
| 0103383- | | | |
| 001-001 | | | |
| DSR- | 93.41 | 85.81 | 89.61 |
| 0103364- | | | |
| 001-001 | | | |
| DSR- | 88.59 | 89.65 | 89.12 |
| 0103394- | | | |
| 001-001 | | | |
| DSR- | 76.96 | 67.49 | 72.23 |
| 0103382- | | | |
| 001-001 | | | |
| DSR- | 59.24 | 66.84 | 63.04 |
| 0103371- | | | |
| 001-001 | | | |
| DSR- | 50.86 | 82.76 | 66.81 |
| 0102524- | | | |
| 014-001 | | | |

[1718] Table 175. shows % mouse TTR mRNA remaining (at 500 pM, 150 pM and 50 pM siRNA treatment) relative to mouse HPRT control. N=2. N.D.: Not determined.

| | 500 pM | | | 150 pM | | |
|---|---|---|---|---|---|---|
| | % remaining | % remaining | | % remaining | % remaining | |
| | mRNA | mRNA | | mRNA | mRNA | |
| | (mTTR/ | (mTTR/ | | (mTTR/ | (mTTR/ | |
| siRNA | mHPRT) − 1 | mHPRT) − 2 | Mean | mHPRT) − 1 | mHPRT) − 2 | Mean |
| DSR- | 59.82 | 39.42 | 49.62 | 93.05 | 77.15 | 85.10 |
| 0103387- | | | | | | |
| 001-001 | | | | | | |
| DSR- | 61.51 | 42.14 | 51.83 | 87.76 | 71.35 | 79.55 |
| 0103381- | | | | | | |
| 001-001 | | | | | | |
| DSR- | 77.05 | 57.43 | 67.24 | 96.11 | 80.94 | 88.53 |
| 0103386- | | | | | | |
| 001-001 | | | | | | |
| DSR- | 65.22 | 57.73 | 61.47 | 93.47 | 76.52 | 84.99 |
| 0103369- | | | | | | |
| 001-001 | | | | | | |
| DSR- | 23.84 | 14.11 | 18.98 | 51.07 | 33.24 | 42.16 |
| 0103099- | | | | | | |
| 010-001 | | | | | | |
| DSR- | 15.78 | 12.43 | 14.11 | 59.69 | 41.97 | 50.83 |
| 0102524- | | | | | | |
| 014-001 | | | | | | |

| | 50 pM | | |
|---|---|---|---|
| | % remaining | % remaining | |
| | mRNA | mRNA | |
| | (mTTR/ | (mTTR/ | |
| siRNA | mHPRT) − 1 | mHPRT) − 2 | Mean |
| DSR- | 79.56 | 90.29 | 84.92 |
| 0103387- | | | |
| 001-001 | | | |
| DSR- | 67.33 | 64.11 | 65.72 |
| 0103381- | | | |
| 001-001 | | | |
| DSR- | 116.43 | 94.04 | 105.24 |
| 0103386- | | | |
| 001-001 | | | |
| DSR- | 91.10 | 85.91 | 88.51 |
| 0103369- | | | |
| 001-001 | | | |
| DSR- | 69.86 | 59.10 | 64.48 |
| 0103099- | | | |
| 010-001 | | | |
| DSR- | 50.86 | 82.76 | 66.81 |
| 0102524- | | | |
| 014-001 | | | |

[1719] Table 176. shows % mouse TTR mRNA remaining (at 500 pM, 150 pM and 50 pM siRNA treatment) relative to mouse HPRT control. N=2. N.D.: Not determined.

| | 500 pM | | | 150 pM | | |
|---|---|---|---|---|---|---|
| | % remaining | % remaining | | % remaining | % remaining | |
| | mRNA | mRNA | | mRNA | mRNA | |
| | (mTTR/ | (mTTR/ | | (mTTR/ | (mTTR/ | |
| siRNA | mHPRT) − 1 | mHPRT) − 2 | Mean | mHPRT) − 1 | mHPRT) − 2 | Mean |
| DSR- | 21.85 | 20.66 | 21.25 | 54.92 | 57.17 | 56.04 |
| 0104178 | | | | | | |
| DSR- | 39.29 | 32.72 | 36.00 | 71.95 | 72.27 | 72.11 |
| 0104177 | | | | | | |
| DSR- | 11.07 | 8.49 | 9.78 | 36.56 | 40.84 | 38.70 |
| 0104176 | | | | | | |
| DSR- | 18.55 | 14.18 | 16.37 | 47.85 | 39.74 | 43.80 |
| 0104175 | | | | | | |
| DSR- | 18.42 | 13.52 | 15.97 | 49.68 | 43.54 | 46.61 |
| 0104174 | | | | | | |
| DSR- | 78.56 | 70.27 | 74.42 | 106.46 | 89.22 | 97.84 |
| 0104173 | | | | | | |
| DSR- | 31.05 | 27.79 | 29.42 | 69.97 | 55.37 | 62.67 |
| 0104172 | | | | | | |
| DSR- | 11.72 | 5.58 | 8.65 | 28.88 | 26.76 | 27.82 |
| 0104171 | | | | | | |
| DSR- | 9.56 | 4.44 | 7.00 | 29.73 | 21.58 | 25.65 |
| 0102626 | | | | | | |
| DSR- | 6.26 | 4.21 | 5.23 | 19.95 | 22.30 | 21.13 |
| 0102524 | | | | | | |

| | 50 pM | | |
|---|---|---|---|
| | % remaining | % remaining | |
| | mRNA | mRNA | |
| | (mTTR/ | (mTTR/ | |
| siRNA | mHPRT) − 1 | mHPRT) − 2 | Mean |
| DSR- | 66.46 | 63.38 | 64.92 |
| 0104178 | | | |
| DSR- | 79.42 | 87.51 | 83.46 |
| 0104177 | | | |
| DSR- | 56.94 | 43.39 | 50.16 |
| 0104176 | | | |
| DSR- | 61.55 | 42.48 | 52.01 |
| 0104175 | | | |
| DSR- | 67.60 | 52.03 | 59.81 |
| 0104174 | | | |
| DSR- | 94.05 | 86.83 | 90.44 |
| 0104173 | | | |
| DSR- | 64.26 | 70.29 | 67.28 |
| 0104172 | | | |
| DSR- | 38.01 | 34.84 | 36.43 |
| 0104171 | | | |
| DSR- | 43.41 | 40.04 | 41.72 |
| 0102626 | | | |
| DSR- | 50.50 | 36.79 | 43.65 |
| 0102524 | | | |

[1720] Table 177. shows % mouse TTR mRNA remaining (at 500 pM, 150 pM and 50 pM siRNA treatment) relative to mouse HPRT control. N=2. N.D.: Not determined.

| | 500 pM | | | 150 pM | | |
|---|---|---|---|---|---|---|
| | % remaining | % remaining | | % remaining | % remaining | |
| | mRNA | mRNA | | mRNA | mRNA | |
| | (mTTR/ | (mTTR/ | | (mTTR/ | (mTTR/ | |
| siRNA | mHPRT) − 1 | mHPRT) − 2 | Mean | mHPRT) − 1 | mHPRT) − 2 | Mean |
| DSR- | 8.01 | 5.16 | 6.59 | 21.99 | 20.84 | 21.41 |
| 0104187 | | | | | | |
| DSR- | 61.87 | 46.53 | 54.20 | 80.93 | 81.97 | 81.45 |
| 0104184 | | | | | | |
| DSR- | 25.11 | 16.72 | 20.92 | 55.65 | 54.04 | 54.84 |
| 0104183 | | | | | | |
| DSR- | 20.82 | 14.98 | 17.90 | 53.77 | 49.97 | 51.87 |
| 0104181 | | | | | | |
| DSR- | 9.56 | 4.44 | 7.00 | 29.73 | 21.58 | 25.65 |
| 0102626 | | | | | | |
| DSR- | 6.26 | 4.21 | 5.23 | 19.95 | 22.30 | 21.13 |
| 0102524 | | | | | | |

| | 50 pM | | |
|---|---|---|---|
| | % remaining | % remaining | |
| | mRNA | mRNA | |
| | (mTTR/ | (mTTR/ | |
| siRNA | mHPRT) − 1 | mHPRT) − 2 | Mean |
| DSR- | 47.64 | 51.08 | 49.36 |
| 0104187 | | | |
| DSR- | 96.30 | 86.65 | 91.48 |
| 0104184 | | | |
| DSR- | 68.28 | 60.71 | 64.50 |
| 0104183 | | | |
| DSR- | 63.27 | 59.44 | 61.35 |
| 0104181 | | | |
| DSR- | 43.41 | 40.04 | 41.72 |
| 0102626 | | | |
| DSR- | 50.50 | 36.79 | 43.65 |
| 0102524 | | | |

[1721] Table 178 shows % mouse TTR mRNA remaining (at 500 pM, 150 pM and 50 pM siRNA treatment) relative to mouse HPRT control. N=2. N.D.: Not determined.

| | 500 pM | | | 150 pM | | |
|---|---|---|---|---|---|---|
| | % remaining | % remaining | | % remaining | % remaining | |
| | mRNA | mRNA | | mRNA | mRNA | |
| | (mTTR/ | (mTTR/ | | (mTTR/ | (mTTR/ | |
| siRNA | mHPRT) − 1 | mHPRT) − 2 | Mean | mHPRT) − 1 | mHPRT) − 2 | Mean |
| DSR- | 37.51 | 17.76 | 27.63 | 62.55 | 61.23 | 61.89 |
| 0104195 | | | | | | |
| DSR- | 58.55 | 36.88 | 47.71 | 87.97 | 77.66 | 82.82 |
| 0104194 | | | | | | |
| DSR- | 9.58 | 7.49 | 8.53 | 39.20 | 32.93 | 36.06 |
| 0104193 | | | | | | |
| DSR- | 13.14 | 7.94 | 10.54 | 44.02 | 30.37 | 37.19 |
| 0104192 | | | | | | |
| DSR- | 15.78 | 9.95 | 12.86 | 52.74 | 38.31 | 45.53 |
| 0104191 | | | | | | |
| DSR- | 9.38 | 7.34 | 8.36 | 42.30 | 33.88 | 38.09 |
| 0104190 | | | | | | |
| DSR- | 12.15 | 8.99 | 10.57 | 36.30 | 25.84 | 31.07 |
| 0104189 | | | | | | |
| DSR- | 14.20 | 7.08 | 10.64 | 33.73 | 29.77 | 31.75 |
| 0104188 | | | | | | |
| DSR- | 9.56 | 4.44 | 7.00 | 29.73 | 21.58 | 25.65 |
| 0102626 | | | | | | |
| DSR- | 6.26 | 4.21 | 5.23 | 19.95 | 22.30 | 21.13 |
| 0102524 | | | | | | |

| | 50 pM | | |
|---|---|---|---|
| | % remaining | % remaining | |
| | mRNA | mRNA | |
| | (mTTR/ | (mTTR/ | |
| siRNA | mHPRT) − 1 | mHPRT) − 2 | Mean |
| DSR- | 83.75 | 74.55 | 79.15 |
| 0104195 | | | |
| DSR- | 92.42 | 79.02 | 85.72 |
| 0104194 | | | |
| DSR- | 55.87 | 38.79 | 47.33 |
| 0104193 | | | |
| DSR- | 53.59 | 41.64 | 47.61 |
| 0104192 | | | |
| DSR- | 67.24 | 44.44 | 55.84 |
| 0104191 | | | |
| DSR- | 57.64 | 41.91 | 49.77 |
| 0104190 | | | |
| DSR- | 57.65 | 32.08 | 44.87 |
| 0104189 | | | |
| DSR- | 52.91 | 35.11 | 44.01 |
| 0104188 | | | |
| DSR- | 43.41 | 40.04 | 41.72 |
| 0102626 | | | |
| DSR- | 50.50 | 36.79 | 43.65 |
| 0102524 | | | |

[1722] Table 179. shows % mouse TTR mRNA remaining (at 500 pM, 150 pM and 50 pM siRNA treatment) relative to mouse HPRT control. N=2. N.D.: Not determined.

| | 500 pM | | | 150 pM | | |
|---|---|---|---|---|---|---|
| | % remaining | % remaining | | % remaining | % remaining | |
| | mRNA | mRNA | | mRNA | mRNA | |
| | (mTTR/ | (mTTR/ | | (mTTR/ | (mTTR/ | |
| siRNA | mHPRT) − 1 | mHPRT) − 2 | Mean | mHPRT) − 1 | mHPRT) − 2 | Mean |
| DSR- | 10.02 | 5.79 | 7.90 | 33.88 | 29.60 | 31.74 |
| 0104203 | | | | | | |
| DSR- | 99.03 | 82.07 | 90.55 | 107.75 | 95.77 | 101.76 |
| 0104202 | | | | | | |
| DSR- | 13.54 | 5.61 | 9.57 | 39.60 | 33.15 | 36.38 |
| 0104201 | | | | | | |
| DSR- | 13.88 | 7.60 | 10.74 | 46.38 | 32.98 | 39.68 |
| 0104200 | | | | | | |
| DSR- | 6.49 | 7.07 | 6.78 | 17.62 | 19.21 | 18.42 |
| 0104199 | | | | | | |
| DSR- | 11.01 | 5.20 | 8.10 | 25.17 | 21.66 | 23.42 |
| 0104198 | | | | | | |
| DSR- | 18.04 | 12.43 | 15.23 | 31.84 | 30.58 | 31.21 |
| 0104197 | | | | | | |
| DSR- | 12.66 | 5.99 | 9.32 | 26.79 | 24.61 | 25.70 |
| 0104196 | | | | | | |
| DSR- | 9.56 | 4.44 | 7.00 | 29.73 | 21.58 | 25.65 |
| 0102626 | | | | | | |
| DSR- | 6.26 | 4.21 | 5.23 | 19.95 | 22.30 | 21.13 |
| 0102524 | | | | | | |

| | 50 pM | | |
|---|---|---|---|
| | % remaining | % remaining | |
| | mRNA | mRNA | |
| | (mTTR/ | (mTTR/ | |
| siRNA | mHPRT) − 1 | mHPRT) − 2 | Mean |
| DSR- | 52.26 | 41.98 | 47.12 |
| 0104203 | | | |
| DSR- | 88.46 | 99.42 | 93.94 |
| 0104202 | | | |
| DSR- | 50.68 | 44.27 | 47.48 |
| 0104201 | | | |
| DSR- | 53.43 | 52.31 | 52.87 |
| 0104200 | | | |
| DSR- | 51.46 | 36.42 | 43.94 |
| 0104199 | | | |
| DSR- | 48.50 | 29.30 | 38.90 |
| 0104198 | | | |
| DSR- | 64.28 | 49.15 | 56.72 |
| 0104197 | | | |
| DSR- | 49.82 | 36.49 | 43.16 |
| 0104196 | | | |
| DSR- | 43.41 | 40.04 | 41.72 |
| 0102626 | | | |
| DSR- | 50.50 | 36.79 | 43.65 |
| 0102524 | | | |

[1723] Table 180. shows % mouse TTR mRNA remaining (at 500 pM, 150 pM and 50 pM siRNA treatment) relative to mouse HPRT control. N=2. N.D.: Not determined.

| | 500 pM | | | 150 pM | | |
|---|---|---|---|---|---|---|
| | % remaining | % remaining | | % remaining | % remaining | |
| | mRNA | mRNA | | mRNA | mRNA | |
| | (mTTR/ | (mTTR/ | | (mTTR/ | (mTTR/ | |
| siRNA | mHPRT) − 1 | mHPRT) − 2 | Mean | mHPRT) − 1 | mHPRT) − 2 | Mean |
| DSR- | 14.51 | 10.61 | 12.56 | 32.18 | 41.17 | 36.67 |
| 0104211 | | | | | | |
| DSR- | 30.92 | 23.80 | 27.36 | 55.84 | 75.52 | 65.68 |
| 0104210 | | | | | | |
| DSR- | 19.60 | 11.60 | 15.60 | 48.47 | 51.32 | 49.90 |
| 0104208 | | | | | | |
| DSR- | 19.64 | 11.12 | 15.38 | 50.40 | 48.19 | 49.30 |
| 0104207 | | | | | | |
| DSR- | 14.04 | 7.77 | 10.90 | 46.65 | 40.12 | 43.38 |
| 0104206 | | | | | | |
| DSR- | 9.84 | 6.34 | 8.09 | 39.68 | 33.06 | 36.37 |
| 0104205 | | | | | | |
| DSR- | 11.09 | 6.75 | 8.92 | 44.00 | 29.73 | 36.87 |
| 0104204 | | | | | | |
| DSR- | 9.56 | 4.44 | 7.00 | 29.73 | 21.58 | 25.65 |
| 0102626 | | | | | | |
| DSR- | 6.26 | 4.21 | 5.23 | 19.95 | 22.30 | 21.13 |
| 0102524 | | | | | | |

| | 50 pM | | |
|---|---|---|---|
| | % remaining | % remaining | |
| | mRNA | mRNA | |
| | (mTTR/ | (mTTR/ | |
| siRNA | mHPRT) − 1 | mHPRT) − 2 | Mean |
| DSR- | 65.09 | 57.10 | 61.09 |
| 0104211 | | | |
| DSR- | 81.88 | 68.36 | 75.12 |
| 0104210 | | | |
| DSR- | 70.93 | 59.49 | 65.21 |
| 0104208 | | | |
| DSR- | 66.28 | 60.44 | 63.36 |
| 0104207 | | | |
| DSR- | 55.19 | 46.36 | 50.78 |
| 0104206 | | | |
| DSR- | 58.92 | 36.51 | 47.72 |
| 0104205 | | | |
| DSR- | 55.79 | 47.81 | 51.80 |
| 0104204 | | | |
| DSR- | 43.41 | 40.04 | 41.72 |
| 0102626 | | | |
| DSR- | 50.50 | 36.79 | 43.65 |
| 0102524 | | | |

### Example 17. Provided Oligonucleotides and Compositions are Active In Vitro in Human iCell GABA Neurons

[1724] Various siRNAs for mouse APP were designed and constructed. A number of siRNAs were tested in vitro in human iCell GABA neurons at one or a range of concentrations. Some siRNAs were also tested in mice (e.g., C57BL6 wild type mice).

[1725] Example protocol for in vitro determination of siRNA activity in human iCell GABA neurons: For determination of siRNAs activity, siRNAs at specific concentration were gymnotically delivered to human iCell GABA neurons plated at 96-well plates, with 40,000 cells/well. Following 5 days treatment, total RNA was extracted using SV96 Total RNA Isolation kit (Promega). cDNA production from RNA samples were performed using High-Capacity cDNA Reverse Transcription kit (Thermo Fisher) following manufacturer's instructions and qPCR analysis performed in CFX System using iQ Multiplex Powermix (Bio-Rad). For human APP mRNA, the following qPCR assay were utilized: Thermofisher Taqman qPCR assay ID Hs00169098_m1. Human SFRS9 was used as normalizer (Forward, 5′-TGGAATATGCCCTGCGTAAA-3′; Reverse, 5′-TGGTGCTTCTCTCAGGATAAAC-3′, Probe, 5′-TGGATGACACCAAATTCCGCTCTCA-3′. mRNA knockdown levels were calculated as % mRNA remaining relative to mock treatment.

[1726] Table 181. shows % human APP mRNA remaining (at 3 and 1 uM siRNA treatment) in iCell GABA neurons relative to human SFRS9 control. N=2. N.D.: Not determined.

| | 3 uM | | | 1 uM | | |
|---|---|---|---|---|---|---|
| | % remaining | % remaining | | % remaining | % remaining | |
| | mRNA | mRNA | | mRNA | mRNA | |
| | (hAPP/ | (hAPP/ | | (hAPP/ | (hAPP/ | |
| siRNA | hSFRS9) − 1 | hSFRS9) − 2 | Mean | hSFRS9) − 1 | hSFRS9) − 2 | Mean |
| DSR- | 15.80 | 13.20 | 14.50 | 26.70 | 21.60 | 24.15 |
| 0104213 | | | | | | |
| DSR- | 19.60 | 18.70 | 19.15 | 34.90 | 42.60 | 38.75 |
| 0104223 | | | | | | |
| DSR- | 18.30 | 17.90 | 18.10 | 31.10 | 30.80 | 30.95 |
| 0104222 | | | | | | |
| DSR- | 64.10 | 62.10 | 63.10 | 79.00 | 74.00 | 76.50 |
| 0104221 | | | | | | |
| DSR- | 39.40 | 37.80 | 38.60 | 81.70 | 65.70 | 73.70 |
| 0104220 | | | | | | |
| DSR- | 28.70 | 32.10 | 30.40 | 55.70 | 58.80 | 57.25 |
| 0104219 | | | | | | |
| DSR- | 52.20 | 61.80 | 57.00 | 74.30 | 78.00 | 76.15 |
| 0104218 | | | | | | |
| DSR- | 40.40 | 40.10 | 40.25 | 66.40 | 63.50 | 64.95 |
| 0104217 | | | | | | |
| DSR- | 51.20 | 57.10 | 54.15 | 60.10 | 63.10 | 61.60 |
| 0104216 | | | | | | |
| DSR- | 43.40 | 42.10 | 42.75 | 65.90 | 54.90 | 60.40 |
| 0104215 | | | | | | |
| DSR- | 19.60 | 19.40 | 19.50 | 34.60 | 31.00 | 32.80 |
| 0104214 | | | | | | |

[1727] Table 182. shows % human APP mRNA remaining (at 3 and 1 uM siRNA treatment) in iCell GABA neurons relative to human SFRS9 control. N=2. N.D.: Not determined.

| | 3 uM | | | 1 uM | | |
|---|---|---|---|---|---|---|
| | % remaining | % remaining | | % remaining | % remaining | |
| | mRNA | mRNA | | mRNA | mRNA | |
| | (hAPP/ | (hAPP/ | | (hAPP/ | (hAPP/ | |
| siRNA | hSFRS9) − 1 | hSFRS9) − 2 | Mean | hSFRS9) − 1 | hSFRS9) − 2 | Mean |
| DSR- | 15.80 | 13.20 | 14.50 | 26.70 | 21.60 | 24.15 |
| 0104213 | | | | | | |
| DSR- | 9.20 | 9.10 | 9.15 | 27.00 | 8.30 | 17.65 |
| 0104231 | | | | | | |
| DSR- | 18.90 | 18.90 | 18.90 | 32.20 | 32.60 | 32.40 |
| 0104230 | | | | | | |
| DSR- | 13.80 | 11.70 | 12.75 | 31.70 | 31.10 | 31.40 |
| 0104229 | | | | | | |
| DSR- | 12.20 | 12.70 | 12.45 | 26.10 | 25.60 | 25.85 |
| 0104228 | | | | | | |
| DSR- | 19.20 | 20.60 | 19.90 | 36.80 | 39.90 | 38.35 |
| 0104227 | | | | | | |
| DSR- | 13.30 | 12.80 | 13.05 | 30.00 | 27.40 | 28.70 |
| 0104226 | | | | | | |
| DSR- | 32.30 | 34.70 | 33.50 | 57.60 | 56.80 | 57.20 |
| 0104225 | | | | | | |
| DSR- | 55.10 | 62.80 | 58.95 | 65.60 | 81.40 | 73.50 |
| 0104224 | | | | | | |

[1728] Table 183. shows % human APP mRNA remaining (at 3 and 1 uM siRNA treatment) in iCell GABA neurons relative to human SFRS9 control. N=2. N.D.: Not determined.

| | 3 uM | | | 1 uM | | |
|---|---|---|---|---|---|---|
| | % remaining | % remaining | | % remaining | % remaining | |
| | mRNA | mRNA | | mRNA | mRNA | |
| | (hAPP/ | (hAPP/ | | (hAPP/ | (hAPP/ | |
| siRNA | hSFRS9) − 1 | hSFRS9) − 2 | Mean | hSFRS9) − 1 | hSFRS9) − 2 | Mean |
| DSR- | 15.80 | 13.20 | 14.50 | 26.70 | 21.60 | 24.15 |
| 0104213 | | | | | | |
| DSR- | 18.30 | 18.70 | 18.50 | 43.40 | 51.00 | 47.20 |
| 0104233 | | | | | | |
| DSR- | 15.70 | 15.50 | 15.60 | 21.70 | 28.10 | 24.90 |
| 0104232 | | | | | | |
| DSR- | 11.70 | 10.90 | 11.30 | 28.10 | 27.90 | 28.00 |
| 0103301 | | | | | | |
| DSR- | 32.10 | 31.20 | 31.65 | 62.90 | 57.10 | 60.00 |
| 0104241 | | | | | | |
| DSR- | 50.50 | 47.30 | 48.90 | 64.70 | 76.10 | 70.40 |
| 0104240 | | | | | | |
| DSR- | 38.60 | 39.40 | 39.00 | 55.00 | 61.80 | 58.40 |
| 0104239 | | | | | | |
| DSR- | 25.80 | 26.30 | 26.05 | 55.70 | 56.70 | 56.20 |
| 0104238 | | | | | | |
| DSR- | 25.40 | 21.50 | 23.45 | 50.20 | 55.20 | 52.70 |
| 0104237 | | | | | | |
| DSR- | 24.80 | 24.80 | 24.80 | 61.40 | 66.70 | 64.05 |
| 0104236 | | | | | | |
| DSR- | 29.00 | 28.60 | 28.80 | 58.60 | 62.70 | 60.65 |
| 0104235 | | | | | | |
| DSR- | 21.70 | 23.70 | 22.70 | 51.90 | 59.60 | 55.75 |
| 0104234 | | | | | | |

### Example 18: Synthesis and Deprotection of Stereopure Oligonucleotide Sequences Containing 5′-Phosphonate

### Abbreviation

[1729] ETT: 5-(Ethylthio)-1H-tetrazole
[1730] CMIMT: N-cyanomethylimidazolium triflate
[1731] ADIH: 2-azido-1,3-dimethylimidazolium hexafluorophosphate
[1732] CPG: controlled pore glass
[1733] DCM: dichloromethane, CH₂Cl₂
[1734] ACN: acetonitrile
[1735] IBN: isobutyronitrile
[1736] DMSO: Dimethyl sulfoxide
[1737] MeIm: N-methylimidazole
[1738] TCA: trichloroacetic acid
[1739] TEA: triethylamine
[1740] TEA-3HF: triethylamine trihydrofluoride
[1741] DS1 reagent: TEA-3HF:TEA:H₂O:DMSO=5.0:7.0:14.7:73.3 (v/v/v/v)
[1742] TMSI: Trimethylsilyl iodide
[1743] XH: xanthane hydride
[1744] Ac₂O: acetic anhydride
[1745] Vped5m: 5-(E)-vinylphosphonate-5-deoxy-5methyl

### General Procedure for the Synthesis of Chiral-Oligos (25 μMol Scale)

[1746] The automated solid-phase synthesis of chiral-oligos was performed according to the cycles shown in Table 1 (regular amidite cycle, for PO linkages), Table 2 (DPSE amidite cycle using 2′-deoxy-5′-phosphonate nucleosides, for chiral PS linkages), Table 3 (PSM amidite cycle using 2′-O-methyl and 2′-O-methoxyethyl nucleosides, for chiral PS linkages), Table 4 (PSM amidite cycle, for chiral P^{N} linkages). All the amidites were dissolved into the appropriate solvents (Acetonitrile or 20% isobutyronitrile in 80% acetonitrile), dried at least for 2 h under 4A molecular sieves and then was used in the synthetic cycle. After the last coupling of 5′-phosphonate amidite, the column was washed with 20% DEA in acetonitrile.

TABLE 184
Regular Amidite Synthetic Cycle for PO linkages

| | | | | waiting |
|---|---|---|---|---|
| step | operation | reagents and solvent | volume | time |
| 1 | detritylation | 3% TCA/DCM | 10 mL | 65 s |
| 2 | coupling | 0.2M monomer/20% IBN- | 0.5 mL | 8 min |
| | | MeCN 0.5M ETT/MeCN | 1.0 mL | |
| 3 | oxidation | 50 mM I₂/pyridine-H₂O (9:1, | 2.0 mL | 1 min |
| | | v/v) | | |
| 4 | cap-2 | 20% Ac₂O, 30% 2,6-lutidine/ | 1.0 mL | 45 s |
| | | MeCN 20% MeIm/MeCN | 1.0 mL | |

TABLE 185
DPSE Amidite Synthetic Cycle for chiral PS linkages

| | | | | waiting |
|---|---|---|---|---|
| step | operation | reagents and solvent | volume | time |
| 1 | detritylation | 3% TCA/DCM | 10 mL | 65 s |
| 2 | coupling | 0.2M monomer/20% IBN- | 0.5 mL | 8 min |
| | | MeCN 0.5M CMIMT/MeCN | 1.0 mL | |
| 3 | cap-1 | 20% Ac₂O, 30% 2,6-lutidine/ | 2.0 mL | 2 min |
| | | MeCN | | |
| 4 | sulfurization | 0.2M XH/pyridine | 2.0 mL | 6 min |
| 5 | cap-2 | 20% Ac₂O, 30% 2,6-lutidine/ | 1.0 mL | 45 s |
| | | MeCN 20% MeIm/MeCN | 1.0 mL | |

TABLE 186
PSM Amidite Synthetic Cycle for chiral PS linkages

| | | | | waiting |
|---|---|---|---|---|
| step | operation | reagents and solvent | volume | time |
| 1 | detritylation | 3% TCA/DCM | 10 mL | 65 s |
| 2 | coupling | 0.2M monomer/20% IBN- | 0.5 mL | 8 min |
| | | MeCN 0.5M CMIMT/MeCN | 1.0 mL | |
| 3 | cap-1 | 20% Ac₂O, 30% 2,6-lutidine/ | 2.0 mL | 2 min |
| | | MeCN | | |
| 4 | sulfurization | 0.2M XH/pyridine | 2.0 mL | 6 min |
| 5 | cap-2 | 20% Ac₂O, 30% 2,6-lutidine/ | 1.0 mL | 45 s |
| | | MeCN 20% MeIm/MeCN | 1.0 mL | |

TABLE 187
PSM Amidite Synthetic Cycle for chiral PN linkages (n001)

| | | | | waiting |
|---|---|---|---|---|
| step | operation | reagents and solvent | volume | time |
| 1 | detritylation | 3% TCA/DCM | 10 mL | 65 s |
| 2 | coupling | 0.2M monomer/20% IBN- | 0.5 mL | 8 min |
| | | MeCN 0.5M CMIMT/MeCN | 1.0 mL | |
| 3 | Imidation | 0.5M ADIH/MeCN | 2.0 mL | 6 min |
| 4 | cap-2 | 20% Ac₂O, 30% 2,6-lutidine/ | 1.0 mL | 45 s |
| | | MeCN 20% MeIm/MeCN | 1.0 mL | |

### General Procedure for the 5′-phosphonate Deprotection Conditions (25 μmole)

[1747] To prepare TMSI solution for 5′-phosphonate deprotection, pyridine (0.5 mL) was added to DCM (23.9 mL) and the resulting solution was cooled in ice-bath for 15 minutes. After that TMSI reagent (0.6 mL) was added to the mixture to get a bright yellow solution (total volume 25.0 mL).

TMSI quenching solution (50 mL) was prepared by adding 2-Dodecane thiol (12.0 mL) and TEA (18.0 mL) in acetonitrile (18.0 mL).

[1748] After completion of the synthesis, the CPG solid support was dried and transferred into 50 mL plastic tube. Minimum amount of DCM was added to 5′-Phosphonate containing oligonucleotide on CPG and the CPG was vortexed to get a homogenous slurry. To this homogenous slurry, the TMSI solution (10.0 mL) was added slowly and mixed well. After the addition of total TMSI solution the color of the reaction mixture turns yellow indicating excess of TMSI solution. The resulting reaction mixture was stirred for 30 minutes at room temperature. After 30 min. the support was promptly washed using excess of acetonitrile followed by addition of quenching solution (10.0 mL) and this process was repeated three times (Total quenching volume 30.0 mL). The total time of exposure was limited to 20 min. The CPG was rinsed thoroughly using acetonitrile and drying under vacuum. Afterwards, CPG was subjected to standard cleavage and deprotection condition.

### General Procedure for the C&D Conditions (25 μMol Scale)

[1749] After completion of the synthesis and 5′-phosphonate deprotection, the CPG solid support was dried and transferred into 50 mL plastic tube. The CPG was treated with DS1 reagent (2.5 mL; 100 uL/umol) for 3 h at 27° C., then added conc. NH₃ (5.0 mL; 200 umol/umol) for 24 h at 37° C. The reaction mixture was cooled to room temperature and the CPG was separated by membrane filtration, washed with 15 mL of H₂O. The crude material (filtrate) was analyzed by LTQ and RP-UPLC.

| | Crude ODs/μmol | calcd. [M] | found [M] | UPLC purity |
|---|---|---|---|---|
| SSR-0106222 | 64.94 O.D./μmole | 8014.8 | 8013.2 | 25.95% |
| SSR-0106517 | 34.0 O.D./μmole | 7998.8 | 7998.9 | 25.60% |

### Example 19: Synthesis of 5′-PO(OEt)₂ Vinyl Phosphonate-dT (WV-NU-017)

[chemical structure]

[chemical structure]

[chemical structure]

### 1. Preparation of Compound 2

[chemical structure]

[1750] Two batches: To a solution of compound 1 (150 g, 275.43 mmol) and imidazole (56.25 g, 826.30 mmol) in DCM (2 L) was added TBSCl (83.03 g, 550.87 mmol, 67.50 mL). The mixture was stirred at 15° C. for 16 hr. TLC showed compound 1 was consumed. Two batches: The mixture was washed with sat. NaHCO₃ (aq., 2 L * 2), the combined aqueous was extracted with EtOAc (500 mL*2), the combined organic was dried over Na₂SO₄, filtered and concentrated to give crude. Compound 2 (362 g, crude) was obtained as a yellow oil.

[1751] TLC (Petroleum ether/Ethyl acetate=1:1, 5% TEA) R_{f}=0.39.

### 2. Preparation of Compound 3

[chemical structure]

[1752] A solution of compound 2 (362 g, 549.44 mmol) in H₂O (360 mL) and CH₃COOH (1440 mL), the mixture was stirred at 15° C. for 16 hr. TLC showed compound 2 was consumed. The mixture was added sat. NaHCO₃ (aq., 3000 mL), and the organic layer was separated and the aqueous layer extracted with EtOAc (2000 mL*3), the combined organic was dried over Na₂SO₄, filtered and concentrated to get the crude. The residue was purified by silica gel chromatography (SiO₂, Petroleum ether:Ethyl acetate=30:1 to 1:2) to give compound 3 (185 g, 94.45% yield) was obtained as a white solid.

[1753] TLC (Petroleum ether:Ethyl acetate=1:1) Rf=0.24.

### 3. Preparation of Compound 4

[chemical structure]

[1754] To a solution of compound 3 (110 g, 308.57 mmol) in DCM (500 mL) was added DMP (157.05 g, 370.28 mmol, 114.64 mL) in portions at 0° C. The mixture was stirred at 30° C. for 2 hr. TLC showed most of compound 3 was disappeared and a new spot was found. Two batches: The mixture was added 5% Na₂S₂O₃ (2000 mL) at 0° C., the mixture was stirred at 0° C. for 20 min then sat. NaHCO₃ (2000 mL) was added, the mixture was extracted with DCM (2000 mL*4) and Ethyl acetate (2000 mL*4), the combined organic was dried over Na₂SO₄, filtered, and concentrated to get compound 4 (190 g, crude) was obtained as a white solid.

[1755] TLC (Petroleum ether:Ethyl acetate=1:3) R_{f}=0.36.

### 4. Preparation of Compound 5

[chemical structure]

[1756] To a solution of compound 4A (216.28 g, 750.41 mmol) in THF (400 mL) was added t-BuOK (1 M, 750 mL) at 0° C. and stirred at 0° C. for 10 min, then warmed up to 20° C. for 2 hr. The above mixture was added to the solution of compound 4 (190 g, 536.01 mmol) in THF (400 mL) at 0° C. The reaction mixture was stirred at 0° C. for 1 hr and then allowed to warm up to 20° C. in 6 hr. TLC showed the reaction was complete. To the reaction mixture water (1000 mL) was added and extracted with EtOAc (2000 mL*4) and DCM (1000 mL*3). The organic phase was dried over Na₂SO₄, filtered, and concentrated to give residue. The residue was purified by column chromatography (SiO₂, Petroleum ether:Ethyl acetate=10:1 1:1, 0:1) to give compound 5 (250 g, crude) was obtained as a yellow oil.

[1757] TLC (Petroleum ether/Ethyl acetate=1:2), R_{f}=0.32.

### 5. Preparation of WV-NU-017

[chemical structure]

[1758] To a solution of compound 5 (243 g, 497.35 mmol) in THF (1300 mL) was added TEA.3HF (320.71 g, 1.99 mol, 324.28 mL). The mixture was stirred at 15° C. for 16 hr. TLC (Petroleum ether: (Ethyl acetate: Ethyl Alcohol=3:1)=1:1, R_{f}=0.18) showed a few of compound 5 was remained and new spot was detected. The reaction mixture was concentrated under reduced pressure and the mixture was neutralized with Na₂CO₃ (aq., sat., ˜1 L) until pH=7. The mixture was concentrated under reduced pressure to removed most of water. The mixture was added EtOAc:EtOH=10:1 (1 L * 2) and dried over Na₂SO₄, filtered and concentrated under reduced pressure to give a residue. The residue was purified by column chromatography (SiO₂, (Ethyl acetate:Ethyl Alcohol=3:1)/Petroleum ether=5%, 10%, 15%, 20%, 25%, 30%, 40%, 50%) to give compound WV-NU-017 (76 g, 38.51% yield) was obtained as a white solid.

[1759] ¹H NMR (400 MHz, CDCl₃) δ=9.59 (br s, 1H), 7.13 (d, J=1.1 Hz, 1H), 7.09-6.94 (m, 1H), 6.41 (t, J=6.6 Hz, 1H), 6.03 (ddd, J=1.8, 17.4, 19.6 Hz, 1H), 4.76 (br d, J=4.0 Hz, 1H), 4.50 (br d, J=2.4 Hz, 1H), 4.39 (br d, J=2.0 Hz, 1H), 4.21-4.00 (m, 4H), 2.43 (ddd, J=4.5, 6.3, 13.8 Hz, 1H), 2.18 (td, J=6.9, 13.8 Hz, 1H), 2.02-1.86 (m, 3H), 1.38-1.30 (m, 6H).

[1760] ³¹P NMR (162 MHz, CDCl₃) δ=17.71.

[1761] ¹³C NMR (101 MHz, CDCl₃) δ=163.76, 150.63, 149.04, 135.29, 118.47, 116.58, 111.67, 85.87, 85.65, 85.07, 73.91, 62.23, 39.15, 16.38, 12.66.

[1762] LCMS (M−H⁺): 373.1, purity: 94.34%.

[1763] TLC (Petroleum ether: (Ethyl acetate: Ethyl Alcohol=3:1)=1:1) R_{f}=0.18;

### Example 20: Synthesis of 5′-PO(OMe)₂ Vinyl Phosphonate-dT (WV-NU-010), and 5′-PO(OMe)₂ Vinyl Phosphonate-3′-CNE-dT Phosphoramidite (WV-NU-10-CNE)

[chemical structure]

[chemical structure]

[chemical structure]

[chemical structure]

### 2. Preparation of Compound 2

[chemical structure]

[1764] To a solution of compound 1 (100.00 g, 183.62 mmol) and imidazole (37.50 g, 550.86 mmol) in DCM (1.00 L) was added TBSCl (55.35 g, 367.24 mmol) at 0° C., and the mixture was stirred at 18° C. for 14 hr. TLC showed the starting material was consumed. The mixture was washed with sat. NaHCO₃ (200 mL) and brine (100 mL), dried over Na₂SO₄, filtered and concentrated to get the compound 2 as a white solid (120.98 g, crude). The mixture was used for next step directly without any purification.

[1765] TLC (Ethyl acetate/Petroleum ether=3:1, 5% TEA) Rf=0.43.

### 2. Preparation of Compound 3 & Compound 3A

[chemical structure]

[1766] To a solution of TFA (41.85 g, 367.00 mmol) and Et₃SiH (64.01 g, 550.50 mmol) in DCM (1.20 L) was added compound 2 (120.9 g, 183.50 mmol) dissolved in DCM (200.00 mL), and the mixture was stirred at 15° C. for 0.5 h. TLC showed the starting material was consumed. The mixture was added sat. NaHCO₃ (aq, 300 mL), and the organic phase was separated and the aqueous layer extracted with DCM (200 mL*3), the combined organic was dried over Na₂SO₄, filtered and concentrated to get the crude. The residue was purified by MPLC (Petroleum ether/Ethyl acetate=10:1 to 1:2) to get compound 3 as a white solid (36 g, 55.04% yield) and compound 3A as a white solid (50 g, crude).

[1767] ¹H NMR (400 MHz, CDCl₃) δ=9.08 (s, 1H), 6.04 (t, J=6.8 Hz, 1H), 4.37 (td, J=3.5, 6.5 Hz, 1H), 3.84-3.74 (m, 2H), 3.67-3.58 (m, 1H), 2.22 (td, J=6.8, 13.4 Hz, 1H), 2.13-2.03 (m, 1H), 1.78 (s, 3H), 0.81-0.77 (m, 3H), 0.77 (s, 9H), −0.04 (s, 6H);

[1768] TLC (Petroleum ether/Ethyl acetate=1:1) Rf=0.24.

### 3. Preparation of Compound 3

[chemical structure]

[1769] To a solution of compound 3A (50 g, 106.21 mmol) in the mixture of HOAc (210.00 g, 3.50 mol) and H₂O (50 mL), the mixture was at 18° C. for 0.5 h. TLC showed the starting material was consumed. The mixture was added Na₂CO₃ (aq) until PH>8, and the residue was extracted the EtOAc (200 mL*3). The mixture was purified by MPLC (Petroleum ether/Ethyl acetate=10:1, 1:1) to get compound 3 as a white solid (30 g, 79.23% yield).

[1770] ¹H NMR (400 MHz, CDCl₃) δ=8.98 (br s, 1H), 7.38 (s, 1H), 6.15 (t, J=6.8 Hz, 1H), 4.50 (td, J=3.5, 6.6 Hz, 1H), 3.96-3.88 (m, 2H), 3.81-3.67 (m, 1H), 2.81-2.69 (m, 1H), 2.39-2.17 (m, 2H), 1.91 (s, 3H), 0.99-0.84 (m, 9H), 0.09 (s, 6H).

### 4. Preparation of Compound 4

[chemical structure]

[1771] To a solution of compound 3 (10 g, 28.05 mmol) in DCM (160 mL) was added DMP (14.28 g, 33.66 mmol, 10.42 mL) at 0° C. The mixture was stirred at 0-25° C. for 3 hr. TL C showed most of the starting material was disappeared and a new spot was found. The mixture was added 5% Na₂S₂O₃ (300 mL) at 0° C., the mixture was stirred at 0° C. for 20 min then sat. NaHCO₃ (300 mL) was added, the mixture was extracted with DCM (200 mL*3), the combined organic was dried over Na₂SO₄, filtered and concentrated to get the compound 4 as a yellow oil (10 g, crude). The mixture was used for next step without any purification.

[1772] TL C (Petroleum ether/Ethyl acetate=1:1) Rf=0.38.

### 5. Preparation of Compound 5

[chemical structure]

[1773] To a solution of compound 4A (7.20 g, 31.03 mmol) in THF (20 mL) was added t-BuOK (1 M, 31.03 mL) at 0° C. and stirred at 0° C. for 10 min, then warmed up to 20° C. for 30 min. The above mixture was added to the solution of compound 4 (10 g, 28.21 mmol) in THF (20 mL) at 0° C. The reaction mixture was stirred at 0° C. for 1 h and then allowed to warm up to 20° C. in 20 min. LCMS and TLC showed the reaction was complete. To the reaction mixture water (20 mL) was added to the reaction and extracted with EtOAc (30 mL*4). The organic phase was dried (Na₂SO₄), filtered and concentrated. The residue was purified by column chromatography MPLC (Petroleum ether/Ethyl acetate=10:1 to 1:4) to get compound 5 as a white solid (12 g, 92.36% yield). The mixture of 10 g crude was purified with the product together.

[1774] ¹H NMR (400 MHz, CDCl₃) δ=8.82 (br s, 1H), 7.09 (s, 1H), 6.94-6.78 (m, 1H), 6.33 (t, J=6.7 Hz, 1H), 5.99 (ddd, J=1.6, 17.4, 19.2 Hz, 1H), 4.41-4.24 (m, 2H), 3.76 (dd, J=3.8, 11.1 Hz, 5H), 2.33-2.23 (m, 1H), 2.13 (td, J=6.8, 13.6 Hz, 1H), 1.96-1.89 (m, 3H), 0.94-0.80 (m, 10H), 0.14-0.03 (m, 6H);

[1775] TLC (Dichloromethane:Methanol=20:1) Rf=0.36.

### 6. Preparation of WV-NU-010

[chemical structure]

[1776] To a solution of compound 5 (13 g, 28.23 mmol) in THF (80 mL) was added N, N-diethylethanamine; trihydrofluoride (22.75 g, 141.14 mmol). The mixture was stirred at 18° C. for 12 hour. TLC showed a few of the starting material was remained and the desired substance was found. The reaction mixture was concentrated under reduced pressure and the mixture was neutralised with Na₂CO₃ (aq. sat) until pH=7. The water phase was freeze-dried. The freeze-drying solid was washed with DCM:MeOH=10:1 (300 mL*2). The organic phase was concentrated. The residue obtained was purified by column chromatography on silica gel (Dichloromethane:Methanol=100:1, 100:8) to get WV—NU-010 as a white solid (6.25 g, 62.54% yield). The mixture was purified with another batch (8 g scale). We got the WV-NU-010 10 g as a white solid in total.

[1777] ¹H NMR: (400 MHz, CDCl₃) δ=9.54 (br s, 1H), 7.13-6.98 (m, 2H), 6.39 (t, J=6.7 Hz, 1H), 6.06-5.96 (m, 1H), 4.61 (br d, J=4.0 Hz, 1H), 4.50 (br d, J=2.4 Hz, 1H), 4.44-4.36 (m, 1H), 3.79-3.71 (m, 6H), 2.43 (ddd, J=4.5, 6.4, 13.8 Hz, 1H), 2.21 (td, J=6.9, 13.7 Hz, 1H), 1.93 (s, 3H);

[1778] ³¹PNMR: (162 MHz, CDCl₃): δ=20.54 (s, 1P);

[1779] LCMS: (M+H⁺): 347.0 LCMS purity: 97.81%;

[1780] ¹³CNMR: (101 MHz, CDCl₃) δ=163.95, 150.75, 150.12, 150.06, 135.38, 116.99, 115.10, 111.65, 85.82, 85.61, 85.14, 73.93, 52.69, 39.00, 12.61;

[1781] HPLC: HPLC purity: 98.25%;

[1782] TLC (Dichloromethane/Methanol) Rf=0.24.

### 7. Preparation of WV-NU-10-CNE-Phosphoramidite

[chemical structure]

[1783] WV-NU-010 (4.9 g, 14.15 mmol) was co-evaporated with anhydrous toluene two times (25 mL×2) and dried under high vacuum for 1 h.

[1784] To a solution of WV-NU-010 (4.9 g, 14.15 mmol) in DMF (35 mL) was added 5-ethylsulfanyl-2H-tetrazole (1.84 g, 14.15 mmol), 1-methylimidazole (2.32 g, 28.30 mmol) and compound 1A (6.40 g, 21.23 mmol). The reaction mixture was stirred at 20° C. under N₂ for 1 h. TLC showed the starting material was consumed and the desired substance was found. The reaction mixture was diluted with EtOAc (60 mL). The reaction mixture was washed with aq. saturated. NaHCO₃ solution (50 mL*4), dried over Na₂SO₄, filtered and concentrated under reduced pressure. The column was eluted with Petroleum ether/Ethyl acetate (5% TEA 10 mins) and then Petroleum ether (5 mins). The residue thus obtained was purified by silica gel column chromatography (elution with Petroleum ether:EtOAc=10:1, 1:1 and then EtOAc/Acetonitrile=50:1, 30:1) to get WV-NU-10-CNE-Phosphoramidite as a white solid (4.4 g, 54.14% yield).

[1785] ¹H NMR: (400 MHz, CDCl₃) δ=8.96 (br s, 1H), 7.08 (s, 1H), 7.03-6.81 (m, 1H), 6.42-6.33 (m, 1H), 6.01 (dddd, J=1.8, 8.7, 17.3, 19.3 Hz, 1H), 4.58-4.38 (m, 2H), 3.94-3.81 (m, 1H), 3.80-3.70 (m, 7H), 3.68-3.53 (m, 2H), 2.81-2.71 (m, 1H), 2.71-2.61 (m, 2H), 2.54-2.39 (m, 1H), 2.23 (dtd, J=5.0, 6.8, 13.8 Hz, 1H), 1.93 (s, 3H), 1.22-1.15 (m, 12H);

[1786] ³¹PNMR: (162 MHz, CDCl₃) δ=149.34 (s, 1P), 149.32 (s, 1P), 20.04 (s, 1P), 19.68 (s, 1P), 14.12 (s, 1P);

[1787] LCMS: (M−H⁺): 545.1, LCMS purity: 93.80%;

[1788] ¹³CNMR: (101 MHz, CDCl₃) δ=163.84, 163.82, 150.58, 150.51, 148.58, 135.10, 135.02, 129.31, 118.68, 118.19, 117.80, 117.65, 116.79, 116.31, 111.73, 84.78, 84.74, 84.61, 84.53, 84.49, 84.39, 84.32, 75.66, 60.34, 58.05, 52.60, 52.54, 52.50, 52.47, 43.31, 38.42, 38.37, 24.59, 24.48, 24.45, 24.53, 20.45, 20.37, 20.36, 20.28, 14.16, 12.50, 12.48;

[1789] HPLC: HPLC purity: 95.15%;

[1790] TLC (Dichloromethane/Methanol) Rf=0.06.

### Example 21: Synthesis of 5′-(R)-Me-PO(OMe)2-Phosphonate-dT (WV-NU-128), and 5′-(R)-Me-PO(OMe)2-Phosphonate-3′-CNE-dT Phosphoramidite (WV-NU-128-CNE)

[chemical structure]

[chemical structure]

### 1. Preparation of Compound 12

[chemical structure]

[1791] To a solution of NaH (4.78 g, 119.40 mmol, 60% purity) in THF (360 mL) was added bis(dimethoxyphosphoryl)methane (46.19 g, 119.40 mmol) in THF (200 mL) at 0° C. The reaction mixture was warmed up to 20° C., and stirred for 1 hr. A solution of LiBr (10.37 g, 119.40 mmol) in THF (200 mL) was added and the resultant slurry was stirred, and then cooled to 0° C. To the above mixture was added a solution of compound 7 (20 g, 54.27 mmol) in THF (200 mL) at 0° C. The mixture was stirred at 0-20° C. for 11 hr. TLC indicated compound 7 was consumed and two new spots formed. The resulting mixture was diluted with water (300 mL), extracted with EtOAc (300 mL*3). The combined organic layers were dried over anhydrous Na₂SO₄, filtered and concentrated to afford a yellow oil. The crude compound 12 (25 g, crude) was obtained as a yellow oil. The residue was purified by column chromatography (SiO₂, Petroleum ether/Ethyl acetate=1/10 to 0/1, then ethyl acetate/Methanol=10/1). Compound 12 (6.1 g, 24.40% yield) was obtained as a white solid.

[1792] LCMS: M+H⁺=475.2

[1793] TLC: (Ethyl acetate:Petroleum ether=3:1), R_{f}=0.20

### 2. Preparation of Compound 13

[chemical structure]

[1794] To a solution of compound 12 (6.1 g, 12.85 mmol) in THF (61 mL) was added 3HF·TEA (8.29 g, 51.42 mmol). The mixture was stirred at 25° C. for 12 hr. TLC indicated compound 12 was consumed and one new spot formed. The reaction mixture was quenched by addition sat. NaHCO₃ aq. (60 mL) and NaHCO₃ solid to pH=7˜8 and stirred 20 min. The mixture was dried over Na₂SO₄, and concentrated under reduced pressure to give a residue. The crude compound 13 (4.4 g, crude) was obtained as a yellow oil.

[1795] TLC: (Petroleum ether:Ethyl acetate=0:1) R_{f}=0

### 3. Preparation of Compound WV-NU-128

[chemical structure]

[1796] To a solution of compound 13 (5 g, 13.88 mmol) in MeOH (220 mL) were added Josiphos SL-J216-1 (425 mg, 1.39 mmol) (1Z,5Z)-cycloocta-1,5-diene; rhodium(1+); tetrafluoroborate (230 mg) and zinc; trifluoromethanesulfonate (2.06 g, 5.55 mmol). The mixture was stirred at 25° C. for 12 hr in H₂ (50 psi). LCMS showed the compound 13 was consumed and the main peak was desired. The reaction mixture was concentrated under reduced pressure to remove solvent. The residue was purified by column chromatography (SiO₂, Petroleum ether/Ethyl acetate=1/0 to 0/1 then ethyl acetate/methanol=10:1). The crude compound WV-NU-128 (4 g, 79.55% yield) was obtained as a yellow solid.

[1797] LCMS: M+H⁺=363.2

[1798] TLC: (Ethyl acetate:Methanol=10:1), R_{f}=0.36.

### 4. Preparation of Compound WV-RA-128-CNE

[chemical structure]

[1799] To a solution of compound WV-NU-128 (4 g, 11.04 mmol) in DMF (28 mL) was added 5-ethylsulfanyl-2H-tetrazole (1.44 g, 11.04 mmol) and 1-methylimidazole (1.81 g, 22.08 mmol), then added 3-bis(diisopropylamino)phosphanyloxypropanenitrile (4.99 g, 16.56 mmol). The mixture was stirred at 25° C. for 2 hr. TLC indicated compound WV-NU-128 was consumed and two new spots formed. The reaction mixture was added sat. NaHCO₃ aq. (50 mL) at 0° C., and then diluted with EtOAc (20 mL) and extracted with EtOAc (20 mL*3), dried over Na₂SO₄, filtered and concentrated under reduced pressure to give a residue. The residue was purified by column chromatography (SiO₂, Petroleum ether/Ethyl acetate=1/0 to 0/1, then Ethyl acetate/Acetonitrile=10/1, 5% TEA). Compound WV-RA-128-CNE (2.5 g, 40.25% yield) was obtained as a yellow oil.

[1800] ¹H NMR (400 MHz, CDCl₃) δ=7.11 (d, J=1.0 Hz, 1H), 6.29-6.15 (m, 1H), 4.44-4.29 (m, 1H), 3.93-3.79 (m, 2H), 3.75 (dd, J=5.9, 10.8 Hz, 7H), 3.63 (br d, J=2.5 Hz, 2H), 2.74-2.60 (m, 2H), 2.53-2.36 (m, 1H), 2.34-2.21 (m, 1H), 2.19-2.06 (m, 2H), 1.93 (s, 3H), 1.78-1.61 (m, 1H), 1.21-1.09 (m, 15H)

[1801] ¹³C NMR (101 MHz, CDCl₃) δ=163.54, 135.21, 135.05, 111.51, 83.59, 83.50, 77.36, 77.05, 76.72, 52.35, 52.32, 43.34 (dd, J=7.3, 12.5 Hz, 1C), 30.82, 29.10, 24.66, 24.63, 24.59, 24.50 (dd, J=2.9, 8.1 Hz, 1C), 16.21, 12.60

[1802] LCMS: M−H⁺=561.2, purity 93.7%

[1803] TLC: (Ethyl acetate:Methanol=8:1) R_{f}=0.45

### Example 22: Synthesis of 5′-Me-PO(OEt)2-Vinylphosphonate-dT (WV-NU-038)

[chemical structure]

[chemical structure]

### 1. Preparation of Compound 2

[chemical structure]

[1804] To a solution of compound 1 (15 g, 42.08 mmol) in the mixture of ACN (60 mL) and H₂O (60 mL) was added PhI(OAc)₂ (29.82 g, 92.57 mmol) and TEMPO (1.32 g, 8.42 mmol) at 20° C. The mixture was stirred at 20° C. for 2 hr. TLC showed the reaction was completed. The resulting mixture was concentrated to dry to give a residue, which was triturated with ACN (100 mL), filtered, and the filter cake was rinse with ACN (50 mL) and dried to give compound 2 (10.6 g, 68.00% yield) as a white solid. The combined filtrate was concentrated under reduced pressure and dried to give another part of crude product (7.4 g).

[1805] TLC (Ethyl acetate/Petroleum ether=1:1) Rf=0.01.

### 2. Preparation of Compound 3

[chemical structure]

[1806] To a solution of crude compound 2 (7.4 g, 19.97 mmol) in DCM (70 mL) was added DIEA (5.16 g, 39.95 mmol, 6.96 mL) and pivaloyl chloride (3.13 g, 25.97 mmol). The mixture was stirred at −10-0° C. for 1.5 hr. TLC showed the reaction was almost completed. The crude brown color solution of compound 3 (9.08 g, 100.00% yield) in DCM was used directly for the next step.

[1807] TLC (Ethyl acetate/Petroleum ether=1:1) Rf=0.28.

### 3. Preparation of Compound 4

[chemical structure]

[1808] To the crude solution of compound 3 (9.08 g, 19.97 mmol) in DCM from the last step was added TEA (6.06 g, 59.92 mmol) followed by N-methoxymethanamine; hydrochloride (5.85 g, 59.92 mmol) at 0° C. The mixture was stirred at 0° C. for 1 hr. TLC showed the reaction was almost completed. The resulting mixture was washed with HCl (1N, 60 mL*2) and then aqueous NaHCO₃ (50 mL*2). The combined organic layers were dried over anhydrous Na₂SO₄, filtered and concentrated to get the product as a crude brown solid (10 g). The crude was purified by column chromatography on silica gel (Petroleum ether:Ethyl acetate, 10%˜60%). Compound 4 (2.7 g, 6.53 mmol, 32.69% yield) was obtained as a white solid.

[1809] TLC (Petroleum ether/Ethyl acetate=1:1) Rf=0.43.

### 4. Preparation of Compound 5

[chemical structure]

[1810] To a solution of compound 4 (17.2 g, 41.59 mmol) in THF (170 mL) was added MeMgBr (3 M, 27.73 mL) at 0° C. The mixture was stirred at 0° C. for 1.5 hr. TLC showed the reaction was completed. The resulting mixture was poured into sat. NH₄Cl aq. (300 mL) under stirring, extracted with EtOAc (100 mL*3). The combined organic layers were dried over anhydrous Na₂SO₄, filtered and concentrated to give a light yellow gum. The crude product was purified by column chromatography on silica gel (Petroleum ether:Ethyl acetate=8:1, 4:1, 2:1). Compound 5 (10.9 g, 67.14% yield, >94.4% purity) was obtained as a white solid.

[1811] HNMR (400 MHz, CDCl₃) Shift=8.76 (br s, 1H), 7.95 (s, 1H), 6.41 (dd, J=5.7, 7.9 Hz, 1H), 4.55-4.41 (m, 2H), 2.33-2.21 (m, 4H), 2.03-1.87 (m, 4H), 0.92 (s, 9H), 0.14 (d, J=3.5 Hz, 6H)

[1812] LCMS (M+H⁺) 369.3;

[1813] TLC (Petroleum ether/EtOAc=1:1, two times) Rf=0.63.

### 5. Preparation of Compound 6

[chemical structure]

[1814] To a suspension of NaH (4.78 g, 119.40 mmol, 60% purity) in THF (100 mL) was added compound 5A (34.41 g, 119.40 mmol) in THF (100 mL) at 0° C. The reaction mixture was warmed up to 20° C., and stirred for 1 hr. A solution of LiBr (10.37 g, 119.40 mmol) in THF (100 mL) was added, and the resultant slurry was stirred, and then cooled to 0° C. To the above mixture was added a solution of compound 5 (20 g crude, 54.27 mmol) in THF (100 mL) at 0° C. The reaction mixture was stirred at 0° C. for 1 hr and then allowed to warm up to 20° C., and stirred at 20° C. for 64 hr. TLC showed compound 5 was remained and one main spot was detected. The resulting mixture was diluted with water (400 mL), extracted with EtOAc (400 mL*3). The combined organic layers were dried over anhydrous Na₂SO₄, filtered and concentrated to afford a yellow oil. The residue was purified by flash silica gel chromatography (ISCO@; 220 g SepaFlash@Silica Flash Column, Eluent of 0˜50% Ethyl acetate/Petroleum ethergradient @100 mL/min). Compound 6 (6.7 g, 21.69% yield, 88.3% purity) was obtained as a yellow oil.

[1815] LCMS: (M+H⁺):503.1;

[1816] TLC (Petroleum ether/Ethyl acetate=1:3) Rf=0.11.

### 6. Preparation of Compound WV-NU-038

[chemical structure]

[1817] To a solution of compound 6 (6.4 g, 12.73 mmol) in THF (64 mL) was added TEA·3HF (8.38 g, 50.93 mmol). The mixture was stirred at 15° C. for 12 hr. LCMS showed compound 6 was remained and one main peak with desired mass was detected. The reaction mixture was quenched by addition NaHCO₃ (aq., sat. 64 mL), and then extracted with Ethyl acetate (70 mL*3). The combined organic layers were dried over Na₂SO₄, filtered and concentrated under reduced pressure to give a residue. The residues was purified by flash silica gel chromatography (ISCO®; 80 g SepaFlash® Silica Flash Column, Eluent of 0˜60% Ethyl acetate/Petroleum ethergradient @100 mL/min). The compound WV—NU-038 (2.85 g, 56.35% yield, 97.78% purity) was yellow solid.

[1818] 1H NMR (400 MHz, CHLOROFORM-d) 6=9.61 (s, 1H), 7.14 (s, 1H), 6.36 (t, J=6.8 Hz, 1H), 5.78 (d, J=17.9 Hz, 1H), 4.56 (br s, 1H), 4.36 (br s, 1H), 4.26 (br d, J=4.0 Hz, 1H), 4.13-3.96 (m, 4H), 2.36 (ddd, J=4.0, 6.3, 13.7 Hz, 1H), 2.25-2.12 (m, 4H), 1.92 (s, 3H), 1.38-1.28 (m, 7H)).

[1819] 13C NMR (101 MHz CDCl₃,) δ=163.77, 158.00, 157.92, 150.70, 135.49, 112.27, 111.75, 88.91, 88.69, 84.46, 73.57, 61.81, 61.65, 39.18, 16.61, 16.54, 16.41, 16.35, 16.30, 12.63).

[1820] 31P NMR (162 MHz, CDCl₃) δ=17.63 (s, 1P).

[1821] LCMS: (M+H)=389.1; LCMS purity: 99.2%.

### Example 23: Synthesis of 5′-(R)-Me-PO(OEt)₂-dT (WV-NU-037) and 5′-(S)-Me-PO(OEt)₂-dT (WV-NU-037A)

[chemical structure]

[chemical structure]

[chemical structure]

### 1. Preparation of Compound 1

[chemical structure]

[1822] To a solution of compound WV-NU-041 (150 g, 420.77 mmol) in the mixture of ACN (600 mL) and H₂O (600 mL) was added PhI(OAc)₂ (298.17 g, 925.70 mmol) and TEMPO (13.23 g, 84.15 mmol). The mixture was stirred at 20° C. for 2 hr. TLC showed the reaction was completed. The resulting mixture was concentrated to dry to give a residue, which was triturated with ACN (550 mL), filtered, and the filter cake was rinsed with ACN (300 mL) and dried to give compound 1 (113.4 g, 72.75% yield) as a white solid.

[1823] ¹H NMR (400 MHz, METHANOL-d₄) δ=8.28 (s, 1H), 6.44 (dd, J=5.0, 9.0 Hz, 1H), 4.69 (d, J=4.4 Hz, 1H), 4.42 (s, 1H), 2.25 (dd, J=5.0, 13.4 Hz, 1H), 2.09-1.97 (m, 1H), 1.89 (s, 3H), 0.94 (s, 9H), 0.17 (d, J=4.8 Hz, 6H)

[1824] LCMS: (M+H⁺): 371.2

[1825] TLC (Petroleum ether:Ethyl acetate=1:1), Rf=0.00

### 2. Preparation of Compound 2

[chemical structure]

[1826] To a solution of compound 1 (110 g, 296.92 mmol) in DCM (1100 mL) was added DIEA (76.75 g, 593.84 mmol) and 2,2-dimethylpropanoyl chloride (46.54 g, 385.99 mmol). The mixture was stirred at −10-0° C. for 1.5 hr. TLC indicated compound 1 was remained a little and two new spots formed. The crude product compound 2 (134.98 g, 100.00% yield) in DCM was used into the next step without further purification.

### 3. Preparation of Compound 3

[chemical structure]

[1827] To a solution of compound 2 (134.9 g, 296.75 mmol) in DCM was added TEA (90.09 g, 890.26 mmol), then added N-methoxymethanamine; hydrochloride (86.84 g, 890.26 mmol). The mixture was stirred at 0° C. for 2 hr. TLC indicated compound 2 was consumed and one new spot formed. The resulting mixture was washed with HCl (1N, 800 mL*2) and then aqueous NaHCO₃ (600 mL*2). The combined organic layers were dried over anhydrous Na₂SO₄, filtered and concentrated to get the product as a crude white solid. The residue was purified by column chromatography (SiO₂, Petroleum ether/Ethyl acetate=I/O to 0:1). Compound 3 (115 g, 93.71% yield) was obtained as a white solid.

[1828] ¹H NMR (400 MHz, CDCl₃) δ=8.62 (br s, 1H), 8.38 (s, 1H), 6.57 (dd, J=5.1, 9.3 Hz, 1H), 4.81 (s, 1H), 4.48 (br d, J=4.0 Hz, 1H), 3.80-3.72 (m, 3H), 3.25 (s, 3H), 2.23 (dd, J=5.1, 13.0 Hz, 1H), 2.09-2.01 (m, 1H), 1.97 (d, J=1.0 Hz, 3H), 0.91 (s, 9H), 0.10 (d, J=3.8 Hz, 6H)

[1829] LCMS: (M+H⁺): 414.2

[1830] TLC (Petroleum ether:Ethyl acetate=1:1), R_{f}=0.39

### 4. Preparation of Compound 4

[chemical structure]

[1831] To a solution of compound 3 (115 g, 278.09 mmol) in THF (1150 mL) was added MeMgBr (3 M, 185.39 mL). The mixture was stirred at 0° C. for 1.5 hr. TLC indicated compound 3 was consumed and two new spots formed. The resulting mixture was poured into sat. NH₄Cl aq. (1000 mL) under stirring, extracted with EtOAc (500 mL*3). The combined organic layers were dried over anhydrous Na₂SO₄, filtered and concentrated to give a light yellow gum. The residue was purified together with another batch crude (14.5 g-scale of Cpd.3) by column chromatography (SiO₂, Petroleum ether/Ethyl acetate=1/0 to 0:1). Compound 4 (93.2 g, 90.95% yield) was obtained as a white solid.

[1832] ¹H NMR (400 MHz,) CDCl₃ 6=7.96 (s, 1H), 6.41 (dd, J=5.5, 8.2 Hz, 1H), 4.52 (d, J=2.2 Hz, 1H), 4.47 (td, J=2.2, 4.9 Hz, 1H), 2.30-2.23 (m, 4H), 2.00-1.92 (m, 4H), 0.92 (s, 9H), 0.13 (d, J=3.5 Hz, 6H)

[1833] LCMS: (M+H⁺): 369.2

[1834] TLC (Petroleum ether:Ethyl acetate=1:1), R_{f}=0.61

### 5. Preparation of Compound 5

[chemical structure]

[1835] To a solution of NaH (21.49 g, 537.31 mmol, 60% purity) in THF (594 mL) was added 1-[diethoxyphosphorylmethyl(ethoxy)phosphoryl]oxyethane (154.86 g, 537.31 mmol) in THF (594 mL) at 0° C. The reaction mixture was warmed up to 20° C., and stirred for 1 hr. A solution of LiBr (46.66 g, 537.31 mmol) in THF (594 mL) was added and the resultant slurry was stirred, and then cooled to 0° C. To the above mixture was added a solution of compound 4 in THF (468 mL) at 0° C. The mixture was stirred at 0-20° C. for 71 hr. TLC indicated compound 4 was remained a little and three new spots formed. The resulting mixture was diluted with water (100 mL), extracted with EtOAc (100 mL*3). The combined organic layers were dried over anhydrous Na₂SO₄, filtered and concentrated to afford a yellow oil. The residue was purified by column chromatography (SiO₂, Petroleum ether/Ethyl acetate=1/0 to 0:1). Compound 5 (48.74 g, 9.41% yield) was obtained as a yellow oil.

[1836] LCMS: (M+H⁺):503.1

[1837] TLC (Ethyl acetate:Petroleum ether=3; 1), R_{f}=0.28

### 6. Preparation of Compound 6

[chemical structure]

[1838] To a solution of compound 5 (40 g, 79.58 mmol) in MeOH (100 mL) was added Pd/C (8 g, 10% purity) (50% water) and H₂ (15 psi). The mixture was stirred at 20° C. for 2 hr. LCMS showed the compound 5 was consumed and the main peak was desired. Filtered the Pd/C then concentrated under reduced pressure to give a residue. Compound 6 (40.16 g, crude) was obtained as a yellow oil.

[1839] LCMS: (M+H⁺):505.2, 505.1

### 7. Preparation of Compound WV-NU-039

[chemical structure]

[1840] To a solution of compound 6 (40.16 g, 79.58 mmol) in THF (400 mL) was added N,N-diethylethanamine; trihydrofluoride (51.32 g, 318.33 mmol). The mixture was stirred at 25° C. for 16 hr. LCMS showed the compound 6 was consumed and the main peak was desired. The reaction mixture was quenched by addition Na₂CO₃ (aq. sat. 400 mL), and extracted with Ethyl acetate (400 mL*3). The combined organic layers were dried over Na₂SO₄, filtered and concentrated under reduced pressure to give a residue. The residue was purified by column chromatography (SiO₂, Petroleum ether/Ethyl acetate=1/0 to 0:1). Compound WV-NU-039 (30 g, 96.57% yield) was obtained as a yellow oil. Then purified by SFC (column: DAICEL CHIRALPAK ADH (250 mm*30 mm, 5 um); mobile phase: [Neu-ETOH]; B %: 35%-35%, 8.5 min).

[1841] LCMS: (M+H⁺):390.9

### 8. Preparation of Compound NU-037, WV-NU-037A

[chemical structure]

[1842] Compound WV-NU-037 (11.3 g, 37.43% yield, 99.37% purity) was obtained as a white solid.

[1843] ¹H NMR (400 MHz CDCl₃,) δ=9.49-9.10 (m, 1H), 7.11 (d, J=1.1 Hz, 1H), 6.22 (t, J=6.6 Hz, 1H), 4.54 (br d, J=4.9 Hz, 1H), 4.28 (br dd, J=4.0, 7.3 Hz, 1H), 4.20-4.00 (m, 4H), 3.68 (dd, J=5.1, 7.3 Hz, 1H), 2.38 (ddd, J=4.5, 6.6, 13.8 Hz, 1H), 2.29-1.97 (m, 3H), 1.93 (s, 3H), 1.83-1.63 (m, 1H), 1.34 (dt, J=3.7, 7.1 Hz, 6H), 1.17 (d, J=6.6 Hz, 3H).

[1844] ¹³C NMR (101 MHz, CDCl₃ 6=163.91, 150.51, 135.20, 111.30, 89.49, 89.36, 83.53, 72.16, 61.94 (dd, J=6.6, 13.2 Hz, 1C), 58.29, 40.29, 31.55, 31.52, 29.95, 28.56, 18.38, 17.77, 17.69, 16.47, 16.40, 12.71

[1845] LCMS: (M+H⁺): 391.1; LCMS purity: 99.37%

[1846] SFC: (AD-3_EtOH_IPAm_10-40_Gradient 4 ml), SFC purity=100.00%;

[1847] Compound WV-NU-037A (16.2 g, 54.00% yield, 100% purity) was obtained as a white solid.

[1848] ¹HNMR (400 MHz, CDCl₃) δ=8.93 (s, 1H), 7.19 (d, J=1.1 Hz, 1H), 6.29 (dd, J=6.3, 7.6 Hz, 1H), 4.35 (qd, J=3.5, 7.1 Hz, 1H), 4.22-4.02 (m, 4H), 3.88-3.75 (m, 2H), 2.37 (ddd, J=3.2, 6.1, 13.8 Hz, 1H), 2.31-2.14 (m, 1H), 2.13-2.02 (m, 2H), 1.95 (d, J=0.9 Hz, 3H), 1.69 (ddd, J=8.2, 15.4, 18.7 Hz, 1H), 1.34 (dt, J=5.5, 6.9 Hz, 6H), 1.17 (d, J=6.6 Hz, 3H).

[1849] ¹³CNMR (101 MHz, CDCl₃) δ=163.88, 150.59, 135.33, 111.59, 89.39, 89.26, 83.94, 71.49, 61.84 (dd, J=6.2, 20.2 Hz, 1C), 40.02, 31.41, 31.38, 29.15, 27.75, 17.12, 17.06, 16.45 (dd, J=2.2, 5.9 Hz, 1C), 12.53

[1850] LCMS: (M+H⁺): 391.1; LCMS purity: 100%

[1851] SFC: (AD-3_EtOH_IPAm_10-40_Gradient_4 ml), SFC purity=100.00%.

### Example 24: Modified Method of Synthesis of 5′-(R)-Me-PO(OEt)₂-phosphonate-dT (WV-NU-037)

[chemical structure]

[chemical structure]

### 1. Preparation of Compound 5

[chemical structure]

[1852] To a solution of NaH (23.88 g, 597.02 mmol, 60% purity) in THF (900 mL) was added compound 4A (172.07 g, 597.02 mmol) in THF (500 mL) at 0° C. The reaction mixture was warmed up to 20-30° C., and stirred for 1 hr. A solution of LiBr (51.85 g, 597.02 mmol) in THF (500 mL) was added and the resultant slurry was stirred, and then cooled to 0° C. To the above mixture was added a solution of compound 4 (50 g, 135.69 mmol) in THF (500 mL) at 0° C. The mixture was stirred at 0-15° C. for 11 hr. TLC indicated compound 4 was consumed completely and desired spot formed. The resulting mixture was diluted with water (500 mL), extracted with EtOAc (500 mL*3). The combined organic layers were dried over anhydrous Na₂SO₄, filtered and concentrated to afford a yellow oil. The residue was purified by column chromatography (SiO₂, Petroleum ether/Ethyl acetate=5/1 to 1:1). Compound 5 (63 g, 90.44% yield, 97.9% purity) was obtained as a yellow solid.

[1853] ¹H NMR (400 MHz, CDCl₃) δ=8.98 (br s, 1H), 7.05 (s, 1H), 6.24 (t, J=6.8 Hz, 1H), 5.71 (d, J=17.2 Hz, 1H), 4.23-3.97 (m, 8H), 2.25-2.12 (m, 1H), 2.11-2.03 (m, 4H), 1.88 (s, 3H), 1.30-1.07 (m, 9H), 0.83 (s, 9H), 0.04-0.00 (m, 7H).

[1854] LCMS: (M+H⁺): 503.1.

[1855] TLC (Ethyl acetate:Petroleum ether=3:1), R_{f}=0.16.

### 2. Preparation of Compound 6

[chemical structure]

[1856] To a solution of compound 5 (57 g, 113.41 mmol) in THF (600 mL) was added N,N-diethylethanamine; trihydrofluoride (73.13 g, 453.63 mmol). The mixture was stirred at 15° C. for 6 hr. TLC showed compound 5 was consumed completely. One new spot was desired compound. The reaction mixture was quenched by addition sat. NaHCO₃ aq. (20 mL) and NaHCO₃ solid to pH=7˜8 and stirred 20 min. The mixture was dried over Na₂SO₄, and concentrated under reduced pressure to give a residue. Compound 6 (44 g, crude) was obtained as a yellow solid.

[1857] TLC (Ethyl acetate:Methanol=15:1), R_{f}=0.43.

### 3. Preparation of Compound WV-NU-037

[chemical structure]

[1858] To a mixture of compound 6 (43 g, 110.72 mmol) in MeOH (1840 mL) was added (1Z,5Z)-cycloocta-1,5-diene; rhodium(1+); tetrafluoroborate (1.80 g, 4.43 mmol), Josiphos SL-J216-1 (CAS #: 849924-43-2, 3.32 g, 5.09 mmol) and zinc; trifluoromethanesulfonate (16.10 g, 44.29 mmol). And the system was stirred under H₂ (50 psi) for 12 hr at 25° C. LC-MS showed compound 6 was consumed completely and one main peak with desired MS was detected. The reaction mixture was filtered and concentrated under reduced pressure to give a residue. Combined with 6 g crude. The residue was purified by flash silica gel chromatography (ISCO®; 80 g SepaFlash® Silica Flash Column, Eluent of 0˜100% Ethyl acetate/Petroleum ether gradient and 10% Petroleum ether gradient/MeOH @100 mL/min) to give 36.2 g (average weight 30.4 g). And 18.5 g crude. Compound WV-NU-037 (30.4 g, 77.88 mmol, 70.33% yield) was obtained as a black brown solid. And 18.5 g crude. The residue was purified by flash silica gel chromatography (ISCO®; 220 g SepaFlash® Silica Flash Column, Eluent of 20:60:20, 100:0; 20, Ethyl acetate/Petroleum/DCM ether gradient @80 mL/min). Then washed with 200 mL (Petroleum ether:Ethyl acetate=1:1) to give 39.8 g off white solid.

[1859] ¹HNMR (400 MHz, CDCl₃) δ=8.68 (br s, 1H), 7.10 (s, 1H), 6.18 (t, J=6.5 Hz, 1H), 4.29 (br d, J=4.6 Hz, 2H), 4.20-4.04 (m, 4H), 3.66 (br dd, J=5.1, 7.3 Hz, 1H), 2.38 (td, J=6.7, 11.7 Hz, 1H), 2.26-1.97 (m, 4H), 1.93 (s, 4H), 1.84-1.70 (m, 1H), 1.34 (dt, J=4.5, 7.0 Hz, 7H), 1.17 (d, J=6.8 Hz, 3H)

[1860] ³¹PNMR (162 MHz, CDCl₃) δ=31.55 (s, 1P), 31.49 (s, 1P)

[1861] ¹³CNMR (101 MHz, CDCl₃) δ 163.52, 150.30, 135.35, 111.33, 89.42, 89.31, 83.74, 72.36, 62.15 (dd, J=6.6, 12.5 Hz, IC), 40.18, 31.70, 29.92, 28.52, 18.34, 18.26, 16.43, 16.36, 12.63

[1862] SFC: method (AD-3_EtOH_IPAm_10-40_Gradient_4 ml_A) dr=97.43:2.57

[1863] LCMS (M+H⁺): 391.1; LCMS purity: 99.37%

### Example 25: Synthesis of 5′-PO(OEt)₂-Triazolyl phosphonate-dT (WV-NU-040)

[chemical structure]

[chemical structure]

[chemical structure]

### 1. Preparation of Compound 2A

[chemical structure]

[1864] To a solution of compound 1A (10 g, 57.96 mmol) in THF (20 mL) was added to bromo(ethynyl)magnesium (0.5 M, 117.07 mL) at 0° C. under N₂. The resulting mixture was stirred at 20° C. for 0.5 hr. TLC showed compound 1A was consumed completely and two new spots formed. The mixture was quenched by addition sat. NH₄Cl (aq., 50 mL) at 0° C., then diluted with Ethyl acetate (30 mL) and extracted with Ethyl acetate (150 mL*3). The combined organic layers were dried over Na₂SO₄, filtered and concentrated under reduced pressure to give crude. The residue was purified by column chromatography (SiO₂, Petroleum ether/Ethyl acetate=10:1 to 1:1). Compound 2A (5.2 g, 55.34% yield) was obtained as a colorless oil.

[1865] LCMS: (M+H⁺): 163.3.

[1866] TLC (Petroleum ether/Ethyl acetate=1:1) R_{f}=0.43

### 2. Preparation of Compound 4

[chemical structure]

[1867] To a solution of compound 3 (10 g, 28.05 mmol) in pyridine (200 mL) was added PPh₃ (13.24 g, 50.49 mmol) and 12 (10.68 g, 42.08 mmol). The mixture was stirred at 25° C. for 12 hr under N₂ atmosphere. LCMS showed most of the starting mateiral was disappeared and one main peak with desired mass was detected. The reaction mixture was quenched by sat. aq. Na₂SO₃ (200 mL) and extracted with EtOAc (600 mL*3). The combined organic layers were washed with brine (200 mL*2), dried over Na₂SO₄, filtered and concentrated under reduced pressure to give a residue. The residue was purified by column chromatography (SiO₂, Petroleum ether/Ethyl acetate=10:1 to 0:1). Compound 4 (4.8 g, 33.40% yield, 91.041% purity) was obtained as a colorless oil.

[1868] LCMS: (M+H⁺): 467.0;

[1869] TLC (Petroleum ether/Ethyl acetate=1:3) R_{f}=0.75.

### 3. Preparation of Compound 5

[chemical structure]

[1870] To a solution of compound 4 (4.8 g, 10.29 mmol) in DMF (48 mL) was added NaN₃ (802.89 mg, 12.35 mmol). The mixture was stirred at 50° C. for 12 hr. LCMS showed compound 4 was consumed completely and one main peak with desired MS was detected. The reaction was quenched by H₂O (6 mL), and extracted with TBME (6 mL*3). Compound 5 (3.93 g, crude) in a yellow solution of TBME (18 mL) was used into the next step without further purification.

[1871] LCMS: (M+H⁺): 382.3

### 4. Preparation of Compound 6

[chemical structure]

[1872] To a solution of compound 5 (3.93 g, 10.30 mmol) in THF (20 mL) was added N,N-diethylethanamine; trihydrofluoride (6.64 g, 41.21 mmol). The mixture was stirred at 20° C. for 12 hr. TLC showed a few of compound 5 was remained and new spot was detected. The reaction mixture was concentrated under reduced pressure and the mixture was neutralized with Na₂CO₃ (aq., sat.) until pH=7. The mixture was concentrated under reduced pressure to removed most of water. The mixture was added DCM (40 mL) and dried over Na₂SO₄, filtered and concentrated under reduced pressure to give a residue. The residue was purified by prep-TLC (SiO₂, Petroleum ether: (Ethyl acetate: Ethyl Alcohol=3:1)=1:1). Compound 6 (2.7 g, crude) was obtained as a yellow oil.

[1873] TLC (Petroleum ether: (Ethyl acetate: Ethyl Alcohol=3:1)=1:1) R_{f}=0.24

### 5. Preparation of WV-NU-040

[chemical structure]

[1874] To a solution of compound 6 (2 g, 7.48 mmol) and 1-[ethoxy(ethynyl)phosphoryl]oxyethane (1.42 g, 8.76 mmol) in DMF (20 mL) was degassed and purged with N₂ for 3 times, then DIEA (1.93 g, 14.97 mmol), CuI (285.06 mg, 1.50 mmol) was added. The mixture was stirred at 20° C. for 4 hr under N₂ atmosphere. LCMS showed most of the starting material was disappeared and the desired substance was found. The reaction mixture was diluted with TMT solution (8 mL), filtered and the filtrate was diluted with ACN (80 mL), and concentrated under reduced pressure to give a residue. The residue was washed with EtOAc (100 mL*3), filtered and concentrated under reduced pressure to give product. WV—NU-040 (1.8 g, 3.92 mmol, 52.38% yield, 93.513% purity) was obtained as a white solid.

[1875] ¹H NMR (400 MHz, DEUTERIUM OXIDE) 6 ppm 8.39 (s, 1H), 6.96 (s, 1H), 6.07 (t, J=6.4 Hz, 1H), 4.77 (d, J=4.4 Hz, 2H), 4.37 (q, J=6.2 Hz, 1H), 4.19 (q, J=4.9 Hz, 1H), 4.01-4.14 (m, 4H), 2.20-2.37 (m, 2H), 1.73 (s, 3H), 1.19 (s, 6H)

[1876] ³¹P NMR (162 MHz, DEUTERIUM OXIDE) δ ppm 8.67 (s, 1 P)

[1877] ¹³C NMR (101 MHz, DEUTERIUM OXIDE) δ=166.21, 151.53, 137.29, 136.50, 134.08, 133.47, 133.14, 111.55, 85.38, 82.53, 70.15, 64.72, 64.66, 50.60, 36.90, 15.47, 15.41, 11.49.

[1878] LCMS: (M+H⁺): 430.1, LCMS purity: 93.513%.

### Example 26: Synthesis of 5′-(POM)₂-Vinyl Phosphonate-dT (WV-NU-042)

[chemical structure]

[chemical structure]

[chemical structure]

### 1. Preparation of Compound 1B

[chemical structure]

[1879] A mixture of compound 1A (47 g, 202.49 mmol), compound 1C (152.48 g, 1.01 mol, 146.61 mL), TBAI (74.79 g, 202.49 mmol) in ACN (400 mL), then the mixture was stirred and reflux at 85° C. for 15 hr. The mixture was added compound 1C (61 g) and stirred at 85° C. for 15 hr. TLC showed compound 1A was consumed and new spot was detected. The mixture was diluted with Ethyl acetate (300 mL) and H₂O (300 mL), and extracted with Ethyl acetate (300 mL*3). The combined organic layers were dried over Na₂SO₄, filtered and concentrated under reduced pressure to give a crude. The crude was purified by column chromatography (SiO₂, Petroleum ether:Ethyl acetate=10:1, 5:1, 3:1 to 1:1). Compound 1B (106 g, 82.75% yield) was obtained as a white solid.

[1880] ¹H NMR (400 MHz, CHLOROFORM-d) 6=5.77-5.68 (m, 8H), 2.78-2.59 (m, 2H), 1.25 (s, 36H).

[1881] TLC (Petroleum ether:Ethyl acetate=1:1), R_{f}=0.43.

### 2. Preparation of Compound 2

[chemical structure]

[1882] Three batches: To a solution of compound 1 (234 g, 429.68 mmol) and imidazole (87.75 g, 1.29 mol) in DCM (2 L) was added TBSCl (97.14 g, 644.52 mmol, 78.98 mL). The mixture was stirred at 15° C. for 16 hr. TLC showed compound 1 was consumed. Three batches mixture was combined and washed with sat. NaHCO₃ (aq., 4 L * 2), the combined aqueous was extracted with EtOAc (3 L*2), the combined organic was dried over Na₂SO₄, filtered and concentrated to give crude. Compound 2 (850 g, crude) was obtained as a yellow oil.

[1883] TLC (Petroleum ether:Ethyl acetate=1:1) R_{f}=0.39.

### 3. Preparation of WV-NU-041

[chemical structure]

[1884] A solution of compound 2 (400 g, 607.11 mmol) in CH₃COOH (1200 mL) and H₂O (300 mL) and stirred at 15° C. for 16 hr. TLC showed compound 2 was partly remained and new spot was detected. The reaction suspension liquid was filtered to remove white solid, then filtrate was added to ice water (2 L), then white solid was appeared and filtered to give crude. The aqueous layers were extracted with EtOAc (2 L * 4). The combined organic layers were washed with sat. NaHCO₃ (aq., 1 L), dried over Na₂SO₄, filtered and combined with above crude, concentrated under reduced pressure to give a crude. The crude were purified by column chromatography (SiO₂, Petroleum ether:Ethyl acetate=5:1, 3:1, 1:1 to 0:1). Compound WV-NU-041 (100 g, 46.20% yield) was obtained as a yellow solid.

[1885] ¹HNMR (400 MHz, CDCl₃) Shift=9.54 (br s, 1H), 7.42 (s, 1H), 6.16 (t, J=6.7 Hz, 1H), 4.51-4.46 (m, 1H), 3.96-3.87 (m, 2H), 3.82-3.68 (m, 1H), 2.32 (td, J=6.8, 13.5 Hz, 1H), 2.21 (ddd, J=3.7, 6.4, 13.2 Hz, 1H), 1.89 (s, 3H), 0.88 (s, 9H), 0.08 (s, 6H).

[1886] ¹³CNMR (101 MHz, CDCl₃) Shift=164.30, 150.50, 137.15, 110.90, 87.60, 86.67, 71.55, 61.86, 40.53, 25.69, 20.72, 17.92, 12.44, −4.72, −4.88

[1887] LCMS: M+Na+=379.2, Purity: 96.33%.

[1888] TLC (Petroleum ether:Ethyl acetate=1:1) R_{f}=0.24.

### 4. Preparation of Compound 3

[chemical structure]

[1889] To a solution of compound WV-NU-041 (40 g, 112.21 mmol) in DCM (300 mL) was added DMP (66.63 g, 157.09 mmol) in portions at 0° C. The mixture was stirred at 0° C. for 1 hr, and then warmed to 25° C. and stirred at 25° C. for 2 hr. TLC showed most of compound WV-NU-041 was disappeared and new spot was found. The mixture was diluted with ethyl acetate (500 mL) and filtrated through a short silica gel pad (SiO₂, 200 g) using ethyl acetate (500 mL). The mixture was added 5% Na₂SO₃/sat. NaHCO₃ (1:1, 500 mL, aq.) at 0° C., the mixture was extracted with Ethyl acetate (300 mL*2), the combined organic was dried over Na₂SO₄, filtered and concentrated to get crude. Compound 3 (39 g, crude) was obtained as a white solid.

[1890] LCMS: M+H⁺=354.9.

[1891] TLC (Petroleum ether:Ethyl acetate=1:3) R_{f}=0.36.

### 5. Preparation of Compound 4

[chemical structure]

[1892] To a solution of NaH (10.62 g, 265.58 mmol, 60% purity) in THF (400 mL) was added compound 1B (140 g, 221.32 mmol) in THF (600 mL) at −70° C.-−60° C. under N₂ over 30 min. The reaction mixture was stirred for 30 min at −70° C.-−60° C. under N₂. To the above mixture was added a solution of compound 3 (31.38 g, 88.53 mmol) in THF (400 mL) at −70° C.-−60° C. under N₂ over 30 min. The mixture was stirred at −70° C.-−60° C. for 1 hr under N₂, 0° C. for 1 hr and then 18° C. for 2 hr. TLC showed compound 3 was consumed. The mixture was added to sat.NH₄Cl (1000 mL, aq.) at 0° C., extracted with Ethyl acetate (1000 mL*3). The combined organic layers were concentrated under reduced pressure to give a residue. The residue was purified by column chromatography (SiO₂, Petroleum ether:Ethyl acetate=5:1, 3:1 to 1:1). Compound 4 (25 g, 42.74% yield) was obtained as a colorless oil.

[1893] TLC (Petroleum ether:Ethyl acetate=1:1) R_{f}=0.18.

### 6. Preparation of WV-NU-042, (5′-(E)-(POM)2-VPdT)

[chemical structure]

[1894] A solution of compound 4 (35.5 g, 53.73 mmol) in HCOOH (150 mL) and H₂O (150 mL) at 0° C., the mixture was stirred at 0-15° C. for 16 hr. TLC and LCMS showed compound 4 was consumed and new spot was detected. The mixture was concentrated under reduced pressure to give a residue at 30° C. water bath. The residue was purified by MPLC (SiO₂, Ethyl acetate/Petroleum ether=20%, 50%, 100%). Compound WV-NU-042, (5′-(E)-(POM)2-VPdT) (18.6 g, 63.35% yield) was obtained as a yellow gum.

[1895] ¹H NMR (400 MHz, CDCl₃) Shift=8.92 (s, 1H), 7.06 (d, J=0.9 Hz, 1H), 7.01-6.84 (m, 1H), 6.28 (t, J=6.6 Hz, 1H), 6.08-5.90 (m, 1H), 5.70-5.57 (m, 3H), 5.54 (dd, J=5.1, 12.3 Hz, 1H), 4.39-4.25 (m, 2H), 3.67 (br s, 1H), 2.35 (ddd, J=4.7, 6.6, 13.8 Hz, 1H), 2.15 (td, J=6.8, 13.7 Hz, 1H), 1.91-1.80 (m, 3H), 1.15 (d, J=2.7 Hz, 18H).

[1896] ¹³C NMR (101 MHz, CDCl₃) Shift=177.20, 176.89, 163.46, 150.33, 149.84, 149.78, 135.18, 118.20, 116.29, 111.74, 85.71, 85.48, 84.93, 81.56, 73.94, 60.40, 39.09, 38.76, 26.83, 26.81, 21.04, 14.19, 12.61.

[1897] ³¹P NMR (162 MHz CDCl₃,) Shift=17.05.

[1898] LCMS: M+H⁺=547.2, purity: 90.718%.

### Example 27: Synthesis of Abasic 5′-Vinyl Phosphonates (WV-RA-009) and 5′-Vinyl Phosphonates-3′-CNE Phosphoramidite (WV-RA-009-CNE)

[chemical structure]

[chemical structure]

### 1. Preparation of Compound 2

[chemical structure]

[1899] Three batches: The compound 1 (100 g, 257.17 mmol) was dissolved in dry toluene (1500 mL), and AIBN (1.58 g, 9.64 mmol) and (n-Bu)₃SnH (74.85 g, 257.17 mmol) were added. The solution was heated to 80° C. for 12 h. TLC showed little of compound 1 was still remained and a new spot was found. The three batches were combined for work up. The mixture was evaporated to dryness to give (270 g, crude) as a yellow oil. The crude mixture (315 g) was purified by silica gel chromatography (Petroleum ether/Ethyl acetate=100/1, 50/1) to get compound 2 (120 g, 38.10% yield) as a yellow oil and 120 g crude need further purification.

[1900] TLC (Petroleum ether:Ethyl acetate=3:1), R_{f}=0.63

### 2. Preparation of Compound 3

[chemical structure]

[1901] Three batches: To a solution of compound 2 (115 g, 324.50 mmol) in MeOH (1.2 L) was added NaOMe (52.59 g, 973.49 mmol). The mixture was stirred at 25° C. for 3 hr. LCMS and TLC showed compound 2 was consumed and TLC showed a new spot was found. Three batches were combined for work up. NH₄Cl (169 g) was added and the mixture was concentrated to get the compound 3 (115 g, crude) as a yellow oil.

[1902] TLC (Ethyl acetate:Methanol=10:1), R_{f}=0.21

### 3. Preparation of Compound 4

[chemical structure]

[1903] To a solution of compound 3 (55 g, 465.59 mmol) in pyridine (550 mL) was added DMTCl (189.30 g, 558.70 mmol). The mixture was stirred at 25° C. for 12 h. LCMS showed the compound 3 was consumed and the desired substance was found. Water (500 mL) was added and the mixture was extracted with EtOAc (500 mL*2). The combined organic was dried over sodium sulfate, filtered and concentrated to get the crude. The mixture was purified by silica gel chromatography (Petroleum ether:Ethyl acetate=10:1, 3:1, 1:1, 5% TEA) to get compound 4 (110 g, 56.19% yield) as a yellow oil.

[1904] TLC (Petroleum ether:Ethyl acetate=1:1), R_{f}=0.43

### 4. Preparation of Compound 5

[chemical structure]

[1905] Two batches: To a solution of compound 4 (55 g, 130.80 mmol) and imidazole (26.71 g, 392.39 mmol) in DCM (600 mL) was added TBSCl (29.57 g, 196.20 mmol). The mixture was stirred at 25° C. for 12 h. TLC showed the compound 4 was consumed and a new spot was found. The two batches were combined for work up. Water (500 mL) was added and extracted with DCM (200 mL*2). The combined organic was dried over Na₂SO₄, filtered and concentrated to get the compound 5 (139 g, crude) as a yellow oil TLC (Petroleum ether:Ethyl acetate=5:1), R_{f}=0.47

### 5. Preparation of Compound 6

[chemical structure]

[1906] A solution of compound 5 (139 g, 259.93 mmol) in the mixture of HOAc (560 mL) and H₂O (140 mL) was stirred at 25° C. for 12 hr. TLC showed compound 5 was consumed. The mixture was poured into ice-water (500 mL), and the NaHCO₃ solid was added until pH=7, and the residue was extracted with EtOAc (300 mL*3). The combined organic was washed with brine (300 mL), dried over Na₂SO₄, filtered and concentrated to get the crude. The mixture was purified by silica gel chromatography (Petroleum ether/Ethyl acetate=50/1, 5/1, 3:1) to get the compound 6 (35 g, 57.94% yield) as a yellow oil.

[1907] ¹HNMR (400 MHz, CDCl₃) δ=4.23 (td, J=3.8, 6.6 Hz, 1H), 3.97 (dd, J=5.4, 8.0 Hz, 2H), 3.79-3.68 (m, 2H), 3.61-3.50 (m, 1H), 2.06-2.01 (m, 1H), 1.91-1.81 (m, 1H), 0.89 (s, 8H), 0.08 (s, 6H)

[1908] TLC (Petroleum ether:Ethyl acetate=5:1), R_{f}=0.25

### 6. Preparation of Compound 7

[chemical structure]

[1909] Two batches: To a solution of compound 6 (14.5 g, 62.39 mmol) in DCM (150 mL) was added DMP (31.76 g, 74.87 mmol). The reaction was stirred at 25° C. for 2 hr. TLC showed compound 6 was consumed. The two batches were combined for work up. The mixture was poured into the mixture of sat. NaHCO₃ (750 mL) and sat. Na₂SO₃ (750 mL). The mixture was extracted with DCM (500 mL*2); the combined organic was washed with brine (500 mL), dried over Na₂SO₄, filtered and concentrated to get the compound 7 (28.7 g, crude) as a yellow oil.

[1910] TLC (Petroleum ether:Ethyl acetate=3:1), R_{f}=0.43

### 7. Preparation of Compound 8

[chemical structure]

[1911] To a solution of compound 7A (43.09 g, 149.50 mmol) in THF (100 mL) was added t-BuOK (1 M, 149.50 mL) at 0° C., and stirred at 0° C. for 10 min, then warmed up to 25° C. for 30 min. The solution of compound 7 (28.7 g, 124.58 mmol) in THF (100 mL) was added to the above solution at 0° C. The reaction mixture was stirred at 0° C. for 1 h, and then allowed to warm up to 25° C. in 80 min. TLC showed compound 7 was consumed. To the reaction mixture water (100 mL) was added and extracted with EtOAc (100 mL*4). The organic phase was dried (Na₂SO₄), filtered and concentrated to give compound 8 (45 g, crude) as a colorless oil.

[1912] The mixture was purified by silica column (Petroleum ether/Ethyl acetate=10/1, 3/1) to get compound 8 (18 g, 40.00% yield) as a yellow oil.

[1913] ¹HNMR (400 MHz, CDCl₃) δ=6.86-6.68 (m, 1H), 6.08-5.82 (m, 1H), 4.32-4.26 (m, 1H), 4.20-4.13 (m, 1H), 4.12-3.99 (m, 6H), 2.04-1.93 (m, 1H), 1.88-1.79 (m, 1H), 1.59 (s, 2H), 1.33 (t, J=7.1 Hz, 6H), 0.90 (s, 9H), 0.15-−0.02 (m, 6H)

[1914] TLC: (Petroleum ether:Ethyl acetate=1:1), Rf=0.15

### 8. Preparation of Compound WV-RA-009

[chemical structure]

[1915] To a solution of compound 8 (20 g, 54.87 mmol) in THF (200 mL) was added 3HF·TEA (35.38 g, 219.49 mmol). The mixture was stirred at 25° C. for 2 hr. TLC showed compound 8 was consumed, a new spot was found. NaHCO₃ (300 mL, aq.) was added, and extracted with DCM (200 mL*5). The combined organic was dried over Na₂SO₄, filtered and concentrated to get the crude. The mixture was purified by silica column (Petroleum ether/Ethyl acetate=10/1, 3/1, 0:1) to get the WV-RA-009 (11.5 g, 82.14% yield) as a colorless oil.

[1916] ¹HNMR (400 MHz, CDCl₃) δ=6.90-6.78 (m, 1H), 6.08-5.84 (m, 1H), 4.41-4.36 (m, 1H), 4.23 (td, J=3.1, 6.0 Hz, 1H), 4.12-4.00 (m, 6H), 3.44 (br s, 1H), 2.13-1.99 (m, 1H), 1.97-1.89 (m, 1H), 1.32 (dt, J=1.4, 7.1 Hz, 6H)

[1917] ¹³CNMR (101 MHz CDCl₃,) δ=150.69, 150.63, 117.25, 115.37, 85.79, 85.58, 75.54, 67.31, 61.92 (t, J=6.2 Hz, 1C), 34.07, 16.35, 16.30

[1918] ³¹P NMR (162 MHz, CDCl₃) δ=18.65 (s, 1P)

[1919] LCMS: (M+H⁺): 251.1, LCMS purity: 100% (ELSD).

[1920] TLC (Petroleum ether:Ethyl acetate=0:1), R_{f}=0.15

### 9. Preparation of Compound WV-RA-009-CNE Phosphoramidite

[chemical structure]

[1921] The compound WV-RA-009 (4.5 g, 17.98 mmol) was dried by azeotropic distillation on a rotary evaporator with toluene (20 mL*3).

[1922] To a solution of compound WV-RA-009 (4.5 g, 17.98 mmol) in DMF (32 mL) were added N-methylimidazole (2.95 g, 35.97 mmol) and 5-ethylsulfanyl-2H-tetrazole (2.34 g, 17.98 mmol), then 3-bis(diisopropylamino)phosphanyloxypropanenitrile (8.13 g, 26.98 mmol) was dropped. The mixture was stirred at 25° C. for 2 hr. TLC showed WV-RA-009 was consumed and a new spot was found. The mixture was poured into the sat. NaHCO₃ (200 mL) slowly, and the mixture was extracted with EtOAc (100 mL*3). The combined organic was dried over Na₂SO₄, filtered and concentrated to get the crude. The residue was purified by silica gel chromatography (Petroleum ether/Ethyl acetate=10/1, 3/1, 1/1, 5% TEA) for two times to get WV-RA-009-CNE (3 g, 33.90% yield, 91.55% purity) as a colorless oil.

[1923] ¹HNMR (400 MHz CDCl₃,) δ=6.90-6.64 (m, 1H), 6.09-5.82 (m, 1H), 4.47 (br d, J=17.0 Hz, 1H), 4.30-4.19 (m, 1H), 4.12-3.95 (m, 6H), 3.86-3.69 (m, 2H), 3.64-3.52 (m, 2H), 2.68-2.55 (m, 2H), 2.09-1.89 (m, 2H), 1.29 (dt, J=2.2, 7.1 Hz, 7H), 1.23-1.11 (m, 14H)

[1924] ³¹PNMR (162 MHz, CDCl₃) δ=148.22 (s, 1P), 148.11 (s, 1P), 148.32-147.99 (m, 1P), 30.79 (s, 1P), 18.38 (s, 1P), 18.33 (s, 1P), 18.22 (s, 1P)

[1925] ¹³CNMR (101 MHz, CDCl₃) δ=149.83 (dd, J=5.9, 11.7 Hz, 1C), 118.10, 117.88, 117.55, 117.51, 116.23, 116.01, 84.75 (br dd, J=19.1, 21.3 Hz, 1C), 84.70 (br t, J=20.9 Hz, 1C), 67.61, 67.58, 61.76 (br t, J=3.7 Hz, 1C), 58.37, 58.29, 58.18, 58.10, 43.23 (dd, J=2.9, 12.5 Hz, 1C), 33.23 (dd, J=4.0, 9.2 Hz, 1C), 24.60, 24.54, 24.51, 24.39, 23.88, 20.34 (dd, J=4.0, 7.0 Hz, 1C), 16.36, 16.29

[1926] LCMS: purity 91.55% (ELSD)

[1927] TLC (Petroleum ether:Ethyl acetate=0:1), Rf=0.43

### Example 28: Synthesis of Abasic 5′-(R)-Me-PO(OEt)₂-Phosphonate (WV-RA-010), and 5′-(R)-Me-PO(OEt)₂-Phosphonate-3′-CNE Phosphoramidite (WV-RA-010-CNE)

[chemical structure]

[chemical structure]

[chemical structure]

### 1. Preparation of Compound 2

[chemical structure]

[1928] For three batches: The compound 1 (100 g, 257.17 mmol) was dissolved in dry toluene (1500 mL) and the AIBN (1.58 g, 9.64 mmol) and (n-Bu)₃SnH (74.85 g, 257.17 mmol) were added. The solution was heated to 80° C. for 12 h. TLC showed little of compound 1 still remained and a new spot was found. The three batches were combined for work up. The mixture was evaporated to dryness.

[1929] Purification: The crude mixture (315 g) was purified by silica gel chromatography (Petroleum ether/Ethyl acetate=100/1, 50/1) to get compound 2 (120 g, 38.10% yield) as a yellow oil.

[1930] ¹H NMR (400 MHz, CDCl₃) δ=7.98-7.91 (m, 4H), 7.29-7.21 (m, 4H), 5.48 (td, J=2.2, 6.4 Hz, 1H), 4.55-4.46 (m, 2H), 4.38 (dt, J=2.6, 4.6 Hz, 1H), 4.21-4.13 (m, 1H), 4.05 (dt, J=6.1, 9.2 Hz, 1H), 2.42 (d, J=5.6 Hz, 7H), 2.20 (tdd, J=2.8, 5.6, 13.5 Hz, 1H)

[1931] TLC (Petroleum ether:Ethyl acetate=5:1), Rf=0.47

### 2. Preparation of Compound 3

[chemical structure]

[1932] For three batches: To a solution of compound 2 (115 g, 324.50 mmol) in MeOH (1.2 L) was added NaOMe (52.59 g, 973.49 mmol). The mixture was stirred at 25° C. for 3 h. LCMS and TLC showed compound 2 was consumed and a new spot was found. Three batches were combined for work up. NH₄Cl (169 g) was added and the mixture was concentrated to get the compound 3 (115 g, crude) as a yellow oil.

[1933] TLC (Ethyl acetate:Methanol=10:1), R_{f}=0.21

### 3. Preparation of Compound 4

[chemical structure]

[1934] To a solution of compound 3 (60 g, 507.91 mmol) in pyridine (600 mL) was added DMTCl (206.51 g, 609.49 mmol). The mixture was stirred at 25° C. for 12 h. LCMS showed compound 3 was consumed and the desired substance was found. Water (600 mL) was added and the mixture was extracted with EtOAc (600 mL*2). The combined organic was dried over sodium sulfate, filtrated and concentrated to get the crude. The crude was purified by column chromatography (SiO₂, Petroleum ether/Ethyl acetate=15/1 to 1/1) to get compound 4 (89 g, 41.78% yield) as a yellow oil.

[1935] LCMS: NEG (M−H⁺), 419.1

[1936] TLC (Petroleum ether:Ethyl acetate=1:1), Rf=0.43

### 4. Preparation of Compound 5

[chemical structure]

[1937] For two batches: To a solution of compound 4 (44.5 g, 105.83 mmol) and imidazole (21.61 g, 317.48 mmol) in DCM (500 mL) was added TBSCl (23.93 g, 158.74 mmol), and the mixture was stirred at 25° C. for 12 h. TLC showed compound 4 was consumed and a new spot was found. The two batches were combined for work up. Water (500 mL) was added and extracted with DCM (200 mL*2). The combined organic was dried over Na₂SO₄, filtered and concentrated to get the compound 5 (113 g, crude) as a yellow oil

[1938] TLC (Petroleum ether:Ethyl acetate=5:1), Rf=0.47

### 5. Preparation of Compound 6

[chemical structure]

[1939] For two batches: To a solution of compound 5 (56.5 g, 105.66 mmol) in the mixture of HOAc (240 mL) and H₂O (60 mL), the residue was stirred at 25° C. for 12 h. TLC showed compound 5 was consumed. The two batches were combined for workup. The mixture was poured into ice-water (500 mL) and the NaHCO₃solid was added until pH=7, and the residue was extracted with EtOAc (300 mL*3), the combined organic was washed with brine (300 mL), dried over Na₂SO₄, filtered and concentrated to get the crude. The mixture was purified by silica gel chromatography (Petroleum ether/Ethyl acetate=50/1, 5/1, 3:1) to get the compound 6 (28 g, 57.03% yield) as a yellow oil.

[1940] TLC (Petroleum ether:Ethyl acetate=5:1), Rf=0.25

### 6. Preparation of Compound 7

[chemical structure]

[1941] To a solution of compound 6 (13 g, 55.94 mmol) in MeCN (150 mL) and H₂O (150 mL) was added PhI(OAc)₂ (39.64 g, 123.07 mmol) and TEMPO (1.76 g, 11.19 mmol). The mixture was stirred at 25° C. for 3 h. TLC showed compound 6 was consumed and a new spot was found. The mixture was concentrated to get the compound 7 (27 g, crude) as a yellow oil.

[1942] TLC (Petroleum ether:Ethyl acetate=3:1), Rf=0.04

### 7. Preparation of Compound 8

[chemical structure]

[1943] For two batches: To a solution of compound 7 (13.5 g, 54.79 mmol) in DCM (135 mL) was added DIEA (14.16 g, 109.59 mmol) and 2,2-dimethylpropanoyl chloride (8.59 g, 71.23 mmol). The mixture was stirred at 0° C. for 0.5 h. TLC showed compound 7 was consumed and anew spot was found. Compound 8 (36.2 g, crude) as a yellow solution in DCM (135 mL) was used for next step directly.

[1944] TLC (Petroleum ether:Ethyl acetate=1:1), Rf=0.22

### 8. Preparation of Compound 9

[chemical structure]

[1945] For two batches: The mixture compound 8 (18.1 g, 54.77 mmol) in DCM (135 mL) from the last step was added TEA (16.63 g, 164.30 mmol, 22.87 mL) and N— methoxymethanamine;hydrochloride (8.01 g, 82.15 mmol), and the mixture was stirred at 0° C. for 1 h. LCMS showed the starting material was consumed and the desired substance was found. The two batches were combined for work up. The mixture was washed with HCl (1N, 100 mL) and then aqueous NaHCO₃ (100 mL), the organic was dried over Na₂SO₄and filtered to get the crude. The mixture was purified by silica gel chromatography (Petroleum ether/Ethyl acetate=10/1, 3/1) to get compound 9 (15.8 g, 50.97% yield) as a yellow oil.

[1946] LCMS: (M+H⁺): 290.1

### 9. Preparation of Compound 10

[chemical structure]

[1947] To a solution of compound 9 (15.8 g, 54.59 mmol) in THF (180 mL) was dropped MeMgBr (3 M, 54.59 mL) at 0° C., and the mixture was stirred at 0° C. for 1 hr. TLC showed compound 9 was consumed. The mixture was poured into sat.NH₄Cl (200 mL) and the mixture was extracted with EtOAc (150 mL*3), the combined organic was dried over Na₂SO₄, filtered and concentrated to get the crude. The mixture was purified by silica gel chromatography (Petroleum ether/Ethyl acetate=20/1, 5/1) to get compound 10 (12 g, 85.11% yield) as a yellow oil.

[1948] ¹HNMR (400 MHz, CDCl₃) δ=4.47-4.41 (m, 1H), 4.18 (d, J=2.5 Hz, 1H), 4.11-4.01 (m, 2H), 2.19 (s, 3H), 2.01-1.75 (m, 2H), 0.90 (s, 10H), 0.11 (d, J=3.5 Hz, 6H)

[1949] TLC (Petroleum ether:Ethyl acetate=3:1), Rf=0.76

### 10. Preparation of Compound 11

[chemical structure]

[1950] To a solution of NaH (7.92 g, 198.03 mmol, 60% purity) in THF (170 mL) was added compound 7A (57.08 g, 198.03 mmol) in THF (110 mL) at 0° C. The reaction mixture was warmed up to 20° C., and stirred for 1 hr. A solution of LiBr (17.20 g, 198.03 mmol) in THF (100 mL) was added and the resultant slurry was stirred, and then cooled to 0° C. To the above mixture was added a solution of compound 10 (11 g, 45.01 mmol) in THF (100 mL) at 0° C. The mixture was stirred at 0-20° C. for 1 hr. TLC showed compound 10 was consumed. The resulting mixture was diluted with water (500 mL), extracted with EtOAc (300 mL*3). The combined organic layers were dried over anhydrous Na₂SO₄, filtered and concentrated to afford a yellow oil. The residue was purified by silica gel chromatography (Petroleum ether/Ethyl acetate=1 0/1, 3/1) to get compound 11 (16 g, 86.49% yield) as a yellow oil.

[1951] ¹HNMR (400 MHz, CDCl₃) δ=5.73 (td, J=1.1, 18.7 Hz, 1H), 4.19-3.94 (m, 9H), 2.09 (dd, J=0.8, 3.3 Hz, 3H), 2.01-1.90 (m, 1H), 1.84-1.75 (m, 1H), 1.40-1.27 (m, 8H), 0.93-0.84 (m, 10H), 0.13-0.00 (m, 6H)

[1952] TLC (Petroleum ether:Ethyl acetate=1:1), Rf=0.20

### 11. Preparation of Compound 12

[chemical structure]

[1953] A mixture of compound 11 (15 g, 39.63 mmol) in THF (150 mL) was added 3HF·TEA (25.55 g, 158.51 mmol), and then the mixture was stirred at 20° C. for 12 hr under N₂ atmosphere. TLC showed compound 11 was consumed. Sat. NaHCO₃ was added to the mixture until pH=7, and the residue was extracted with DCM (150 mL*3), the combined organic was dried over Na₂SO₄, filtered and concentrated to get the crude. The residue was purified by silica gel chromatography (Petroleum ether/Ethyl acetate=5/1, 0/1, Ethyl acetate:Dichloromethane=10:1) to get compound 12 (8.8 g, 80.00% yield) as a yellow oil.

[1954] ¹HNMR (400 MHz, CDCl₃) δ=5.73 (td, J=1.1, 18.7 Hz, 1H), 4.19-3.94 (m, 8H), 2.09 (dd, J=0.8, 3.3 Hz, 3H), 2.01-1.90 (m, 1H), 1.84-1.75 (m, 1H), 1.33-1.30 (m, 6H)

[1955] ³¹PNMR (162 MHz, CDCl₃) δ=18.71

[1956] TLC (Ethyl acetate:Methanol=0:1), R_{f}=0.20.

### 12. Preparation of Compound WV-RA-010

[chemical structure]

[1957] To a solution of compound 12 (8.7 g, 32.92 mmol), (1Z,5Z)-cycloocta-1,5-diene; rhodium(1+);tetrafluoroborate (534.76 mg, 1.32 mmol), zinc; trifluoromethanesulfonate (4.79 g, 13.17 mmol) in MeOH (160 mL) was added Josiphos SL-J216-1 (987.42 mg, 1.51 mmol) under N₂. The suspension was degassed under vacuum and purged with H₂ several times. The mixture was stirred under H₂ (50 psi) at 30° C. for 12 h. TLC showed the reaction was complete. The mixture was concentrated to get the crude. The residue was purified by silica gel chromatography (Petroleum ether/Ethyl acetate=20/1, 1/9, Ethyl acetate:Methanol=20:1) to get WV-RA-010 (8 g, 91.95% yield) as a yellow oil.

[1958] ¹HNMR (400 MHz, CDCl₃) δ=4.27-4.01 (m, 5H), 3.99-3.81 (m, 2H), 3.61-3.41 (m, 2H), 2.23-1.86 (m, 4H), 1.80-1.63 (m, 1H), 1.34 (t, J=7.0 Hz, 6H), 1.12 (d, J=6.6 Hz, 3H)

[1959] ¹³CNMR (101 MHz, CDCl₃) δ=89.97, 89.85, 74.18, 66.68, 61.92, 35.71, 31.49, 31.46, 29.95, 28.55, 17.50, 17.43, 16.42, 16.36

[1960] ³¹PNMR (162 MHz, CDCl₃) δ=32.07

[1961] LCMS: ELSD (M+H⁺), 267.1, 100% purity

[1962] TLC (Petroleum ether:Ethyl acetate=0:1), R_{f}=0.03; (Ethyl acetate:Methanol=10:1), Rf=0.35.

### 13. Preparation of Compound WV-RA-010-CNE Phosphoramidite

[chemical structure]

[1963] WV-RA-010 (3 g, 11.27 mmol) was dried by azeotropic distillation on a rotary evaporator with toluene (20 mL*3).To a solution of WV-RA-010 (3 g, 11.27 mmol) in DMF (24 mL) was added 1-methylimidazole (1.85 g, 22.53 mmol) and 5-ethylsulfanyl-2H-tetrazole (1.47 g, 11.27 mmol), then 3-bis(diisopropylamino)phosphanyloxypropanenitrile (5.09 g, 16.90 mmol) was dropped. The mixture was stirred at 25° C. for 1 h. TLC showed WV-RA-010 was consumed and a new spot was found. The mixture was poured into the sat. NaHCO₃ (100 mL) slowly and the mixture was extracted with Ethyl acetate (50 mL*3), the combined organic was dried over Na₂SO₄, filtered and concentrated to get the crude. The residue was purified by silica gel chromatography (Petroleum ether/Ethyl acetate=10/1, 3/1, 1/1, 5% TEA) to get WV-CA-010-CNE (1.7 g, 32.35% yield) as a colorless.

[1964] ¹HNMR (400 MHz CDCl₃,) δ=4.29-4.18 (m, 1H), 4.17-4.02 (m, 4H), 4.01-3.49 (m, 7H), 2.71-2.59 (m, 2H), 2.24-2.08 (m, 1H), 2.07-1.92 (m, 3H), 1.74-1.49 (m, 2H), 1.37-1.28 (m, 7H), 1.24-1.15 (m, 12H), 1.10 (d, J=6.8 Hz, 3H)

[1965] ¹³CNMR (101 MHz, CDCl₃) δ=117.58, 117.54, 89.31, 89.25, 75.58, 66.95, 61.36, 61.37, 58.07, 46.34, 46.30, 45.49, 45.45, 45.40, 43.20, 34.84, 30.87, 30.84, 30.81, 29.81, 29.79, 28.42, 28.38, 25.72, 24.54, 24.47, 24.39, 23.85, 23.15, 24.36, 22.98, 22.64, 24.29, 20.39, 20.31, 20.30, 20.23, 16.41, 16.35, 15.94, 15.40

[1966] ³¹PNMR (162 MHz, CDCl₃) δ=148.02, 147.78, 31.73, 31.57 (s, 1P), 30.79 (s, 1P)

[1967] LCMS: ELSD, 96.42% purity

[1968] TLC (Petroleum ether:Ethyl acetate=0:1), Rf=0.43

### Example 29: Synthesis of 5′-®—C-M′-5′—ODMT′-2′-F-dU

[chemical structure]

[chemical structure]

[chemical structure]

### 1. Preparation of Compound 2

[chemical structure]

[1969] To a solution of compound 1 (100.00 g, 406.19 mmol) in pyridine (550.00 mL) was added DMTCl (165.16 g, 487.43 mmol). The mixture was stirred at 25° C. for 20 hr. TLC indicated compound 1 was consumed and one new spot formed. MeOH (300 mL) was added, and the reaction mixture was concentrated under reduced pressure to remove solvent. The residue was dissolved in EtOAc (500 mL) and washed with H₂O (500 mL*3). Dried over Na₂SO₄, filtered and concentrated under reduced pressure to give a residue. The crude product compound 2 (285.00 g, crude) was yellow solid, used into the next step without further purification.

[1970] TLC (Ethyl acetate:Petroleum ether=3:1, 5% TEA) R_{f}=0.40

### 2. Preparation of Compound 2A

[chemical structure]

[1971] To a solution of compound 2 (222.82 g, 406.19 mmol) in DCM (500.00 mL) was added imidazole (41.48 g, 609.29 mmol) and TBSCl (91.83 g, 609.29 mmol, 74.66 mL). The mixture was stirred at 25° C. for 20 hour. TLC indicated compound 2 was consumed and one new spot formed. The reaction mixture was concentrated under reduced pressure to remove solvent. The residue was diluted with DCM (500 mL), and washed with H₂O mL (500 mL*3). Dried over Na₂SO₄, filtered and concentrated under reduced pressure to give a residue. The crude product compound 2A (330.00 g, crude) was white solid, used into the next step without further purification.

[1972] TLC (Ethyl acetate:Petroleum ether=3:1) R_{f}=0.65.

### 3. Preparation of Compound 3

[chemical structure]

[1973] A solution of compound 2A (269.23 g, 406.19 mmol) in AcOH (400.00 mL) 80% aq., the mixture was stirred at 25° C. for 15 hour. TLC indicated compound 2A was remained a little and one new spot formed. The reaction mixture was quenched by sat. NaHCO₃ aq. until pH>7 at 25° C., and then diluted with EtOAc (500 mL) and extracted with EtOAc (500 mL*3). Dried over Na₂SO₄, filtered and concentrated under reduced pressure to give a residue. The residue was purified by column chromatography (SiO₂, Petroleum ether/Ethyl acetate=1/0 to 0/1 10% DCM). Got 60 g product and 130 g compound 2A. Compound 3 (60.00 g, 40.98% yield) was obtained as a white solid.

[1974] TLC (Ethyl acetate:Petroleum ether=3:1) R_{f}=0.45.

### 4. Preparation of Compound 4

[chemical structure]

[1975] To a solution of compound 3 (30.00 g, 83.23 mmol) in MeCN (360.00 mL) and H₂O (360.00 mL) was added TEMPO (2.62 g, 16.65 mmol) and PhI(OAc)₂ (58.98 g, 183.10 mmol) at 25° C. in 3 hours. TLC indicated compound 3 was consumed and one new spot formed. The reaction mixture was concentrated under reduced pressure to remove lots of solvent. Filtered the solid and washed the solid with MeCN. The other liquid was concentrated under reduced pressure, then dissolved in sat. KOH (aq., 2M) to pH˜12, washed by EtOAc (200 mL*3), and then added HCl (aq. 1M) to pH˜3, filtered and concentrated as a yellow solid. Compound 4 (52.00 g, 138.87 mmol, 83.43% yield) was obtained as a yellow solid.

[1976] ¹H NMR (400 MHz, DMSO-d₆) δ=7.96 (d, J=8.3 Hz, 1H), 5.99 (dd, J=3.1, 16.2 Hz, 1H), 5.71 (dd, J=2.2, 8.3 Hz, 1H), 5.34-5.03 (m, 1H), 4.70-4.48 (m, 1H), 4.30 (d, J=5.3 Hz, 1H), 0.86 (s, 9H), 0.08 (s, 6H).

[1977] LCMS: (M+H⁺): 374.9

[1978] TLC (Petroleum ether:Ethyl acetate=1:1, R_{f}=0)

### 6. Preparation of Compound 5

[chemical structure]

[1979] To a solution of compound 4 (26.00 g, 69.44 mmol) in pyridine (50.00 mL) was added N— methoxymethanamine hydrochloride (8.13 g, 83.33 mmol) and EtOAc (150.00 mL). The mixture was stirred at 0° C. then added T3P (46.40 g, 145.82 mmol, 43.36 mL) in N₂. The mixture was stirred at 0° C. in 3 h. TLC indicated compound 4 was consumed and one new spot formed. The resulting mixture was work up together with another batch (26 g scale). The resulting mixture was washed with HCl (1 M, 1.1 L), and the aqueous layer was extracted with DCM (1 L*2). The combined organic layers were washed with sat. Na₂CO₃ aq. until pH=12, dried over Na₂SO₄, filtered and concentrated to give a crude product. The residue was purified by column chromatography (SiO₂, Petroleum ether/Ethyl acetate=1/0 to 0:1) to get 52 g product. Compound 5 (26.00 g, 89.68% yield) was obtained as a yellow solid.

[1980] ¹H NMR (400 MHz, CDCl₃) δ=8.91 (br s, 1H), 8.28 (d, J=8.2 Hz, 1H), 6.31 (dd, J=5.2, 11.6 Hz, 1H), 5.73 (dd, J=0.9, 8.2 Hz, 1H), 4.94-4.83 (m, 1H), 4.80-4.75 (m, 1H), 4.31 (td, J=3.9, 7.7 Hz, 1H), 3.66 (s, 3H), 3.17 (s, 3H), 1.95 (s, 1H), 1.65 (s, 1H), 1.16 (t, J=7.1 Hz, 1H), 0.86-0.77 (m, 9H), 0.02 (d, J=12.3 Hz, 6H)

[1981] LCMS: (M+H⁺): 418.1

[1982] TLC (Ethyl acetate:Petroleum ether=1:1) R_{f}=0.26.

### 7. Preparation of Compound 6

[chemical structure]

[1983] To a solution of compound 5 (52.00 g, 124.55 mmol) in THF (500.00 mL) was added MeMgBr (3 M, 83.03 mL) at −20-0° C. The mixture was stirred at −20° C.-10° C. for 2 hour. TLC indicated compound 5 was consumed and one new spot formed. The reaction mixture was quenched by addition sat. NH₄Cl 500 mL at 0° C., and then diluted with EtOAc (600 mL) and extracted with EtOAc (600 mL*3). Dried over Na₂SO₄, filtered and concentrated under reduced pressure to give a residue. The residue was purified by column chromatography (SiO₂, Petroleum ether/Ethyl acetate=1/0 to 0:1) to get 29 g product and 10 g crude product. Compound 6 (29.00 g, 62.51% yield) was obtained as a white solid.

[1984] ¹H NMR (400 MHz, CDCl₃) δ=8.90 (br s, 1H), 7.83 (d, J=7.9 Hz, 1H), 5.95-5.77 (m, 2H), 5.10-4.90 (m, 1H), 4.56 (d, J=6.6 Hz, 1H), 4.37 (ddd, J=4.6, 6.6, 15.1 Hz, 1H), 2.27 (s, 3H), 1.04-0.86 (m, 10H), 0.13 (d, J=7.0 Hz, 6H)

[1985] LCMS: (M+H⁺): 373.0

[1986] TLC (Ethyl acetate:Petroleum ether=1:1) R_{f}=0.4

### 8. Preparation of Compound 7B

[chemical structure]

[1987] To a solution of compound 6 (24.00 g, 64.44 mmol) in EtOAc (187.50 mL) was added sodium formate (204.65 g, 3.01 mol) in H₂O (750.00 mL) then added [[(1R,2R)-2-amino-1,2-diphenyl-ethyl]-(p-tolylsulfonyl)amino]-chloro-ruthenium; 1-isopropyl-4-methyl-benzene (819.90 mg, 1.29 mmol) in N₂. The mixture was stirred at 25° C. for 20 hour. TLC indicated compound 6 was consumed and one new spot formed. The mixture was extracted with DCM (1000 mL*3). The combined organic was washed with brine (1000 mL), dried over Na₂SO₄, filtered and concentrated to get the crude as a yellow solid. The residue was purified by column chromatography (SiO₂, Petroleum ether/Ethyl acetate=1/0 to 0:1) to get 19.8 g product, then washed with MTBE to get 18 g product. Compound 7B (18.00 g, 74.59% yield) was obtained as a white solid.

[1988] ¹H NMR (400 MHz, CDCl₃) δ=8.15 (br s, 1H), 7.32 (d, J=7.9 Hz, 1H), 5.63 (d, J=8.2 Hz, 1H), 5.53 (dd, J=5.1, 14.6 Hz, 1H), 5.26-5.04 (m, 1H), 4.41-3.92 (m, 2H), 3.83 (br s, 1H), 2.86 (d, J=2.2 Hz, 1H), 1.13 (d, J=6.6 Hz, 3H), 0.79 (s, 9H), 0.00 (s, 6H)

[1989] HPLC: HPLC purity=100%;

[1990] SFC: SFC purity=100% ee;

[1991] TLC (Petroleum ether:Ethyl acetate=1:1) R_{f}=0.23

### 9. Preparation of Compound 4

[chemical structure]

[1992] Compound 7B (9.00 g, 24.03 mmol) was dried by azeotropic distillation on a rotary evaporator with pyridine (150 mL) and toluene (150 mL*2).

[1993] To a solution of compound 7B (9.00 g, 24.03 mmol) in pyridine (90.00 mL) and THF (270.00 mL) was added DMTCl (15.47 g, 45.66 mmol), then added AgNO₃ (7.02 g, 41.33 mmol, 6.95 mL). The mixture was stirred at 25° C. for 20 hour. TLC indicated compound 7B was consumed and one new spot formed. The mixture was added toluene (200 mL), quenched by addition MeOH (1.3 mL) and stirred for 1 h at 25° C., then filtered through celite, and the Celite plug was washed thoroughly with toluene (150 mL), concentrated under reduced pressure to give a crude. The crude product compound 8B (16.26 g, 100.00% yield) was used into the next step without further purification.

[1994] TLC (Petroleum ether:Ethyl acetate=1:1) R_{f}=0.61.

### 10. Preparation of Compound 5′-(R)—C-Me-5′-ODMTr-2′-F-dU

[chemical structure]

[1995] To a solution of compound 8B (32.40 g, 47.87 mmol) in THF (324.00 mL) was added TBAF (1 M, 90.95 mL). The mixture was stirred at 25° C. for 16 hour. TLC indicated compound 8B was consumed and one new spot formed. The reaction mixture was concentrated under reduced pressure to remove solvent. The residue was diluted with EtOAc (300 mL) and washed with sat. NaCl aq. (200 mL*2). Dried over Na₂SO₄, filtered and concentrated under reduced pressure to give a residue. The residue was purified by column chromatography (SiO₂, Petroleum ether/Ethyl acetate=1/0 to 0:1) to get 25 g product. Compound 5′-(R)—C-Me-5′-ODMTr-2′-F-dU (25.00 g, 92.83% yield) was obtained as a yellow solid.

[1996] ¹H NMR (400 MHz, CDCl₃) δ=7.47 (d, J=7.7 Hz, 2H), 7.38 (dd, J=9.0, 10.1 Hz, 4H), 7.30-7.23 (m, 2H), 7.22-7.18 (m, 1H), 6.83 (br d, J=7.7 Hz, 4H), 5.90 (dd, J=2.4, 17.6 Hz, 1H), 5.31-5.18 (m, 1H), 5.08-4.87 (m, 1H), 4.51 (td, J=5.9, 15.7 Hz, 1H), 3.78 (s, 6H), 3.72-3.60 (m, 2H), 1.05 (d, J=6.4 Hz, 3H).

[1997] ¹³C NMR (101 MHz, CDCl₃) δ=171.28, 163.37, 158.68, 158.59, 150.04, 146.03, 140.47, 136.06, 130.47, 130.31, 128.08, 127.90, 126.94, 113.23, 113.15, 102.57, 94.11, 92.24, 87.76, 87.43, 87.20, 85.77, 69.46, 69.42, 69.25, 60.45, 55.25, 55.24, 21.06, 17.66, 14.19.

[1998] LCMS: (M−H⁺): 561.2

[1999] HPLC: HPLC purity=99.05%;

[2000] SFC: SFC purity=100% ee;

[2001] TLC (Ethyl acetate:Petroleum ether=1:1, R_{f}=0.18)

### Example 30: Synthesis of 5′-(R)—C-Me-5′-ODMTr-2′-F-dU-CNE phosphoramidite

[chemical structure]

### 1. Preparation of Compound 5′-(R)—C-Me-5′-ODMTr-2′-F-dU-CNE-phosphoramidite

[chemical structure]

[2002] To a solution of 5′-(R)—C-Me-5′-ODMTr-2′-F-dU (4.9 g, 8.71 mmol) in DCM (49 mL) was added DIEA (1.35 g, 10.45 mmol, 1.83 mL) and compound 1A (2.69 g, 9.15 mmol) at 0° C. The mixture was stirred at 0-15° C. for 3 hour. TLC indicated 5′-(R)—C-Me-5′-ODMTr-2′-F-dU was consumed and two new spots formed. The mixture was added sat. NaHCO₃ (20 mL) and extracted with DCM (50 mL*3). The combined organic layers were dried over Na₂SO₄, filtered and concentrated under reduced pressure to give a residue. The residue was purified by MPLC (SiO₂, Ethyl acetate/Petroleum ether=0%, 20%, 40%, 60%, 70%, 100%, 5% TEA) to give 4.3 g (batch 1:3.24 g, batch 2: 1.06 g) of compound 5′-(R)—C-Me-5′-ODMTr-2′-F-dU-CNE-phosphoramidite (4.3 g, 64.72% yield) as a white solid.

### Batch 1:

[2003] ¹H NMR: (400 MHz, CDCl₃) δ=7.59-7.15 (m, 11H), 6.93-6.76 (m, 4H), 6.01-5.89 (m, 1H), 5.32 (s, 1H), 5.16 (dd, J=8.2, 14.9 Hz, 1H), 5.08-5.02 (m, 1H), 4.93-4.75 (m, 1H), 4.03-3.85 (m, 2H), 3.84-3.77 (m, 6H), 3.74-3.62 (m, 3H), 3.61-3.47 (m, 1H), 2.77 (dt, J=1.9, 6.2 Hz, 1H), 2.72-2.59 (m, 2H), 1.27-1.17 (m, 11H), 0.99 (dd, J=2.0, 6.6 Hz, 3H).

[2004] ³¹P NMR: (162 MHz, CDCl₃) δ=150.63 (s, 1P), 150.54 (s, 1P), 150.34 (s, 1P), 150.27 (s, 1P), 14.14 (s, 1P).

[2005] HPLC: HPLC purity=97.66%;

[2006] LCMS: (M−H⁺): 761.3;

[2007] TLC (Petroleum ether:Ethyl acetate=3:1), R_{f1}=0.53, R_{f2}=0.62.

### Example 31: Synthesis of 5′-(S)—C-Me-5′-ODMTr-2′-F-dU

[chemical structure]

[chemical structure]

[chemical structure]

### 1. Preparation of Compound 2

[chemical structure]

[2008] To a solution of compound 1 (100.00 g, 406.19 mmol) in pyridine (550.00 mL) was added DMTCl (165.16 g, 487.43 mmol). The mixture was stirred at 25° C. for 20 hr. TLC indicated compound 1 was consumed and one new spot formed. MeOH (300 mL) was added, the reaction mixture was concentrated under reduced pressure to remove solvent. The residue was dissolved in EtOAc (500 mL) and washed with H₂O (500 mL*3). Dried over Na₂SO₄, filtered and concentrated under reduced pressure to give a residue. The crude product (285.00 g, crude) was yellow solid used into the next step without further purification.

[2009] TLC (Ethyl acetate:Petroleum ether=3:1, 5% TEA) R_{f}=0.40

### 2. Preparation of Compound 2A

[chemical structure]

[2010] To a solution of compound 2 (222.82 g, 406.19 mmol) in DCM (500.00 mL) was added imidazole (41.48 g, 609.29 mmol) and TBSCl (91.83 g, 609.29 mmol). The mixture was stirred at 25° C. for 20 hour. TLC indicated compound 2 was consumed and one new spot formed. The reaction mixture was concentrated under reduced pressure to remove solvent. The residue was diluted with DCM (500 mL), washed with H₂O (500 mL*3). Dried over Na₂SO₄, filtered and concentrated under reduced pressure to give a residue. The crude product (330.00 g, crude) was white solid used into the next step without further purification.

[2011] TLC (Ethyl acetate:Petroleum ether=3:1) R_{f}=0.65

### 3. Preparation of Compound 3

[chemical structure]

[2012] A solution of compound 2A (269.23 g, 406.19 mmol) in AcOH (400.00 mL) 80% aq. was stirred at 25° C. for 15 hour. TLC indicated compound 2A was remained a little and one new spot formed. The reaction mixture was quenched by sat. NaHCO₃ aq. until pH>7 at 25° C., and then diluted with EtOAc (500 mL) and extracted with EtOAc (500 mL*3). Dried over Na₂SO₄, filtered and concentrated under reduced pressure to give a residue. The residue was purified by column chromatography (SiO₂, Petroleum ether/Ethyl acetate=1/0 to 0/1 10% DCM). Got 60 g product and recovered 130 compound 2A. Compound 3 (60.00 g, 40.98% yield) was obtained as a white solid.

[2013] TLC (Ethyl acetate:Petroleum ether=3:1) R_{f}=0.45

### 4. Preparation of Compound 4

[chemical structure]

[2014] To a solution of compound 3 (10.00 g, 27.74 mmol) in DCM (400.00 mL) was added DMP (14.12 g, 33.29 mmol) at 0° C. The mixture was stirred at 0-50° C. for 6 hour. TLC indicated compound 3 was consumed and one new spot formed. The reaction mixture was quenched by addition sat. Na₂S₂O₃ aq. (300 mL) and sat. NaHCO₃ aq. (300 mL) at 0° C., and then diluted with EtOAc (800 mL) and extracted with EtOAc (800 mL*3). Dried over Na₂SO₄, filtered and concentrated under reduced pressure at 25° C. The crude product compound 4 (9.50 g, crude as yellow solid) was used into the next step without further purification.

[2015] TLC (Ethyl acetate:Petroleum ether=3:1) R_{f}=0.37

### 3. Preparation of Compound 5

[chemical structure]

[2016] To a solution of MeMgBr (3 M, 35.33 mL) in THF (200 mL) was added compound 4 (9.50 g, 26.50 mmol) in THF (300 mL) at −25° C. under N₂. The mixture was stirred at −25° C.-25° C. for 1 hour. TLC indicated compound 4 was consumed and two new spots formed. The reaction mixture was quenched by addition NH₄Cl (300 mL) at 0° C., and then diluted with EtOAc (400 mL) and extracted with EtOAc (400 mL*3). Dried over Na₂SO₄, filtered and concentrated under reduced pressure to give a residue. The residue was purified by column chromatography (SiO₂, Petroleum ether/Ethyl acetate=1/0 to 0/1) to get 1 g Compound 5A, 0.6 g Compound 5B, other mixture of Compound 5A and Compound 5B. Compound 5A (1.00 g, 10.08% yield) was obtained as a white solid. Compound 5B (600.00 mg, 6.04% yield) was obtained as a white solid..

### Compound 5A:

[2017] ¹H NMR (400 MHz, DMSO-d₆) δ=7.89 (d, J=8.2 Hz, 1H), 5.82 (dd, J=2.2, 16.9 Hz, 1H), 5.53 (d, J=8.1 Hz, 1H), 5.09 (d, J=4.6 Hz, 1H), 5.05-4.87 (m, 1H), 4.22 (ddd, J=4.5, 6.7, 18.1 Hz, 1H), 3.73-3.65 (m, 1H), 3.62 (br d, J=6.7 Hz, 1H), 1.14-1.05 (m, 3H), 0.81-0.67 (m, 9H), 0.00 (d, J=2.3 Hz, 6H);

[2018] LCMS: (M+H⁺): 375.1; LCMS purity=90.1%;

[2019] HPLC: purity 97.9%;

[2020] TLC (Ethyl acetate:Petroleum ether=1:1) 5A: R_{f1}=0.42; 5B: R_{f2}=0.47.

### Compound 5B:

[2021] ¹H NMR (400 MHz, DMSO-d₆) δ=7.78 (d, J=8.1 Hz, 1H), 5.84 (dd, J=4.0, 15.7 Hz, 1H), 5.60-5.49 (m, 1H), 5.14-5.03 (m, 1H), 4.98-4.89 (m, 1H), 4.32 (td, J=4.9, 12.0 Hz, 1H), 3.86-3.73 (m, 1H), 3.70-3.57 (m, 1H), 1.00 (d, J=6.6 Hz, 3H), 0.85-0.67 (m, 9H), 0.06-−0.10 (m, 6H);

[2022] LCMS: (M+H⁺): 375.1;

[2023] HPLC: purity 75.9%;

[2024] TLC (Ethyl acetate:Petroleum ether=1:1) 5A: R_{f1}=0.42; 5B: R_{f2}=0.47.

### 6. Preparation of Compound 6A

[chemical structure]

[2025] Compound 5A (1.00 g, 2.67 mmol) was dried by azeotropic distillation on a rotary evaporator with pyridine (20 mL) and toluene (20 mL*2). To a solution of 5A (1.00 g, 2.67 mmol) in THF (30.00 mL) and pyridine (9.93 g, 125.49 mmol, 10.13 mL) was added 1-[chloro-(4-methoxyphenyl)-phenyl-methyl]-4-methoxy-benzene (1.72 g, 5.07 mmol) then added AgNO₃ (780.11 mg, 4.59 mmol) under N₂. The mixture was stirred at 25° C. for 20 hour. TLC indicated compound 5A was consumed and one new spot formed. The mixture was added toluene (30 mL), quenched by addition MeOH (0.1 mL) and stirred for 1 h at 25° C., then filtered through celite, and the celite plug was washed thoroughly with toluene (20 mL), concentrated under reduced pressure to give a crude. The residue was purified by column chromatography (SiO₂, Petroleum ether/Ethyl acetate=1/0 to 0/1) to get 1.1 g product. Compound 6A (1.10 g, 60.87% yield) was obtained as a yellow solid.

[2026] ¹H NMR (400 MHz, CDCl₃) δ=8.08 (d, J=8.2 Hz, 1H), 7.48 (br d, J=7.5 Hz, 2H), 7.43-7.27 (m, 9H), 6.93 (dd, J=4.0, 8.6 Hz, 4H), 6.15 (dd, J=3.1, 14.1 Hz, 1H), 5.68 (d, J=8.2 Hz, 1H), 5.09-4.87 (m, 1H), 4.34 (td, J=5.2, 14.5 Hz, 1H), 4.01 (br d, J=4.9 Hz, 1H), 3.91 (d, J=1.5 Hz, 7H), 3.83 (br dd, J=2.8, 6.7 Hz, 1H), 2.29 (s, 1H), 2.19-2.03 (m, 1H), 1.10 (d, J=6.4 Hz, 3H), 1.04-1.00 (m, 1H), 0.92 (s, 9H), 0.18 (s, 1H), 0.15 (s, 3H), 0.00 (s, 3H).

[2027] TLC (Petroleum ether:Ethyl acetate=1:1) R_{f}=0.64

### 7. Preparation of 5′-(S)—C-Me-5′-ODMTr-2′-F-dU

[chemical structure]

[2028] To a solution of compound 6A (1.00 g, 1.48 mmol) in THF (15.00 mL) was added TBAF (733.96 mg, 2.81 mmol). The mixture was stirred at 25° C. for 3 hour. TLC indicated compound 6A was consumed and one new spot formed. The mixture was concentrated under reduced pressure to give a residue. The residue was dissolved by EtOAc (20 mL) and washed by NaCl (5%, aq. 20 mL), extracted with EtOAc (20 mL*3). Dried over Na₂SO₄, filtered and concentrated under reduced pressure to give a residue. The residue was purified by column chromatography (SiO₂, Petroleum ether/Ethyl acetate=1/0 to 0/1) to get 0.7 g product. Compound 5′-(S)—C-Me-5′-ODMTr-2′-F-dU (700.00 mg, 84.07% yield) was obtained as a yellow solid.

[2029] ¹H NMR (400 MHz CDCl₃,) δ=7.75 (d, J=8.2 Hz, 1H), 7.51-7.46 (m, 2H), 7.44-7.36 (m, 4H), 7.36-7.32 (m, 1H), 7.29-7.24 (m, 1H), 6.88 (dd, J=2.2, 8.9 Hz, 4H), 5.92 (dd, J=1.5, 18.0 Hz, 1H), 5.34 (s, 1H), 5.19-4.95 (m, 1H), 3.84 (d, J=1.1 Hz, 6H), 3.80-3.71 (m, 1H), 1.12 (d, J=6.5 Hz, 3H);

[2030] ¹³C NMR (101 MHz, CDCl₃) δ=162.95, 158.70, 149.74, 145.60, 140.44, 136.26, 136.06, 130.71, 128.54, 127.98, 127.55, 126.79, 113.81, 113.19, 112.99, 112.34, 102.72, 102.47, 88.87, 88.60, 88.53, 88.26, 87.22, 85.76, 85.52, 69.12, 68.93, 68.52, 68.28, 55.61, 55.37, 54.88, 18.29;

[2031] LCMS: (M−H⁺): 561.2;

[2032] HPLC: purity 93.2%;

[2033] TLC (Ethyl acetate:Petroleum ether=1:1) R_{f}=0.17.

### 8. Preparation of Compound 5′-(S)—C-Me-5′-ODMTr-2′-F-dU-CNE

[chemical structure]

[2034] Compound 5′-(S)—C-Me-5′-ODMTr-2′-F-dU (4.85 g, 8.62 mmol) was dried by azeotropic distillation on a rotary evaporator with toluene (10 mL*3). To a solution of compound 5′-(S)—C-Me-5′-ODMTr-2′-F-dU (4.85 g, 8.62 mmol) in DMF (48.5 mL) was added N— methylimidazole (1.42 g, 17.24 mmol, 1.37 mL) and 5-ethylsulfanyl-2H-tetrazole (1.12 g, 8.62 mmol), degassed and purged with N₂ for 3 times. Then added 3-bis (diisopropylamino)phosphanyloxypropanenitrile (3.90 g, 12.93 mmol, 4.11 mL). The mixture was stirred at 15° C. for 2 hr in N₂. TLC indicated compound 5′-(S)—C-Me-5′-ODMTr-2′-F-dU was consumed and two new spot formed. The mixture was added sat. NaHCO₃ (aq., 50 mL), extracted with Ethyl acetate (50 mL*3). The combined organic layers were washed with H₂O (50 mL*2), dried over Na₂SO₄, filtered and concentrated under reduced pressure to give a residue at 30° C. waterbath under N₂ atmosphere. The residue was purified by column chromatography (SiO₂, Petroleum ether/Ethyl acetate=I/O to 0:1) get 4 g product. Compound 5′-(S)—C-Me-5′-ODMTr-2′-F-dU-CNE (4 g, 56.66% yield) was obtained as a white solid.

[2035] ¹H NMR (400 MHz, CDCl₃) δ=8.78 (br s, 1H), 8.00-7.79 (m, 1H), 7.41-7.08 (m, 10H), 6.86-6.64 (m, 4H), 5.93 (br t, J=17.2 Hz, 1H), 5.46 (dd, J=2.8, 8.1 Hz, 1H), 5.19-4.93 (m, 1H), 4.51-4.25 (m, 1H), 3.99-3.87 (m, 1H), 3.84-3.71 (m, 6H), 3.70-3.61 (m, 2H), 3.59-3.30 (m, 4H), 2.94-2.77 (m, 2H), 2.73-2.62 (m, 1H), 2.56-2.41 (m, 1H), 2.23 (t, J=6.2 Hz, 1H), 1.32-0.82 (m, 22H);

[2036] ¹³C NMR (101 MHz, CDCl₃) δ=163.21, 163.07, 158.72, 158.65, 150.08, 149.95, 145.98, 139.98, 136.48, 136.25, 136.16, 130.76, 130.71, 128.60, 127.69, 127.05, 126.95, 117.76, 113.00, 102.41, 88.32, 87.08, 86.45, 69.83, 69.10, 68.62, 60.39, 58.26, 58.22, 58.16, 58.07, 57.88, 55.26, 55.21, 45.36, 45.30, 36.47, 31.44, 24.51, 22.94, 21.04, 20.28, 18.67, 14.20;

[2037] ³¹P NMR (162 MHz, CHLOROFORM-d) δ=150.70 (s, 1P), 150.65 (s, 1P), 150.63 (s, 1P), 150.54 (s, 1P), 14.18 (s, 1P);

[2038] LCMS: (M−H⁺): 761.2;

[2039] HPLC: HPLC purity=52.15%+41.00%;

[2040] TLC: (Ethyl acetate:Petroleum ether=3:1), R_{f1}=0.32, R_{f2}=0.4.

### Example 32: Synthesis of 5′-(R)—C-Me-5′-ODMTr-2′-OMe-U

[chemical structure]

[chemical structure]

### 1. Preparation of Compound 5B

[chemical structure]

[2041] To a solution of compound 4 (19.00 g, 51.29 mmol) in THF (140 mL) was dropwise in MeMgBr (3 M, 68.39 mL) (a solution in 140 mL THF) at −20° C. over 10 min. The mixture was stirred at −20° C.-20° C. for 30 min. TLC showed compound 4 was partly remained and new spot was detected. Then the mixture was stirred at 20° C. for 20 min. TLC and LCMS showed compound 4 was partly remained and new spot was detected. The reaction mixture was quenched by addition sat. NH₄Cl (200 mL) at 0° C., and then diluted with EtOAc (500 mL) and extracted with EtOAc (500 mL*3). The combined organic layers were dried over anhydrous Na₂SO₄, filtered and concentrated under reduced pressure to give a residue. The residue was purified by MPLC (flash Silica (CS), 40-60 μm, 60A, 220 g, Ethyl acetate/Petroleum ether=0%, 10%, 20%, 30%, 50%, 60%, 70%, 80%, 100%) to give compound 5A (1.80 g, 9.08% yield) as a white solid. Compound 5B (1.60 g, 8.07% yield) was obtained as a white solid.

[2042] TLC (plate 1: Petroleum ether:Ethyl acetate=1:3) R_{f1}=0.39, R_{f2}=0.32

### Compound 5A

[2043] ¹H NMR (400 MHz, DMSO-d₆) δ=11.26 (s, 1H), 7.98 (d, J=8.2 Hz, 1H), 5.75 (d, J=4.6 Hz, 1H), 5.58 (d, J=8.2 Hz, 1H), 5.10 (d, J=4.4 Hz, 1H), 4.19 (t, J=4.6 Hz, 1H), 3.72 (br t, J=4.9 Hz, 2H), 3.60 (br d, J=2.9 Hz, 1H), 3.25 (s, 3H), 1.07 (d, J=6.4 Hz, 3H), 0.79 (s, 9H), 0.00 (s, 6H)

[2044] LCMS (M+H⁺): 387.1

[2045] TLC (plate 1: Petroleum ether:Ethyl acetate=1:3) R_{f1}=0.39

### Compound 5B

[2046] ¹H NMR (400 MHz, DMSO-d₆) δ=11.28 (s, 1H), 7.80 (d, J=8.2 Hz, 1H), 5.77 (d, J=6.8 Hz, 1H), 5.58 (d, J=8.2 Hz, 1H), 5.07 (br s, 1H), 4.33-4.29 (m, 1H), 3.77 (dd, J=5.1, 6.6 Hz, 1H), 3.72-3.64 (m, 1H), 3.55 (dd, J=2.0, 4.0 Hz, 1H), 3.18 (s, 3H), 1.01 (d, J=6.6 Hz, 3H), 0.78 (s, 9H), 0.00 (s, 6H)

[2047] LCMS (M+H⁺): 387.2

[2048] TLC (Petroleum ether:Ethyl acetate=1:2) R_{f2}=0.32

### 2. Preparation of Compound 6B

[chemical structure]

[2049] Compound 5B (1.10 g, 2.85 mmol) was dried by azeotropic distillation on a rotary evaporator with Pyridine (20 mL) and toluene (20 mL*2). To a solution of compound 5B (1.10 g, 2.85 mmol) in THF (33.00 mL) and pyridine (11.52 g, 145.70 mmol, 11.76 mL) was added DMTCl (1.83 g, 5.41 mmol), then added AgNO₃ (831.53 mg, 4.90 mmol, 823.30 uL). The mixture was stirred at 25° C. for 20 hours. TLC showed compound 5B was consumed and new spot was detected. The mixture was added toluene (30 mL), quenched by addition MeOH (0.1 mL) and stirred for 1 h at 25° C., then filtered through celite, and the celite plug was washed thoroughly with toluene (20 mL), concentrated under reduced pressure to give a crude. Compound 6B (3.00 g, crude) was obtained as a yellow oil.

[2050] TLC (Petroleum ether:Ethyl acetate=1:1) Rf=0.43.

### 3. Preparation of Compound 5′-(R)—C-Me-5′-ODMTr-2′-OMe-U

[chemical structure]

[2051] To a solution of compound 6B (1.96 g, 2.85 mmol) in THF (40.00 mL) was added TBAF (1 M, 5.41 mL). The mixture was stirred at 25° C. for 3 hour. TLC showed compound 6B was consumed and one new spot was detected. The mixture was concentrated under reduced pressure to give a residue. The residue was dissolved by EtOAc (50 mL) and washed by NaCl (5%, aq. 50 mL), extracted with EtOAc (50 mL*3), dried over Na₂SO₄, filtered and concentrated under reduced pressure to give a residue. The residue was purified by MPLC (SiO₂, silica gel was washed by Petroleum ether (5% TEA),Ethyl acetate/Petroleum ether=0%; 20%; 50%; 70%, 80% to 100%) to give compound 5′-(R)—C-Me-5′-ODMTr-2′-OMe-U (950.00 mg, 56.95% yield) was obtained as a white solid.

[2052] ¹H NMR (400 MHz, DMSO-d₆) δ=11.37 (s, 1H), 7.44 (d, J=7.6 Hz, 2H), 7.36-7.19 (m, 8H), 6.90 (d, J=8.9 Hz, 4H), 5.78-5.71 (m, 1H), 5.21-5.13 (m, 2H), 4.30 (q, J=5.6 Hz, 1H), 3.78-3.64 (m, 8H), 3.52-3.42 (m, 1H), 3.34 (s, 3H), 0.79 (d, J=6.4 Hz, 3H)

[2053] ¹³C NMR (101 MHz, DMSO-d₆) δ=163.24, 158.58, 158.55, 150.82, 146.71, 140.99, 136.59, 136.48, 130.63, 128.33, 128.16, 127.07, 113.58, 113.52, 102.25, 87.59, 86.52, 86.29, 82.06, 69.89, 68.16, 58.10, 55.51, 55.49, 33.72, 23.07, 17.61, 15.20

[2054] HPLC purity: 98.168%

[2055] LCMS (M+H⁺): 573.1

[2056] TLC (Petroleum ether:Ethyl acetate=1:2) R_{f}=0.10

### 4. Preparation of Compound 5′-(R)—C-Me-5′-ODMTr-2′-OMe-U-CNE-phosphoramidite

[chemical structure]

[2057] DIEA (1.32 g, 10.23 mmol, 1.79 mL) were added consecutively to a stirred solution of compound 1 (4.9 g, 8.53 mmol) in anhyd. DCM (50 mL) under Ar atm., and then added compound 1A (43.25 mg, 182.73 umol) at 0° C. After stirring at 0° C.-15° C. for 3 hr. LCMS showed compound 1 was partly remained and two major spots was detected. Then added compound 1A (201.82 mg, 852.74 umol). After stirring at 0° C.-15° C. for 1 hr, TLC showed compound 1 was partly remained and two major spots was detected. The mixture was added sat. NaHCO₃ (aq., 20 mL) and extracted with DCM (50 mL*3). The combined organic layers were dried over Na₂SO₄, filtered and concentrated under reduced pressure to give a residue. The residue was purified by MPLC (SiO₂, Ethyl acetate/Petroleum ether=0%, 20%, 40%, 60%, 70%, 100%, 5% TEA) to give compound 5′-(R)—C-Me-5′-ODMTr-2′-OMe-U-CNE-phosphoramidite (4.0 g, 60.54% yield) was obtained as a white solid.

[2058] ¹H NMR (400 MHz, CDCl₃) δ=7.56-7.48 (m, 2H), 7.47-7.36 (m, 4H), 7.33-7.20 (m, 5H), 6.86 (td, J=2.5, 8.9 Hz, 4H), 5.94 (t, J=4.7 Hz, 1H), 5.06 (dd, J=1.2, 8.1 Hz, 1H), 4.91-4.71 (m, 1H), 4.04-3.86 (m, 4H), 3.82 (s, 6H), 3.76-3.65 (m, 3H), 3.53 (d, J=8.7 Hz, 4H), 2.71-2.53 (m, 3H), 1.27-1.22 (m, 10H), 1.01 (t, J=6.3 Hz, 3H)

[2059] ³¹P NMR (162 MHz, CDCl₃) δ=150.16, 149.61, 14.16

[2060] LCMS: (M−H⁺): 773.3

[2061] HPLC purity: 40.8%+50.0%

[2062] TLC (Petroleum ether:Ethyl acetate=1:3, 5% TEA) R_{f1}=0.60, R_{f2}=0.55

### Example 33: Synthesis of 5′-(S)—C-Me-5′-ODMTr-2′-OMe-U

[chemical structure]

[chemical structure]

### 1. Preparation of Compound 2

[chemical structure]

[2063] To a solution of compound 1 (10.00 g, 38.73 mmol) in pyridine (80.00 mL) was added DMTCl (15.75 g, 46.48 mmol) at 0° C. The mixture was stirred at 0-20° C. for 16 hours. TLC showed the starting material was consumed and one new spot was detected. The resulting mixture was concentrated under reduced pressure to give a residue. The residue was dissolved by addition ethyl acetate (300 mL) and H₂O (150 mL), and extracted with ethyl acetate (300 mL*3). The combined organic layers were dried over Na₂SO₄, filtered and concentrated under reduced pressure to give a crude (25 g) as a yellow solid. Compound 2 (25.00 g, crude) was obtained as a yellow oil. TLC (Petroleum ether:Ethyl acetate=1:3, 5% TEA) R_{f}=0.1.

### 2. Preparation of Compound 2A

[chemical structure]

[2064] To a solution of compound 2 (24.00 g, 42.81 mmol) in DCM (200.00 mL) was added imidazole (5.83 g, 85.62 mmol) and TBSCl (9.68 g, 64.21 mmol). The mixture was stirred at 20° C. for 14 hours. TLC showed compound 2 was partly remained and one major spot was detected. The resulting solution was combined with another batch product (1 g scale) and diluted with DCM (300 mL), washed with NaHCO₃ (aq., 100 mL) and brine (100 mL). The organic layer was dried over anhydrous Na₂SO₄, filtered and concentrated under reduced pressure to give 28 g crude. Compound 2A (26.88 g, 93.04% yield) (Yield From Conversion Rate) was obtained as a white solid.

[2065] ¹H NMR (400 MHz, CDCl₃) δ=9.29 (br s, 1H), 8.64 (br d, J=4.2 Hz, 1H), 8.19 (d, J=8.2 Hz, 1H), 7.40-7.25 (m, 12H), 7.20 (d, J=8.8 Hz, 2H), 6.89-6.81 (m, 5H), 5.98 (s, 1H), 5.28 (d, J=7.9 Hz, 1H), 4.43 (dd, J=5.0, 8.0 Hz, 1H), 4.11 (br d, J=8.2 Hz, 1H), 3.84-3.78 (m, 8H), 3.73-3.55 (m, 5H), 3.42-3.36 (m, 1H), 1.00-0.83 (m, 16H), 0.15-0.04 (m, 7H);

[2066] TLC (Petroleum ether:Ethyl acetate=1:3) Rf=0.47.

### 3. Preparation of Compound 3

[chemical structure]

[2067] To a solution of compound 2A (27.00 g, 40.01 mmol) in CH₃COOH/H₂O (V/V=80%, 100 mL). The mixture was stirred at 20° C. for 16 hours. TLC showed compound 2A was consumed and one major spot was detected. The resulting solution was diluted with Ethyl acetate (300 mL) and added sat. NaHCO₃ (aq.) to pH-7, then extracted with Ethyl acetate (300 mL*3). The organic layer was dried over anhydrous Na₂SO₄, filtered and concentrated under reduced pressure to give a crude. The crude was purified by MPLC (SiO₂, Petroleum ether:Ethyl acetate=5:1 to 1:3). Compound 3 (10.00 g, 67.10% yield) was obtained as a white solid.

[2068] ¹H NMR (400 MHz,) CDCl₃ 6=8.18 (br s, 1H), 7.56 (d, J=8.2 Hz, 1H), 5.62 (dd, J=2.1, 8.3 Hz, 1H), 5.55 (d, J=4.2 Hz, 1H), 4.25 (t, J=5.1 Hz, 1H), 3.91-3.86 (m, 2H), 3.65 (br dd, J=7.1, 11.9 Hz, 1H), 3.38 (s, 3H), 2.46 (br d, J=4.2 Hz, 1H), 0.81 (s, 9H), 0.01 (d, J=5.5 Hz, 6H);

[2069] TLC (Petroleum ether:Ethyl acetate=1:1) Rf=0.28.

### 4. Preparation of Compound 4

[chemical structure]

[2070] To a solution of compound 3 (3.00 g, 8.05 mmol) in DCM (50.00 mL) was added DMP (4.10 g, 9.66 mmol) at 0° C. The mixture was stirred at 25° C. for 1.5 h. TLC showed compound 3 was partly remained and one major spot was detected. The mixture was diluted and added EtOAc (50 mL) and quenched by addition Na₂S₂O₃ (5% aq., 80 mL) and sat. NaHCO₃ (aq., 80 mL) at 0° C. and stirred for 20 min, extracted with EtOAc (200 mL*3). The combined organic layers were dried over Na₂SO₄, filtered, and concentrated under reduced pressure at 25° C. water bath to give a crude. Compound 4 (2.50 g, crude) was obtained as a white solid.

[2071] ¹H NMR (400 MHz, CDCl₃) δ=9.64 (s, 1H), 7.55-7.44 (m, 1H), 5.73-5.56 (m, 2H), 4.42-4.25 (m, 1H), 3.80 (br t, J=4.5 Hz, 1H), 3.42-3.20 (m, 3H), 0.78 (s, 9H), 0.07-0.14 (m, 6H);

[2072] TLC (Petroleum ether:Ethyl acetate=1:3) R_{f}=0.18.

### 5. Preparation of Compound 5A and 5B

[chemical structure]

[2073] To a solution of compound 4 (2.50 g, 6.75 mmol) in THF (30 mL) was added dropwise MeMgBr (3 M, 9.00 mL) (a solution in 30 mL THF) at −20° C. over 10 min. The mixture was stirred at −20° C.-20° C. for 30 min. TLC showed compound 4 was partly remained and new spot was detected. Then the mixture was stirred at 20° C. for 20 min. TLC showed compound 4 was partly remained and new spot was detected. The residue was purified by MPLC (SiO₂, Petroleum ether:Ethyl acetate=5:1, 3:1, 1:1,to 1:2) to compound 5A (320.00 mg, 12.27% yield) (Yield From Conversion Rate) was obtained as a white solid and compound 5B (480.00 mg, 18.37% yield) (Yield From Conversion Rate) was obtained as a white solid.

[2074] TLC (Petroleum ether:Ethyl acetate=1:2) R_{f1}=0.39, R_{f2}=0.32

### Compound 5A:

[2075] ¹H NMR (400 MHz, DMSO-d₆) δ=11.26 (s, 1H), 7.98 (d, J=8.2 Hz, 1H), 5.75 (d, J=4.6 Hz, 1H), 5.58 (d, J=8.2 Hz, 1H), 5.10 (d, J=4.4 Hz, 1H), 4.19 (t, J=4.6 Hz, 1H), 3.72 (br t, J=4.9 Hz, 2H), 3.60 (br d, J=2.9 Hz, 1H), 3.25 (s, 3H), 1.07 (d, J=6.4 Hz, 3H), 0.79 (s, 9H), 0.00 (s, 6H)

[2076] TLC (Petroleum ether:Ethyl acetate=1:2) R_{f1}=0.39

### Compound 5B:

[2077] ¹H NMR (400 MHz, DMSO-d₆) δ=11.28 (s, 1H), 7.80 (d, J=8.2 Hz, 1H), 5.77 (d, J=6.8 Hz, 1H), 5.58 (d, J=8.2 Hz, 1H), 5.07 (br s, 1H), 4.33-4.29 (m, 1H), 3.77 (dd, J=5.1, 6.6 Hz, 1H), 3.72-3.64 (m, 1H), 3.55 (dd, J=2.0, 4.0 Hz, 1H), 3.18 (s, 3H), 1.01 (d, J=6.6 Hz, 3H), 0.78 (s, 9H), 0.00 (s, 6H)

[2078] TLC (Petroleum ether:Ethyl acetate=1:2) R_{f2}=0.32

### 6. Preparation of Compound 6A

[chemical structure]

[2079] To a mixture of pre-purified compound 5A (740.00 mg, 1.91 mmol), DMTCl (1.23 g, 3.63 mmol), and pyridine (7.10 g, 89.75 mmol, 7.24 mL) in anhyd. THF (30.00 mL) was added AgNO₃ (558.06 mg, 3.29 mmol). The mixture was stirred at 25° C. under N₂ for 16 h. TLC showed compound 5A was consumed and one new spot was detected. The mixture was quenched by addition of MeOH (0.1 mL) and diluted with toluene (30 mL). After stirred for an additional 1 h, the mixture was filtered through Celite, and the Celite plug was washed thoroughly with toluene. The filtrate was evaporated in vacuo to afford 2.4 g of crude. Compound 6A (2.40 g, crude) was obtained as a yellow oil. TLC (Petroleum ether:Ethyl acetate=1:1) R_{f}=0.48.

### 7. Preparation of Compound 5′-(S)—C-Me-S′—ODMTr-2′-OMe-U

[chemical structure]

[2080] To a solution of compound 6A (1.32 g, 1.92 mmol) in THF (12.00 mL) was added TBAF (1 M, 3.64 mL). The mixture was stirred at 25° C. for 3 hours. TLC showed compound 6A was consumed and one new spot was detected. The mixture was concentrated under reduced pressure to give a residue. The residue was dissolved by EtOAc (50 mL) and washed by NaCl (5%, aq. 50 mL), extracted with EtOAc (50 mL*3), dried over Na₂SO₄, filtered and concentrated under reduced pressure to give a residue. The residue was purified by MPLC (SiO₂, silica gel was washed by Petroleum ether (5% TEA), Ethyl acetate/Petroleum ether=0%; 20%; 50%; 70%, 80% to 100%). Compound 5′-(S)—C-Me-5′-ODMTr-2′-OMe-U (800.00 mg, 72.51% yield) was obtained as a white solid.

[2081] ¹H NMR (400 MHz, DMSO-d₆) δ=11.42 (s, 1H), 7.62 (d, J=8.2 Hz, 1H), 7.43 (br d, J=7.6 Hz, 2H), 7.34-7.19 (m, 7H), 6.88 (dd, J=5.3, 8.7 Hz, 4H), 5.81-5.73 (m, 2H), 5.58 (d, J=8.1 Hz, 1H), 5.11 (d, J=6.7 Hz, 1H), 4.22-4.11 (m, 1H), 3.83-3.72 (m, 8H), 3.55 (quin, J=5.7 Hz, 1H), 3.37-3.35 (m, 3H), 0.69 (d, J=6.2 Hz, 3H);

[2082] ¹³C NMR (101 MHz, DMSO-d₆) δ=163.35, 158.58, 158.55, 150.93, 146.56, 136.81, 136.70, 130.57, 128.41, 128.08, 113.47, 102.49, 86.37, 85.94, 69.64, 68.18, 57.99, 55.44, 17.66;

[2083] LCMS (M+Na⁺): 597.2, 97.26% purity;

[2084] TLC (Petroleum ether:Ethyl acetate=1:1) Rf=0.10.

### 8. Preparation of Compound 5′-(S)—C-Me-5′-ODMTr-2′-OMe-U-CNE-phosphoramidite

[chemical structure]

[2085] DIEA (1.32 g, 10.23 mmol, 1.79 mL) were added consecutively to a stirred solution of compound 1 (4.9 g, 8.53 mmol) in anhyd. DCM (50 mL) under Ar atm., and then added compound 1A (43.25 mg, 182.73 umol) at 0° C. After stirring at 0° C.-15° C. for 3 hr. LCMS showed compound 1 was partly remained and two major spots were detected. Then added compound 1A (201.82 mg, 852.74 umol), and after stirring at 0° C.-15° C. for 1 hr, TLC showed compound 1 was partly remained and two major spots were detected. The mixture was added sat. NaHCO₃ (aq., 20 mL) and extracted with DCM (50 mL*3). The combined organic layers were dried over Na₂SO₄, filtered and concentrated under reduced pressure to give a residue. The residue was purified by MPLC (SiO₂, Ethyl acetate/Petroleum ether=0%, 20%, 40%, 60%, 70%, 100%, 5% TEA) to give compound 5′-(S)—C-Me-5′-ODMTr-2′-OMe-U-CNE-phosphoramidite (4.5 g, 68.11% yield) was obtained as a white solid.

[2086] ¹H NMR (400 MHz, CDCl₃) δ=8.56 (br s, 1H), 8.12-7.84 (m, 1H), 7.35-7.29 (m, 2H), 7.28-7.11 (m, 8H), 6.74 (ddd, J=3.0, 5.3, 8.6 Hz, 4H), 5.92 (t, J=4.0 Hz, 1H), 5.48 (t, J=8.1 Hz, 1H), 4.30-4.08 (m, 1H), 3.97-3.84 (m, 2H), 3.77-3.54 (m, 9H), 3.53-3.39 (m, 6H), 2.50 (t, J=6.2 Hz, 1H), 2.17 (t, J=6.3 Hz, 1H), 1.10-1.01 (m, 9H), 0.97-0.91 (m, 4H), 0.88 (br d, J=6.4 Hz, 2H)

[2087] ³¹P NMR (162 MHz CDCl₃,) δ=150.40, 150.11, 14.16

[2088] LCMS: (M−H⁺): 773.3

[2089] HPLC purity: 40.4%+49.2%

[2090] TLC (Petroleum ether:Ethyl acetate=1:3, 5% TEA) R_{f1}=0.60, R_{f2}=0.55

### Example 34: Synthesis of 5′-(R)—C-Me-5′-ODMTr-dT

[chemical structure]

[chemical structure]

### 1. Preparation of Compound 5B

[chemical structure]

[2091] A 100 mL round-bottom flask equipped with a septum covered side arm was charged with [[(1R,2R)-2-amino-1,2-diphenyl-ethyl]-(p-tolylsulfonyl)amino]-chloro-ruthenium; 1-isopropyl-4-methyl-benzene (34.53 mg, 54.27 umol) and compound 6 (1.00 g, 2.71 mmol), and the system was flushed with nitrogen. A solution of sodium;formate;dihydrate (11.75 g, 112.89 mmol) in water (40.00 mL) was added, followed by EtOAc (10.00 mL). The resulting two-phase mixture was stirred for 12 h at 25° C. TLC showed the starting material was consumed. The mixture was extracted with EtOAc (50 mL*3). The combined organic was washed with brine (30 mL), dried over Na₂SO₄, filtered and concentrated to get the crude. The mixture was purified by MPLC (Petroleum ether/MTBE=10:1 to 1:1) to get compound 5B as a yellow oil (1.00 g, 99.50% yield).

[2092] ¹H NMR (400 MHz, DMSO-d6): δ=11.30 (s, 1H), 7.67 (s, 1H), 6.16 (dd, J=5.6, 8.7 Hz, 1H), 5.04 (d, J=5.1 Hz, 1H), 4.49 (br d, J=5.1 Hz, 1H), 3.86-3.66 (m, 1H), 3.55 (d, J=4.2 Hz, 1H), 2.50 (br s, 12H), 2.22-2.05 (m, 1H), 1.96 (br dd, J=5.6, 12.9 Hz, 1H), 1.77 (s, 3H), 1.11 (d, J=6.2 Hz, 4H), 0.94-0.81 (m, 10H), 0.09 (s, 6H);

[2093] HPLC: HPLC purity: 84.4%;

[2094] TLC (Petroleum ether/Ethyl acetate=1:1) Rf=0.37.

### 2. Preparation of Compound 7B

[chemical structure]

[2095] The compound 5B (1.00 g, 2.70 mmol) was dried by azeotropic distillation on a rotary evaporater with pyridine (20 mL) and toluene (20 mL*2).

[2096] A solution of compound 5B (1.00 g, 2.70 mmol) and DMTCl (1.89 g, 5.59 mmol) in the mixture of pyridine (10.00 mL) and THF (40.00 mL) was degassed and purged with N₂ for 3 times and then AgNO₃ (788.56 mg, 4.64 mmol) was added. The mixture was stirred at 25° C. for 15 hr. TLC showed the starting material was consumed. MeOH(1 mL) was added and stirred for 15 min and then the mixture was filtered and the cake was washed with toluene (20 mL*3), the filtrate was concentrated to get the compound 7B as a yellow oil (1.81 g, crude). The mixture was used directly to next step without any purification.

[2097] TLC (Petroleum ether/Ethyl acetate) Rf=0.63

### 3. Preparation of 5′-(R)—C-Me-5′-ODMTr-dT

[chemical structure]

[2098] To a solution of compound 7B (1.81 g, 2.69 mmol.) in THF (20.00 mL) was added TBAF (1 M, 5.11 mL). The mixture was stirred at 25° C. for 3 hours. TLC showed the starting material was consumed. The mixture was concentrated to get the crude and then sat. NaCl (5% aq., 20 mL) was added and extracted with EtOAc (20 mL*3). The combined organic was dried over Na₂SO₄, filtered and concentrated to get the crude. The residue was purified by MPLC (Petroleum ether/Ethyl acetate 5:1, 1:1, 1:4, 5% TEA) to get 5′-(R)—C-Me-5′-ODMTr-dT as a white solid (1.00 g, 66.55% yield).

[2099] ¹H NMR (400 MHz, DMSO-d6): δ=11.38 (s, 1H), 7.52 (d, J=7.5 Hz, 2H), 7.43-7.31 (m, 6H), 7.30-7.22 (m, 1H), 7.13 (d, J=1.0 Hz, 1H), 6.99-6.90 (m, 4H), 6.18 (t, J=7.2 Hz, 1H), 5.33 (d, J=4.8 Hz, 1H), 4.56 (quin, J=4.1 Hz, 1H), 3.79 (d, J=2.4 Hz, 6H), 3.68 (t, J=3.3 Hz, 1H), 3.47-3.39 (m, 1H), 2.11 (dd, J=4.8, 7.1 Hz, 2H), 1.46 (s, 3H), 0.83 (d, J=6.4 Hz, 3H)

[2100] HPLC: HPLC purity: 98.6%

[2101] LCMS: (M−H⁺)=557.2; LCMS purity: 100.0%

[2102] TLC (Petroleum ether/Ethyl acetate=1:1, 5% TEA) R_{f}=0.02.

### 4. Preparation of 5′-(R)—C-Me-5′-ODMTr-dT-CNE-phosphoramidite

[chemical structure]

[2103] The 5′-(R)—C-Me-5′-ODMTr-dT (5 g, 8.95 mmol) was dried with toluene (50 mL). To a solution of DIEA (1.39 g, 10.74 mmol, 1.87 mL) and 5′-(R)—C-Me-5′-ODMTr-dT (5 g, 8.95 mmol) in anhyd. DCM (50 mL) was added compound 1 (2.76 g, 9.40 mmol) under N₂ at 0° C. The mixture was stirring at 15° C. for 2 h. TLC showed the starting material was consumed and two new spots were found. The mixture was quenched by addition of saturated aq. NaHCO₃ (20 mL) and extracted with DCM (30 mL*3). The combined organic was dried over Na₂SO₄, filtered and concentrated to get the crude. The above crude material was purified on a Combiflash instrument from Teledyne using either a pre-treated silica gel column. A 40 g silica gel cartridge column was first pre-treated by eluting with 10% EtOAc/Petroleum ether containing 5% Et₃N (300 mL) and the crude was dissolved in a 2:1 volume:volume mixture of methylene chloride: Petroleum ether containing 5% Et₃N then loaded onto a 40 g silica column which had been equilibrated with 10% Petroleum ether/EtOAc containing 5% Et₃N. After loading the sample on the column, the purification process was run using the following gradient: 10 to 50% EtOAc/Petroleum ether containing 5% Et₃N, then residual solvent was removed to get the 5′-(R)—C-Me-5′-ODMTr-dT-CNE-phosphoramidite as a white solid (3.6 g, 53.00% yield).

[2104] ¹H NMR (400 MHz CDCl₃,) δ=8.11 (br s, 1H), 7.53 (br d, J=7.7 Hz, 3H), 7.42 (br t, J=8.2 Hz, 4H), 7.32-7.17 (m, 4H), 7.07-6.99 (m, 1H), 6.84 (br d, J=8.2 Hz, 4H), 6.31 (br dd, J=5.5, 8.7 Hz, 1H), 4.94 (br s, 1H), 3.96-3.73 (m, 10H), 3.72-3.41 (m, 4H), 2.65 (td, J=6.1, 18.0 Hz, 2H), 2.53-2.37 (m, 1H), 2.10 (br d, J=8.2 Hz, 1H), 1.47 (br s, 4H), 1.33-1.16 (m, 15H), 1.00-0.90 (m, 3H)

[2105] ³¹P NMR (162 MHz, CDCl₃) δ=148.81 (s, 1P), 148.35 (s, 1P)

[2106] HPLC: HPLC purity: 59.15%+35.91%

[2107] LCMS: LCMS purity: 60.34%+37.17%

### Example 35: Synthesis of 5′-(S)—C-Me-5′-ODMTr-dT

[chemical structure]

[chemical structure]

[chemical structure]

### 1. Preparation of Compound 2

[chemical structure]

[2108] To a solution of compound 1 (63.00 g, 176.72 mmol) in the mixture of H₂O (250.00 mL) and MeCN (250.00 mL) was added PhI(OAc)₂ (125.23 g, 388.79 mmol) and TEMPO (5.56 g, 35.34 mmol) at 10° C. The mixture was stirred at 25° C. for 2 hour. TLC (Petroleum ether/Ethyl acetate=1:1, Rf=0) showed the starting material was consumed. The mixture was concentrated to get the crude and the mixture was added MTBE (1 L) stirred for 0.5 h and then filtered, the cake was washed with MTBE (1 L*2), the cake was dried to get the compound 2 as a white solid (126.00 g, 96.23% yield).

[2109] ¹H NMR (400 MHz, DMSO): δ=11.21 (s, 1H), 7.89 (d, J=1.0 Hz, 1H), 6.18 (dd, J=5.9, 8.6 Hz, 1H), 4.61-4.41 (m, 1H), 4.17 (d, J=0.9 Hz, 1H), 2.51-2.26 (m, 3H), 2.09-1.85 (m, 2H), 1.74-1.58 (m, 3H), 0.90-0.58 (m, 10H), 0.00 (d, J=2.0 Hz, 6H)

[2110] LCMS: (M+H⁺): 371.1;

[2111] TLC (Petroleum ether/Ethyl acetate=1:1) Rf=0

### 2. Preparation of Compound 3

[chemical structure]

[2112] To a solution of compound 2 (50.00 g, 134.96 mmol) in DCM (500.00 mL) was added DIEA (34.89 g, 269.92 mmol, 47.15 mL) and 2,2-dimethylpropanoyl chloride (21.16 g, 175.45 mmol). The mixture was stirred at −10-0° C. for 1.5 hours. TLC showed the starting material was consumed. The mixture in DCM was used directly for next step. TLC (Petroleum ether/Ethyl acetate=1:1) Rf=0.15

### 3. Preparation of Compound-4

[chemical structure]

[2113] The mixture compound 3 in DCM was added TEA (40.94 g, 404.55 mmol, 56.08 mL) and N-methoxymethanamine hydrochloride (19.73 g, 202.27 mmol). The mixture was stirred at 0° C. for 1 h. TLC showed the starting material was consumed. The mixture was washed with HCl (1N, 100 mL) and then aqueous NaHCO₃ (100 mL). The organic was dried over Na₂SO₄ and filtered to get the crude. The mixture was purified by silica gel chromatography (Petroleum ether/Ethyl acetate=30/1, 0/1) to afford the compound 4 as a white solid (95.50 g, 85.63% yield).

[2114] ¹H NMR (400 MHz, CDCl₃): δ=8.29 (s, 1H), 8.19 (br s, 1H), 6.46 (dd, J=5.1, 9.3 Hz, 1H), 4.71 (s, 1H), 4.38 (d, J=4.2 Hz, 1H), 3.65 (s, 3H), 3.15 (s, 3H), 2.18-2.08 (m, 1H), 2.00-1.90 (m, 1H), 1.87 (d, J=1.1 Hz, 3H), 0.88-0.74 (m, 10H), 0.00 (d, J=3.7 Hz, 6H) TLC (Petroleum ether/Ethyl acetate=1:1) R_{f}=0.43

### 4. Preparation of Compound 5

[chemical structure]

[2115] To a solution of compound 4 (115.00 g, 278.09 mmol) in THF (1.20 L) was added MeMgBr (3 M, 185.39 mL) at 0° C. The mixture was stirred at 0° C. for 2 h. TLC showed the starting material was consumed. The mixture was added water (1 L) at 0° C. and extracted with EtOAc (300 mL*2). The combined organic was dried over Na₂SO₄, filtered and concentrated to get the compound 5 as a white solid (100.00 g, 97.58% yield). The mixture was used directly without any purification.

[2116] ¹H NMR (400 MHz, CDCl₃): δ=8.81 (br s, 1H), 7.95 (s, 1H), 6.41 (dd, J=5.6, 8.1 Hz, 1H), 4.60-4.40 (m, 2H), 2.40-2.16 (m, 4H), 1.98 (s, 3H), 1.02-0.83 (m, TOH), 0.14 (d, J=3.3 Hz, 6H), 0.20-0.00 (m, 1H) TLC (Petroleum ether/Ethyl acetate=1:1) R_{f}=0.68

### 5. Preparation of Compound 6A

[chemical structure]

[2117] To a solution of compound 5 (46.00 g, 124.83 mmol) in the mixture of EtOAc (460.00 mL) and sodium formate (353.17 g, 5.19 mol) dissolved in Water (1.84 L), and then N— [(1S,2S)-2-amino-1,2-diphenyl-ethyl]-4-methyl-benzenesulfonamide;chlororuthenium;1-isopropyl-4-methyl-benzene (1.59 g, 2.50 mmol) was added. The resulting two-phase mixture was stirred for 12 h at 25° C. under N₂. TLC showed the starting material was consumed. The mixture was extracted with EtOAc (500 mL*3). The combined organic was washed with brine (300 mL), dried over Na₂SO₄, filtered and concentrated to get the crude. The mixture was purified by MPLC (Petroleum ether/MTBE=10:1 to 1:1) seven times to get compound 6A as a yellow oil (25.60 g, 57.53% yield).

[2118] ¹H NMR (400 MHz, DMSO-d6): δ=11.28 (s, 1H), 7.85 (s, 1H), 6.16 (t, J=6.8 Hz, 1H), 5.04 (d, J=4.6 Hz, 1H), 4.46-4.29 (m, 1H), 3.79 (br t, J=6.8 Hz, 1H), 3.59 (br s, 1H), 3.32 (s, 1H), 2.21-2.09 (m, 1H), 2.06-1.97 (m, 1H), 1.76 (s, 3H), 1.17-1.08 (m, 4H), 0.91-0.81 (m, 10H), 0.08 (s, 6H)

[2119] SFC: SFC purity: 98.6%

[2120] TLC (Petroleum ether/Ethyl acetate=1:1) Rf=0.38

### 6. Preparation of Compound 7A

[chemical structure]

[2121] The compound 6A (12.80 g, 34.55 mmol) was dried by azeotropic distillation on a rotary evaporator with pyridine (100 mL) and toluene (100 mL*2).

[2122] To a solution of compound 6A (12.80 g, 34.55 mmol) and DMTCl (1.89 g, 5.59 mmol) in the mixture of pyridine (120.00 mL) and THF (400.00 mL) was degassed and purged with N₂ for 3 times and then AgNO₃ (10.09 g, 59.43 mmol) was added. The mixture was stirred at 25° C. for 15 hr. TLC showed the starting material was consumed. MeOH (5 mL) was added and stirred for 15 min and then the mixture was filtered and the cake was washed with toluene (300 mL*3). The filtrate was concentrated to get the compound 7A as a yellow oil (46.50 g, crude). The mixture was used directly to next step without any purification.

[2123] TLC (Petroleum ether/Ethyl acetate) Rf=0.63

### 7. Preparation of 5′-(S)—C-Me-5′-ODMTr-dT

[chemical structure]

[2124] To a solution of compound 7A (46.50 g, 69.11 mmol) in THF (460.00 mL) was added TBAF (1 M, 131.31 mL). The mixture was stirred at 25° C. for 5 hrs. TLC showed the starting material was consumed. The mixture was concentrated to get the crude and then sat. NaCl (5% aq., 200 mL) was added and extracted with EtOAc (200 mL*3). The combined organic was dried over Na₂SO₄, filtered and concentrated to get the crude. The residue was purified by MPLC (Petroleum ether/Ethyl acetate 5:1, 1:1, 1:4, 5% TEA) to get 5′-(S)—C-Me-5′-ODMTr-dT as a white solid (29.00 g, 75.12% yield).

[2125] ¹H NMR (400 MHz, DMSO-d6): δ=11.35 (s, 1H), 7.56 (s, 1H), 7.58-7.53 (m, 1H), 7.44 (d, J=7.8 Hz, 2H), 7.37-7.24 (m, 6H), 7.23-7.17 (m, 1H), 6.87 (t, J=8.3 Hz, 4H), 6.13 (t, J=6.9 Hz, 1H), 5.21 (d, J=4.9 Hz, 1H), 4.23 (br s, 1H), 3.73 (d, J=2.9 Hz, 6H), 3.67 (t, J=3.7 Hz, 1H), 3.57-3.46 (m, 1H), 2.23-2.04 (m, 2H), 1.67 (s, 3H), 1.70-1.65 (m, 1H), 0.71 (d, J=6.2 Hz, 3H)

[2126] ¹³CNMR (101 MHz, DMSO-d6): δ=170.78, 164.16, 158.64, 158.59, 150.86, 146.71, 137.00, 136.75, 135.97, 130.65, 130.52, 128.38, 128.07, 127.11, 113.48, 110.11, 89.78, 86.41, 83.87, 70.58, 70.22, 60.21, 55.48, 21.20, 18.08, 14.53, 12.54

[2127] HPLC: HPLC purity: 98.4%

[2128] LCMS: (M−H⁺)=557.2; LCMS purity: 99.0%

[2129] SFC: SFC purity: 99.4%

[2130] TLC (Petroleum ether/Ethyl acetate=1:1, 5% TEA) R_{f}=0.01

### 8. Preparation of 5′-(S)—C-Me-5′-ODMTr-dT-CNE-phosphoramidite

[chemical structure]

[2131] To a solution of 5′-(S)—C-Me-5′-ODMTr-dT (5.00 g, 8.95 mmol) in MeCN (50.00 mL) was added 5-ethylsulfanyl-2H-tetrazole (1.17 g, 8.95 mmol) 1-methylimidazole (1.47 g, 17.90 mmol, 1.43 mL) and compound 1 (4.05 g, 13.43 mmol, 4.26 mL). The reaction mixture was stirred at 20° C. under N₂ for 2 hrs. TLC and LCMS showed a little starting material was consumed and the desired substance was found. The reaction mixture was concentrated under reduced pressure to get the crude and the residue was diluted with EtOAc (20 mL). The reaction mixture was washed with aq. saturated. NaHCO₃ solution (20 mL), dried over Na₂SO₄, filtered and concentrated to get the crude. The mixture was purified by MPLC (Petroleum ether 5% TEA: Ethyl acetate from 10:1 to 1:1) we got two batches: 2.5 g (batch 1) and 1.8 g (batch 2). We got 5′-(S)—C-Me-5′-ODMTr-dT-CNE-phosphoramidite as a white solid (4.3 g, 5.67 mmol, 63.310% yield).

### Batch 1:

[2132] ¹H NMR (400 MHz,) δ=8.19 (br s, 1H), 7.69-7.60 (m, 1H), 7.54 (s, 1H), 7.43-7.33 (m, 2H), 7.32-7.07 (m, 8H), 6.73 (ddd, J=3.7, 5.8, 9.0 Hz, 4H), 6.27-6.15 (m, 1H), 4.49-4.37 (m, 1H), 3.82-3.65 (m, 8H), 3.63-3.55 (m, 2H), 3.53-3.39 (m, 3H), 2.50 (t, J=6.3 Hz, 1H), 2.46-2.31 (m, 1H), 2.29-2.19 (m, 1H), 2.16-2.04 (m, 1H), 1.68 (s, 3H), 1.20-1.00 (m, 13H), 0.95 (d, J=6.8 Hz, 3H), 0.92-0.74 (m, 4H)

[2133] ³¹P NMR (162 MHz, CDCl₃) δ=149.11 (s, 1P), 148.99 (s, 1P)

[2134] HPLC: HPLC purity: 62.68%+32.65%

[2135] LCMS: LCMS purity: 64.42%+32.87%

### Batch 2:

[2136] ¹H NMR (400 MHz, CDCl₃) δ=8.19 (br s, 1H), 7.69-7.60 (m, 1H), 7.54 (s, 1H), 7.43-7.33 (m, 2H), 7.32-7.07 (m, 8H), 6.73 (ddd, J=3.7, 5.8, 9.0 Hz, 4H), 6.27-6.15 (m, 1H), 4.49-4.37 (m, 1H), 3.82-3.65 (m, 8H), 3.63-3.55 (m, 2H), 3.53-3.39 (m, 3H), 2.50 (t, J=6.3 Hz, 1H), 2.46-2.31 (m, 1H), 2.29-2.19 (m, 1H), 2.16-2.04 (m, 1H), 1.68 (s, 3H), 1.20-1.00 (m, 13H), 0.95 (d, J=6.8 Hz, 3H), 0.92-0.74 (m, 4H)

[2137] ³¹P NMR (162 MHz, CDCl₃) δ=149.11 (s, 1P), 148.99 (s, 1P), 14.17 (s, 1P)

[2138] HPLC: HPLC purity: 53.0%+41.24%

[2139] LCMS: LCMS purity: 53.19%+42.83%

[2140] TLC (Petroleum ether/Ethyl acetate=1:3) R_{f}=0.86, 0.8

### Example 36: Synthesis of 3′-LPSE amidites

### General Procedure for the Preparation of 3′-LPSE Amidites

### Procedure for the Preparation of L-DPSE-Cl

[chemical structure]

[2141] L-DPSE amino alcohol (S—2-(methyldiphenylsilyl)-1-((S)-pyrrolidin-2-yl)ethanol, 8.82 g, 28.5 mmol) was dried three times by azeotropic evaporation with anhydrous toluene (3×60 ml) at 35° C. and further dried in high vacuum for overnight. A solution of dried L-DPSE amino alcohol and 4-methylmorpholine (5.82 g, 6.33 mL, 57.5 mmole) which was dissolved in anhydrous toluene (50 ml) was added to a solution of PCl₃ (4.0 g, 2.5 mL, 29.0 mmole) in anhydrous toluene (25 ml) placed in 250 mL three neck round bottomed flask which was cooled at −5° C. under Argon. The reaction mixture was stirred at 0° C. for another 40 min. After that filtered the precipitated white solid by vacuum under argon using medium Frit, Airfree, Schlenk tube. The solvent was removed by under argon at low temperature (25° C.) and the semi solid mixture obtained was dried under vacuum overnight (˜15 h) and used for the next step directly.

[2142] ³¹P NMR (162 MHz, CDCl₃) δ 178.84

### Procedure for Preparation of 3′-LPSE Amidites

[2143] Nucleosides (1.0 eq.) in an appropriate size three necked flask was azeotroped three times with anhydrous toluene (15 mL/g) and was dried for 24 h on high vacuum. To the flask was added anhydrous THF (0.3 M) under argon and solution was cooled to −10° C. To the reaction mixture was added triethylamine (5.0 eq.) followed by addition of L-DPSE-Cl (0.9 M solution in anhydrous THF, 1.7 eq.) over the period of 5-10 min. The reaction mixture was warmed to room temperature and reaction progress was monitored by LCMS. After disappearance of starting material, the reaction mixture was cooled in an ice bath and was quenched by addition of water (1.0 eq) stirred for 10 min followed by added anhydrous Mg₂SO₄ (1.0 eq) and stirred for 10 min. The reaction mixture was filtered through airfree fritted glass tube, washed with anhydrous THF (50 mL) and the solvent was removed under reduced pressure. The solid obtained was dried under high vacuum for overnight before purification. Then dried crude product was purified by silica column (which was pre-deactivated with 3 column volume of ethyl acetate with 5% TEA) using ethyl acetate/hexane mixture with 5% TEA as a solvent afforded 3′-L-DPSE amidites as a white solid.

### Preparation of 3′-L-DPSE-5′-PO(OMe)₂-Vinylphosphonate-dT amidite (3′-L-DPSE-WV—NU-010)

[chemical structure]

[2144] Nucleoside 5′-PO(OMe)₂-Vinylphosphonate-dT, WV-NU-010 (7.0 g) was converted to 3′-L-DPSE-5′-PO(OMe)₂-Vinylphosphonate-dT amidite (3′-L-DPSE-WV-NU-010) by general procedure and obtained 11.8 g (87%) as white solid.

[2145] ³¹P NMR (162 MHz, CDCl₃) δ 152.41, 19.95.

[2146] ¹H NMR (400 MHz, Chloroform-d) δ 7.46 (ddt, J=16.5, 7.6, 2.7 Hz, 4H), 7.33-7.17 (m, 6H), 6.93-6.88 (m, 1H), 6.75 (ddd, J=22.6, 17.2, 4.4 Hz, 1H), 6.16 (dd, J=7.5, 6.3 Hz, 1H), 5.85 (ddd, J=19.2, 17.1, 1.8 Hz, 1H), 4.71 (dt, J=8.7, 5.7 Hz, 1H), 4.38 (dp, J=10.7, 3.6 Hz, 1H), 4.15 (tt, J=5.6, 2.7 Hz, 1H), 3.68 (dd, J=11.1, 3.7 Hz, 6H), 3.55-3.29 (m, 2H), 3.09 (tdd, J=10.8, 8.8, 4.3 Hz, 1H), 2.11 (ddd, J=13.9, 6.3, 3.3 Hz, 1H), 1.96 (s, 1H), 1.87 (d, J=1.2 Hz, 3H), 1.85-1.73 (m, 2H), 1.70-1.49 (m, 2H), 1.38 (ddd, J=15.9, 10.4, 6.3 Hz, 2H), 1.26-1.11 (m, 2H), 0.60 (s, 3H).

[2147] ¹³C NMR (101 MHz, CDCl₃) δ 171.07, 163.62, 163.59, 150.21, 150.19, 148.49, 148.43, 136.61, 135.84, 135.15, 134.57, 134.33, 129.48, 129.42, 127.97, 127.93, 127.81, 118.38, 116.50, 111.52, 85.02, 84.72, 84.70, 84.51, 84.48, 79.25, 79.16, 77.40, 77.28, 77.08, 76.76, 74.93, 74.91, 74.83, 74.81, 68.01, 67.98, 60.35, 52.60, 52.55, 52.47, 52.42, 47.03, 46.67, 38.12, 38.08, 27.18, 25.85, 25.82, 21.01, 17.58, 17.54, 14.19, 12.58, −3.00, −3.27.

[2148] LCMS: Chemical Formula: C₃₂H₄₁N₃O₈P₂Si; Calcd Molecular Weight: 685.72; Observed Molecular Weight: 684.68 [M−H]; 686.58 [M+H].

### Preparation of 3′-L-DPSE-5′-PO(OEt)₂-Vinylphosphonate-dT amidite (3′-L-DPSE-WV—NU-017)

[chemical structure]

[2149] Nucleoside 5′-PO(OEt)₂-Vinylphosphonate-dT, WV-NU-017 (8.0 g) was converted to 3′-L-DPSE-5′-PO(OEt)₂-Vinylphosphonate-dT amidite (3′-L-DPSE-WV-NU-017) by general procedure and obtained 13.5 g (88%) as white crystalline solid.

[2150] ³¹P NMR (162 MHz, CDCl₃) δ 152.44, 17.41.

[2151] ¹H NMR (400 MHz, Chloroform-d) δ 9.56 (s, 1H), 7.61-7.46 (m, 5H), 7.40-7.26 (m, 7H), 7.00 (d, J=1.4 Hz, 1H), 6.81 (ddd, J=21.9, 17.1, 4.3 Hz, 1H), 6.27 (dd, J=7.6, 6.2 Hz, 1H), 5.96 (ddd, J=19.1, 17.1, 1.8 Hz, 1H), 4.79 (dt, J=8.8, 5.7 Hz, 1H), 4.46 (dp, J=10.3, 3.4 Hz, 1H), 4.24 (tt, J=5.6, 2.8 Hz, 1H), 4.20-4.02 (m, 5H), 3.63-3.37 (m, 2H), 3.18 (tdd, J=10.8, 8.8, 4.3 Hz, 1H), 2.18 (ddd, J=13.9, 6.2, 3.2 Hz, 1H), 1.95 (d, J=1.2 Hz, 3H), 1.93-1.54 (m, 5H), 1.47 (dd, J=14.8, 5.9 Hz, 2H), 1.39-1.16 (m, 8H), 0.69 (s, 3H).

[2152] ¹³C NMR (101 MHz, CDCl₃) δ 171.09, 163.91, 163.77, 163.75, 150.32, 150.15, 147.57, 147.51, 136.66, 136.62, 136.09, 135.81, 135.08, 134.84, 134.59, 134.57, 134.49, 134.40, 134.32, 129.48, 129.42, 129.37, 127.98, 127.93, 127.90, 127.81, 119.77, 117.89, 111.89, 111.49, 85.86, 84.88, 84.80, 84.78, 84.59, 84.56, 79.24, 79.15, 78.91, 78.81, 77.45, 77.33, 77.13, 76.81, 74.94, 74.93, 74.85, 74.83, 68.02, 67.99, 62.08, 62.02, 61.96, 61.91, 61.87, 60.36, 47.15, 47.03, 46.80, 46.67, 45.92, 38.15, 38.11, 27.18, 27.14, 25.85, 25.81, 24.16, 21.03, 17.58, 17.54, 16.52, 16.46, 16.44, 16.40, 16.38, 14.20, 12.63, 12.42.

[2153] LCMS: Chemical Formula: C₃₄H₄₅N₃O₈P2Si; Calcd Molecular Weight: 713.78; Observed Molecular Weight: 712.27 [M−H); 714.26 [M+H].

### Preparation of 3′-L-DPSE-5′-PO(OEt)₂-Triazolylphosphonate-dT amidite (3′-L-DPSE-WV—NU-040)

[chemical structure]

[2154] Nucleoside, 5′-PO(OEt)₂-Triazolylphosphonate-dT, WV-NU-040 (8.5 g) was converted to 3′-L-DPSE-5′-PO(OEt)₂-Triazolylphosphonate-dT amidite (3′-L-DPSE-WV-NU-040) by general procedure and obtained 10.5 g (69%) as a white solid.

[2155] ³¹P NMR (162 MHz, Chloroform-d) δ 151.88, 6.69.

[2156] ¹H NMR (400 MHz, Chloroform-d) δ 8.08 (d, J=1.8 Hz, 1H), 7.61-7.48 (m, 4H), 7.33 (dpt, J=6.5, 4.2, 2.1 Hz, 6H), 6.70 (d, J=1.5 Hz, 1H), 5.87 (dd, J=7.3, 6.2 Hz, 1H), 4.89-4.79 (m, 1H), 4.64 (ddd, J=14.7, 7.8, 4.3 Hz, 2H), 4.49 (dd, J=14.5, 6.4 Hz, 1H), 4.33-4.20 (m, 3H), 4.20-4.08 (m, 1H), 3.95 (td, J=5.9, 3.4 Hz, 1H), 3.66-3.42 (m, 2H), 3.20 (tddd, J=10.9, 8.9, 4.5, 2.1 Hz, 1H), 2.22-1.98 (m, 3H), 1.94 (q, J=1.2 Hz, 3H), 1.83-1.61 (m, 2H), 1.55-1.42 (m, 2H), 1.42-1.21 (m, 8H), 0.69 (d, J=1.6 Hz, 3H).

[2157] ¹³C NMR (101 MHz, CDCl₃) δ 171.12, 163.64, 149.91, 138.68, 136.65, 136.58, 136.30, 135.88, 134.60, 134.48, 134.45, 134.36, 132.19, 131.86, 129.45, 129.40, 127.95, 127.93, 111.58, 86.98, 82.80, 79.41, 79.32, 77.39, 77.07, 76.75, 71.86, 71.77, 68.07, 68.04, 63.08, 63.05, 63.02, 62.99, 60.38, 50.51, 47.04, 46.68, 37.85, 37.81, 27.22, 25.85, 25.81, 21.04, 17.60, 17.56, 16.31, 16.25, 14.20, 12.43, −3.23, −3.81.

[2158] LCMS: Chemical Formula: C₃₅H₄₆N₆O₈P₂Si; Calcd Molecular Weight: 768.81; Observed Molecular Weight: 767.16 [M−H; 769.05 [M+H].

### Preparation of 3′-L-DPSE-5′-(R)-Me-PO(OEt)₂Phosphonate-dT amidite (3′-L-DPSE-WV—NU-037)

[chemical structure]

[2159] Nucleoside, 5′-(R)-Me-PO(OEt)₂ Phosphonate-dT, WV-NU-037 (8.0 g) was converted to 3′-L-DPSE-5′-(R)-Me-PO(OEt)₂ Phosphonate-dT amidite (3′-L-DPSE-WV-NU-037) by general procedure and obtained 12.5 g (86%) as a white solid.

[2160] ³¹P NMR (162 MHz, Chloroform-d) δ 148.87, 30.96.

[2161] ¹H NMR (400 MHz, Chloroform-d) δ 7.60-7.54 (m, 2H), 7.54-7.48 (m, 2H), 7.41-7.26 (m, 6H), 6.99 (t, J=1.3 Hz, 1H), 6.09 (dd, J=8.1, 5.9 Hz, 1H), 4.77 (dt, J=8.8, 5.7 Hz, 1H), 4.47 (tt, J=7.3, 3.0 Hz, 1H), 4.21-4.02 (m, 4H), 3.64-3.54 (m, 2H), 3.46 (ddd, J=12.7, 10.3, 5.9 Hz, 1H), 3.17 (qd, J=11.0, 4.2 Hz, 1H), 2.20-1.99 (m, 3H), 1.99-1.85 (m, 5H), 1.79-1.68 (m, 1H), 1.68-1.41 (m, 5H), 1.38-1.27 (m, 7H), 1.27-1.21 (m, 1H), 1.12 (d, J=6.6 Hz, 3H), 0.69 (d, J=1.0 Hz, 3H).

[2162] ¹³C NMR (101 MHz, CDCl₃) δ 163.87, 150.22, 136.74, 135.88, 135.18, 134.63, 129.41, 129.38, 129.16, 128.18, 128.09, 127.94, 127.92, 111.19, 88.94, 88.91, 88.75, 88.72, 83.78, 79.60, 79.50, 77.45, 77.13, 76.81, 72.39, 72.35, 68.28, 68.25, 61.63, 61.59, 61.57, 61.52, 46.88, 46.52, 39.05, 31.35, 29.61, 28.20, 27.33, 25.84, 25.81, 17.79, 16.58, 16.53, 16.51, 16.47, 16.45, 12.67.

[2163] LCMS: Chemical Formula: C₃₅H₄₉N₃O₈P₂Si; Calcd Molecular Weight: 729.82; Observed Molecular Weight: 728.40 [M−H; 730.39 [M+H].

### Preparation of 3′-L-DPSE-5′-(S)-Me-PO(OEt)₂Phosphonate-dT amidite (3′-L-DPSE-WV—NU-037A)

[chemical structure]

[2164] Nucleoside, 5′-(S)-Me-PO(OEt)₂ Phosphonate-dT, WV-NU-037A (10.0 g) was converted to 3′-L-DPSE-5′-(S)-Me-PO(OEt)₂ Phosphonate-dT amidite (3′-L-DPSE-WV-NU-037A) by general procedure and obtained 14.0 g (72%) as a white solid.

[2165] ³¹P NMR (162 MHz, CDCl₃) δ 148.87, 30.96.

[2166] ¹H NMR (400 MHz, Chloroform-d) δ 7.60-7.54 (m, 2H), 7.54-7.48 (m, 2H), 7.41-7.26 (m, 6H), 6.99 (t, J=1.3 Hz, 1H), 6.09 (dd, J=8.1, 5.9 Hz, 1H), 4.77 (dt, J=8.8, 5.7 Hz, 1H), 4.47 (tt, J=7.3, 3.0 Hz, 1H), 4.21-4.02 (m, 4H), 3.64-3.54 (m, 2H), 3.46 (ddd, J=12.7, 10.3, 5.9 Hz, 1H), 3.17 (qd, J=11.0, 4.2 Hz, 1H), 2.20-1.99 (m, 3H), 1.99-1.85 (m, 5H), 1.79-1.68 (m, 1H), 1.68-1.41 (m, 5H), 1.38-1.27 (m, 7H), 1.27-1.21 (m, 1H), 1.12 (d, J=6.6 Hz, 3H), 0.69 (d, J=1.0 Hz, 3H).

[2167] ¹³C NMR (101 MHz, CDCl₃) δ 163.87, 150.28, 136.68, 135.93, 135.27, 135.23, 134.59, 134.44, 134.35, 129.43, 129.39, 127.95, 127.93, 111.45, 89.22, 89.19, 89.06, 89.03, 84.07, 79.21, 79.11, 77.42, 77.11, 76.79, 73.45, 73.37, 68.17, 68.14, 61.71, 61.65, 61.41, 61.34, 47.02, 46.66, 38.86, 38.83, 32.45, 32.41, 29.16, 27.76, 27.24, 25.83, 25.80, 17.73, 17.70, 17.12, 17.10, 16.51, 16.50, 16.45, 16.43, 16.42, 12.45.

[2168] LCMS: Chemical Formula: C₃₅H₄₉N₃O₈P₂Si; Calcd Molecular Weight: 729.82; Observed Molecular Weight: 728.40 [M−H; 730.39 [M+H].

### Preparation of L-DPSE-5′-ODMTr-5′-(R)-Me-2′F-dU amidite

[chemical structure]

[2169] Nucleoside, 5′-ODMTr-5′-(R)-Me-2′F-dU (10 g) was converted to L-DPSE-5′-ODMTr-5′-(R)-Me-2′F-dU amidite by general procedure and obtained 14.0 g (87%) as a white crystalline solid.

[2170] ³¹P NMR (243 MHz, CDCl₃) δ 151.48

[2171] ¹H NMR (600 MHz, Chloroform-d) δ 7.57-7.45 (m, 6H), 7.41-7.24 (m, 12H), 7.23-7.18 (m, 1H), 7.16 (d, J=8.1 Hz, 1H), 6.86-6.80 (m, 4H), 5.79 (dd, J=17.4, 3.2 Hz, 1H), 5.19 (dd, J=8.0, 2.2 Hz, 1H), 4.97-4.86 (m, 2H), 4.13 (q, J=7.1 Hz, 1H), 3.78 (d, J=6.0 Hz, 6H), 3.74-3.70 (m, 1H), 3.61-3.53 (m, 2H), 3.49 (ddt, J=12.7, 10.4, 6.9 Hz, 1H), 3.10 (tdd, J=10.9, 8.9, 4.4 Hz, 1H), 2.56 (qd, J=7.2, 1.2 Hz, 1H), 2.05 (s, 1H), 1.93-1.84 (m, 1H), 1.76-1.69 (m, 1H), 1.66 (dd, J=14.6, 8.2 Hz, 1H), 1.51 (dd, J=14.6, 6.5 Hz, 1H), 1.43 (ddt, J=12.3, 7.6, 4.5 Hz, 1H), 1.34-1.24 (m, 2H), 1.04 (t, J=7.2 Hz, 2H), 0.88 (d, J=6.7 Hz, 3H), 0.66 (s, 3H.

[2172] ¹³C NMR (151 MHz, CDCl₃) δ 171.20, 163.35, 163.32, 158.70, 158.60, 149.83, 149.82, 146.25, 141.18, 136.56, 136.31, 136.15, 135.99, 134.62, 134.40, 130.60, 130.40, 129.45, 129.43, 128.19, 127.95, 127.94, 127.86, 126.90, 113.21, 113.14, 102.48, 92.33, 91.05, 88.59, 88.37, 87.15, 85.36, 85.35, 79.63, 79.57, 77.34, 77.13, 76.91, 68.97, 68.61, 68.56, 68.51, 68.46, 68.01, 68.00, 60.44, 55.28, 55.25, 53.50, 46.74, 46.50, 45.96, 45.95, 27.27, 25.94, 25.92, 21.09, 17.97, 17.94, 17.14, 14.25, 11.33, 11.31, −3.34

[2173] ¹⁹F NMR (565 MHz, CDCl₃) δ−199.82.

[2174] LCMS: Chemical Formula: C₅₀H₅₃FN₃O₈P₂Si; Calcd Molecular Weight: 902.04; Observed Molecular Weight: 901.03 [M−H]; 903.25 [M+H].

### Preparation of L-DPSE-5′-ODMTr-5′-(S)-Me-2′F-dU amidite

[chemical structure]

[2175] Nucleoside, 5′-ODMTr-5′-(S)-Me-2′F-dU (8 g) was converted to L-DPSE-5′-ODMTr-5′-(R)-Me-2′F-dU amidite by general procedure and obtained 10.0 g (78%) as a white crystalline solid.

[2176] ³¹P NMR (243 MHz, CDCl₃) δ 150.98.

[2177] ¹H NMR (600 MHz, Chloroform-d) δ 7.55 (d, J=8.1 Hz, 1H), 7.42 (ddd, J=13.2, 7.7, 1.7 Hz, 4H), 7.37-7.32 (m, 2H), 7.28-7.19 (m, 10H), 7.16 (t, J=7.5 Hz, 2H), 7.13-7.07 (m, 1H), 6.75-6.69 (m, 4H), 5.67 (dd, J=17.6, 2.1 Hz, 1H), 5.55 (d, J=8.1 Hz, 1H), 4.74-4.67 (m, 1H), 4.41 (dtd, J=16.2, 7.6, 4.9 Hz, 1H), 4.03 (q, J=7.1 Hz, 1H), 3.79 (dd, J=7.3, 3.7 Hz, 1H), 3.67 (d, J=5.1 Hz, 6H), 3.59 (qd, J=6.3, 3.6 Hz, 1H), 3.39 (ddt, J=14.5, 10.7, 7.5 Hz, 1H), 3.25 (ddd, J=12.3, 8.1, 4.9 Hz, 1H), 2.93 (tdd, J=10.8, 8.7, 4.5 Hz, 1H), 1.95 (s, 2H), 1.70 (dtt, J=12.3, 8.0, 3.7 Hz, 1H), 1.60-1.45 (m, 2H), 1.33 (dd, J=14.5, 6.5 Hz, 1H), 1.26 (dtd, J=12.5, 6.5, 3.2 Hz, 1H), 1.17 (t, J=7.1 Hz, 2H), 1.12 (dt, J=11.9, 8.0 Hz, 1H), 0.78 (d, J=6.3 Hz, 3H), 0.54 (s, 3H).

[2178] LCMS: Chemical Formula: C₅₀H₅₃FN₃O₈P₂Si; Calcd Molecular Weight: 902.04; Observed Molecular Weight: 901.05 [M−H]; 903.15 [M+H].

### Preparation of 3′-L-DPSE-5′-PO(OEt)₂-Abasic Vinylphosphonate (3′-L-DPSE-WV-RA-009)

[chemical structure]

[2179] Diethyl((E)-2-((2R,3S)-3-hydroxytetrahydrofuran-2-yl)vinyl)phosphonate, (5′-PO(OEt)₂-Abasic Vinyl phosphonate, WV-RA-009 (5.0 g) was converted to 3′-L-DPSE-5′-PO(OEt)₂-Abasic Vinyl phosphonate (3′-L-DPSE-WV-RA-009) by general procedure and obtained 8.6 g (72.8%) as colorless semisolid.

[2180] ³¹P NMR (243 MHz, CDCl₃) δ 152.94, 18.49.

[2181] ¹H NMR (600 MHz, Chloroform-d) δ 7.47 (ddt, J=14.2, 6.6, 1.7 Hz, 8H), 7.33-7.24 (m, 11H), 6.65 (ddd, J=22.2, 17.0, 3.7 Hz, 2H), 5.85 (ddd, J=20.9, 17.0, 1.9 Hz, 2H), 4.73 (dt, J=8.5, 5.8 Hz, 2H), 4.26 (ddt, J=8.3, 5.4, 2.7 Hz, 2H), 4.16 (tt, J=3.6, 2.2 Hz, 2H), 4.08-3.94 (m, 8H), 3.91-3.81 (m, 4H), 3.47 (ddt, J=14.9, 10.6, 7.6 Hz, 2H), 3.32 (ddt, J=9.8, 7.6, 5.5 Hz, 2H), 3.14-3.05 (m, 2H), 1.82-1.78 (m, 1H), 1.75 (ddd, J=9.3, 7.4, 4.4 Hz, 5H), 1.67-1.58 (m, 2H), 1.55 (dd, J=14.7, 8.6 Hz, 2H), 1.41-1.34 (m, 3H), 1.34-1.30 (m, 1H), 1.28-1.19 (m, 11H), 1.19-1.12 (m, 2H), 0.60 (s, 5H).

[2182] LCMS: Chemical Formula: C₂₉H₄₁NO₆P₂Si; Calcd Molecular Weight: 589.68; Observed Molecular Weight: 588.63 [M−H]; 590.70 [M+H].

[chemical structure]

[2183] Diethyl((R)-2-((2R,3S)-3-hydroxytetrahydrofuran-2-yl)propyl)phosphonate, (5′-(R)-Me-PO(OEt)₂-Abasic phosphonate, WV-RA-010 (5.0 g) was converted to 3′-L-DPSE-5′-(R)-Me-PO(OEt)₂-Abasic phosphonate (3′-L-DPSE-WV-RA-010) by general procedure and obtained 7.0 g (62%) as colorless semisolid.

[2184] ³¹P NMR (243 MHz, CDCl₃) δ 150.48, 31.86.

[2185] ¹H NMR (600 MHz, Chloroform-d) δ 7.47 (ddt, J=14.6, 6.1, 1.7 Hz, 5H), 7.34-7.25 (m, 7H), 4.73 (ddd, J=8.1, 6.5, 5.3 Hz, 1H), 4.28-4.21 (m, 1H), 4.08-3.94 (m, 4H), 3.75 (td, J=8.1, 2.7 Hz, 1H), 3.71-3.62 (m, 1H), 3.52-3.42 (m, 1H), 3.41 (dd, J=5.9, 3.3 Hz, 1H), 3.35-3.26 (m, 1H), 3.08 (dddd, J=11.7, 10.6, 8.8, 4.3 Hz, 1H), 2.01-1.89 (m, 2H), 1.89-1.82 (m, 1H), 1.82-1.73 (m, 1H), 1.73-1.63 (m, 2H), 1.63-1.59 (m, 2H), 1.59-1.53 (m, 1H), 1.46-1.28 (m, 4H), 1.23 (td, J=7.1, 1.1 Hz, 6H), 1.22-1.11 (m, 2H), 0.97 (d, J=6.8 Hz, 3H), 0.60 (s, 3H).

[2186] LCMS: Chemical Formula: C₃₀H₄₅NO₆P₂Si; Calcd Molecular Weight: 605.72; Observed Molecular Weight:604.42 [M−H]; 606.53[M+H].

### Example 37: Synthesis of D-DPSE Amidite

### General Procedure for Synthesis of D-DPSE Amidite

### Procedure for the Preparation of D-DPSE-Cl

[chemical structure]

[2187] D-DPSE amino alcohol, ((R)-2-(methyldiphenylsilyl)-1-((R)-pyrrolidin-2-yl)ethanol (8.82 g, 28.5 mmol) was dried three times by azeotropic evaporation with anhydrous toluene (3×60 ml) at 35° C. and further dried in high vacuum for overnight. A solution of dried D-DPSE amino alcohol and 4-methylmorpholine (5.82 g, 6.33 mL, 57.5 mmole) which was dissolved in anhydrous toluene (50 ml) was added to a solution of PCl₃ (4.0 g, 2.5 mL, 29.0 mmole) in anhydrous toluene (25 ml) placed in 250 mL three neck round bottomed flask which was cooled at −5° C. under Argon. The reaction mixture was stirred at 0° C. for another 40 min. After that filtered the precipitated white solid by vacuum under argon using medium Frit, Airfree, Schlenk tube. The solvent was removed by rota-evaporator under argon at bath temperature (25° C.) and the crude oily mixture obtained was dried under vacuum overnight (˜15 h) and used for next step.

[2188] ³¹P NMR (162 MHz, CDCl₃) δ 178.72,

### Procedure for Synthesis of D-DPSE Amidite.

[2189] Nucleosides (1.0 eq.) in an appropriate size three necked flask was azeotroped three times with anhydrous toluene (15 mL/g) and was dried for 24 h on high vacuum. To the flask was added anhydrous THF (0.3 M) under argon and solution was cooled to −10° C. To the reaction mixture was added triethylamine (5.0 eq.) followed by addition of D-DPSE-Cl (0.9 M solution in anhydrous THF, 1.7 eq.) over the period of 5-10 min. The reaction mixture was warmed to room temperature and reaction progress was monitored by LCMS. After disappearance of starting material, the reaction mixture was cooled in an ice bath and was quenched by addition of water (1.0 eq) stirred for 10 min followed by added anhydrous Mg₂SO₄ (1.0 eq) and stirred for 10 min. The reaction mixture was filtered through airfree fritted glass tube, washed with anhydrous THF (50 mL) and the solvent was removed under reduced pressure. The solid obtained was dried under high vacuum for overnight before purification. Then dried crude product was purified by silica column (which was pre-deactivated with 3 column volume of ethyl acetate with 5% TEA) using ethyl acetate/hexane mixture with 5% TEA as a solvent afforded 3′-D-DPSE amidites as a white solid.

### Preparation of 3′-D-DPSE-5′-ODMTr-5′-(R)-Me-dT amidite

[chemical structure]

[2190] Nucleoside 5′-ODMTr-5′-(R)-Me-dT (10.0 g) was converted to 3′-D-DPSE-5′-ODMTr-5′-(R)-Me-dT amidite by general procedure (12.8 g, 90% yield) as an off white solid.

[2191] ³¹P NMR (243 MHz, CDCl₃) δ=156.36

[2192] ¹H NMR (600 MHz, CDCl₃) δ 8.94-8.75 (m, 1H), 7.52-7.38 (m, 4H), 7.31 (dd, J=13.6, 8.6 Hz, 4H), 7.27-7.21 (m, 4H), 7.21-7.15 (m, 2H), 7.14-7.07 (m, 1H), 6.86 (d, J=1.8 Hz, 1H), 6.74 (dd, J=8.9, 3.8 Hz, 4H), 6.07 (t, J=7.2 Hz, 1H), 4.81 (ddt, J=11.8, 9.0, 4.5 Hz, 2H), 3.69 (d, J=3.0 Hz, 7H), 3.48 (ddd, J=15.1, 7.5, 2.7 Hz, 1H), 3.36 (dq, J=10.7, 3.8 Hz, 2H), 3.14 (dd, J=9.6, 4.0 Hz, 1H), 1.96 (d, J=1.2 Hz, 2H), 1.83-1.68 (m, 3H), 1.68-1.51 (m, 2H), 1.44 (dd, J=14.7, 6.0 Hz, 1H), 1.36 (s, 4H), 1.27-1.09 (m, 3H), 0.83 (d, J=6.5 Hz, 3H), 0.63 (s, 3H).

[2193] LCMS: C₅₁H₅₆N₃O₈PSi (M−H): 897.16

### Preparation of 3′-D-DPSE-5′-ODMTr-5′-(S)-Me-dT amidite

[chemical structure]

[2194] Nucleoside 5′-ODMTr-5′-(S)-Me-dT (8.0 g) was converted to 3′-D-DPSE-5′-ODMTr-5′-(S)-Me-dT amidite by general procedure (10 g, 89% yield) as an off white solid.

[2195] ³¹P NMR (243 MHz, CDCl₃) δ=156.36

[2196] ¹H NMR (600 MHz, CDCl₃) δ 8.81 (s, 1H), 7.60 (d, J=2.4 Hz, 1H), 7.49-7.41 (m, 4H), 7.41-7.36 (m, 2H), 7.33-7.28 (m, 2H), 7.29-7.21 (m, 7H), 7.21-7.15 (m, 2H), 7.12 (t, J=7.3 Hz, 1H), 6.73 (dd, J=8.9, 6.5 Hz, 4H), 6.11-6.03 (m, 1H), 4.68 (dt, J=8.7, 5.8 Hz, 1H), 4.52-4.44 (m, 1H), 3.70 (d, J=3.8 Hz, 6H), 3.65 (t, J=3.4 Hz, 1H), 3.49 (qd, J=6.5, 3.0 Hz, 1H), 3.34 (ddt, J=15.1, 10.1, 7.7 Hz, 1H), 3.30-3.22 (m, 1H), 3.08-2.98 (m, 1H), 1.89 (dt, J=14.1, 7.2 Hz, 1H), 1.81 (ddd, J=13.8, 6.2, 3.7 Hz, 1H), 1.76-1.68 (m, 4H), 1.63-1.48 (m, 2H), 1.38 (dd, J=14.7, 6.0 Hz, 1H), 1.31 (dtd, J=12.1, 6.4, 2.6 Hz, 1H), 1.21-1.10 (m, 3H), 0.83 (d, J=6.3 Hz, 3H), 0.58 (d, J=1.5 Hz, 3H).

[2197] LCMS: C₅₁H₅₆N₃O₈PSi (M−H): 897.16

### Preparation of 3′-D-DPSE-5′-ODMTr-5′-(R)-Me-2′F-dU amidite

[chemical structure]

[2198] Nucleoside 5′-ODMTr-5′-(R)-Me-2′F-dU (5.0 g) was converted to 3′-D-DPSE-5′-ODMTr-5′-(R)-Me-2′F-dU amidite by general procedure (6.0 g, 75% yield) as an off white solid.

[2199] ³¹P NMR (243 MHz, CDCl₃) δ=156.86

[2200] ¹⁹F NMR (565 MHz, CDCl₃) δ+−198.88-−199.16 (m).

[2201] ¹H NMR (600 MHz, CDCl₃) δ 9.23 (d, J=8.6 Hz, 1H), 7.51-7.43 (m, 4H), 7.43-7.36 (m, 2H), 7.35-7.29 (m, 2H), 7.30-7.20 (m, 7H), 7.17 (t, J=7.6 Hz, 2H), 7.11 (t, J=7.4 Hz, 1H), 5.81 (dd, J=17.6, 2.2 Hz, 1H), 5.04-4.88 (m, 2H), 4.82-4.70 (m, 1H), 3.80 (d, J=7.6 Hz, 1H), 3.69 (d, J=2.8 Hz, 6H), 3.54 (ddd, J=13.7, 9.3, 6.9 Hz, 2H), 3.36-3.27 (m, 1H), 3.21-3.11 (m, 1H), 1.80 (dp, J=12.5, 4.4 Hz, 1H), 1.62 (dd, J=14.7, 7.8 Hz, 2H), 1.41 (dd, J=14.7, 6.7 Hz, 1H), 1.30 (qd, J=7.5, 2.6 Hz, 1H), 1.25-1.14 (m, 3H), 0.87 (d, J=6.7 Hz, 3H), 0.59 (s, 3H).

[2202] LCMS: C₅₀H₅₃FN₃O₈PSi (M−H): 901.14

### Preparation of 3′-D-DPSE-5′-ODMTr-5′-(S)-Me-2′F-dU amidite

[chemical structure]

[2203] Nucleoside 5′-ODMTr-5′-(S)-Me-2′F-dU (4.95 g) was converted to 3′-D-DPSE-5′-ODMTr-5′-(S)-Me-2′F-dU amidite by general procedure (6.95 g, 87% yield) as an off white solid.

[2204] ³¹P NMR (243 MHz, CDCl₃) δ=156.92

[2205] ¹⁹F NMR (565 MHz, CDCl₃) δ=−198.87-−199.13 (m).

[2206] ¹H NMR (600 MHz, CDCl₃) δ 9.65-9.28 (m, 1H), 7.90 (d, J=8.2 Hz, 1H), 7.44 (ddd, J=12.3, 7.7, 1.9 Hz, 4H), 7.36-7.30 (m, 2H), 7.30-7.19 (m, 7H), 7.17 (t, J=7.7 Hz, 2H), 7.12 (t, J=7.3 Hz, 1H), 6.72 (t, J=8.4 Hz, 4H), 5.87 (d, J=17.1 Hz, 1H), 5.53 (d, J=8.2 Hz, 1H), 4.87 (q, J=6.8 Hz, 1H), 4.69-4.53 (m, 1H), 4.51-4.40 (m, 1H), 3.86 (dd, J=8.6, 2.6 Hz, 1H), 3.69 (d, J=4.4 Hz, 6H), 3.52 (qd, J=6.4, 2.7 Hz, 1H), 3.36 (ddt, J=15.2, 10.2, 7.7 Hz, 1H), 3.23-3.14 (m, 1H), 3.05 (td, J=10.0, 3.8 Hz, 1H), 1.71 (dh, J=12.5, 3.9 Hz, 1H), 1.65-1.57 (m, 1H), 1.52 (dq, J=12.6, 8.2 Hz, 1H), 1.35 (dd, J=14.6, 7.5 Hz, 1H), 1.24-1.14 (m, 3H), 1.08 (q, J=10.2 Hz, 1H), 0.88 (d, J=6.5 Hz, 3H), 0.56 (s, 3H).

[2207] LCMS: C₅₀H₅₃FN₃O₈PSi (M−H): 901.14

### Preparation of 3′-D-DPSE-5′-PO(OEt)₂ Vinylphosphonate-dT amidite

[chemical structure]

[2208] Nucleoside 5′-PO(OEt)₂ VP-dT (10 g) was converted to 3′-D-DPSE-5′-PO(OEt)₂ Vinyl phosphonate-dT amidite by general procedure (14.1 g, 73% yield) as an off white solid.

[2209] LCMS: C₃₄H₄₅N₃O₈P₂Si (M−H⁻). 712.45

[2210] ¹H NMR (600 MHz, CDCl₃) δ 9.03 (s, 1H), 7.55-7.35 (m, 4H), 7.32-7.21 (m, 6H), 6.91 (s, 1H), 6.82-6.70 (m, 1H), 6.11 (t, J=6.7 Hz, 1H), 5.96-5.83 (m, 1H), 4.80-4.69 (m, 1H), 4.35-4.20 (m, 2H), 4.09-3.95 (m, 4H), 3.51-3.41 (m, 1H), 3.41-3.31 (m, 1H), 3.22-3.06 (m, 1H), 1.96 (d, J=6.7 Hz, 1H), 1.92-1.83 (m, 3H), 1.83-1.71 (m, 3H), 1.70-1.56 (m, 1H), 1.53 (dd, J=14.3, 8.7 Hz, 1H), 1.46-1.31 (m, 2H), 1.31-1.11 (m, 8H), 0.59 (d, J=6.9 Hz, 3H).

[2211] ³¹P NMR (243 MHz, CDCl₃) δ=156.66, 17.09

### Preparation of 3′-D-DPSE-5′-(R)-Me-PO(OEt)₂-dT amidite

[chemical structure]

[2212] Nucleoside 5′-(R)-Me-PO(OEt)₂-dT (4.0 g) was converted to 3′-D-DPSE-5′-(R)-Me-PO(OEt)₂-dT amidite by general procedure (5.0 g, 69% yield) as an off white solid.

[2213] ³¹P NMR (162 MHz, CDCl₃) δ 156.32, 30.68.

[2214] ¹H NMR (400 MHz, Chloroform-d) δ 8.87 (d, J=56.9 Hz, 1H), 7.54 (ddt, J=16.6, 5.9, 2.4 Hz, 5H), 7.35 (t, J=3.4 Hz, 7H), 7.02 (d, J=1.4 Hz, 1H), 6.05 (t, J=6.8 Hz, 1H), 4.83 (dt, J=9.0, 5.7 Hz, 1H), 4.31 (tt, J=8.9, 4.6 Hz, 1H), 4.11 (tdt, J=10.2, 7.1, 5.1 Hz, 5H), 3.66 (t, J=5.2 Hz, 1H), 3.55 (ddd, J=15.2, 10.2, 7.5 Hz, 1H), 3.45 (ddt, J=13.4, 10.5, 5.6 Hz, 1H), 3.22 (tdd, J=11.1, 8.8, 4.2 Hz, 1H), 2.24 (dddt, J=12.8, 9.7, 6.2, 3.6 Hz, 1H), 2.06 (d, J=1.7 Hz, 1H), 2.03-1.57 (m, 12H), 1.55-1.40 (m, 2H), 1.38-1.20 (m, 9H), 1.15 (d, J=6.6 Hz, 3H), 0.68 (d, J=1.1 Hz, 3H).

[2215] ¹³C NMR (101 MHz, CDCl₃) δ 163.50, 150.01, 136.71, 135.96, 135.17, 134.56, 134.37, 129.49, 129.38, 127.98, 127.91, 111.31, 88.34, 88.28, 88.16, 88.09, 83.29, 78.20, 78.12, 77.38, 77.06, 76.74, 72.22, 72.06, 67.71, 67.69, 61.64, 61.58, 61.56, 61.49, 60.38, 47.24, 46.90, 38.95, 30.84, 30.80, 30.16, 28.75, 27.10, 25.92, 25.89, 21.04, 17.27, 17.24, 16.51, 16.50, 16.46, 16.44, 15.99, 15.96, 14.20, 12.69,

[2216] LCMS: C₃₅H₄₉N₃O₈P₂Si (M−H): 728.21

### Preparation of 3′-D-DPSE-5′-(S)-Me-PO(OEt)₂-dT amidite

[chemical structure]

[2217] Nucleoside 5′-(S)-Me-PO(OEt)₂-dT (3.9 g) was converted to 3′-D-DPSE-5′-(S)-Me-PO(OEt)₂-dT amidite by general procedure (4.1 g, 56% yield) as an off white solid.

[2218] ³¹P NMR (243 MHz, CDCl₃) δ=155.76, 31.56

[2219] ¹H NMR (600 MHz, CDCl₃) δ 9.24 (s, 1H), 7.52-7.37 (m, 4H), 7.32-7.21 (m, 6H), 7.02 (s, 1H), 6.05 (t, J=7.1 Hz, 1H), 4.74 (dt, J=10.1, 5.7 Hz, 1H), 4.28-4.20 (m, 1H), 4.10-3.95 (m, 4H), 3.52-3.40 (m, 2H), 3.40-3.31 (m, 1H), 3.19-3.07 (m, 1H), 2.14-2.04 (m, 1H), 2.03-1.95 (m, 1H), 1.91 (s, 3H), 1.83-1.67 (m, 3H), 1.68-1.59 (m, 1H), 1.53 (dd, J=14.7, 9.0 Hz, 1H), 1.47-1.32 (m, 3H), 1.30-1.14 (m, 8H), 1.07 (d, J=6.7 Hz, 3H), 0.60 (s, 3H).

[2220] LCMS: C₃₅H₄₉N₃O₈P₂Si (M−H): 728.82

### Example 38: Synthesis of WV-NU-231

[chemical structure]

[chemical structure]

[chemical structure]

### 1. Preparation of Compound 2B

[chemical structure]

[2221] For two batches. To a solution of compound 1B (125 g, 484.07 mmol) in DMF (1000 mL) was added TBSCl (291.84 g, 1.94 mol.) and imidazole (164.78 g, 2.42 mol). The mixture was stirred at 20° C. for 12 hr. LCMS showed the desired mass was detected. The reaction mixture was diluted with H₂O 2000 mL and extracted with ethyl acetate 3000 mL (1000 mL*3). The combined organic layers were washed with brine 1000 mL, dried over Na₂SO₄, filtered and concentrated under reduced pressure to give a residue. The residue was purified by column chromatography (SiO₂, Petroleum ether/Ethyl acetate=1/0 to 0/1). Compound 2B (470 g, 99.74% yield) was obtained as a colorless oil.

[2222] 1H NMR (400 MHz, DMSO-d₆) δ=11.38 (s, 1H), 7.79 (d, J=8.1 Hz, 1H), 5.80 (d, J=3.6 Hz, 1H), 5.55 (d, J=8.1 Hz, 1H), 4.22 (t, J=5.2 Hz, 1H), 3.92-3.81 (m, 3H), 3.73-3.63 (m, 1H), 3.37 (s, 3H), 0.91-0.85 (m, 18H), 0.08 (s, 12H)

[2223] LCMS (M−H+): 485.4

[2224] TLC (Ethyl acetate:Methanol=3:1), R_{f}=0.55

### 2. Preparation of Compound 3B

[chemical structure]

[2225] For three batches. To a stirred solution of compound 2B (166 g, 341.04 mmol) in THF (1412 mL) was added the mixture of TFA (353 mL) and H₂O (353 mL). The mixture was stirred at 0° C. for 3 hr. LCMS showed the desired mass was detected. The reaction mixtures of two batches were combined and neutralized with saturated aqueous NaHCO₃ and extracted with ethyl acetate 5L*3. The combined organic layers were washed with brine 2L*2, dried over anhydrous Na₂SO₄ and evaporated at reduced pressure. The residue was purified by column chromatography (SiO₂, Petroleum ether/Ethyl acetate1=1/0 to 0/1). Compound 3B (340 g, 89.22% yield) was obtained as a white solid.

[2226] 1H NMR (400 MHz, DMSO-d6) δ=11.36 (s, 1H), 7.96 (d, J=8.1 Hz, 1H), 5.84 (d, J=5.0 Hz, 1H), 5.66 (dd, J=1.8, 8.1 Hz, 1H), 5.39 (br s, 1H), 4.32 (t, J=4.5 Hz, 1H), 3.90-3.80 (m, 2H), 3.71-3.62 (m, 1H), 3.60-3.52 (m, 1H), 3.33 (s, 3H), 0.95-0.81 (m, 9H), 0.08 (s, 6H)

[2227] LCMS (M−H+): 371.2

[2228] TLC (Petroleum ether:Ethyl acetate=1:1), Rf=0.32

### 3. Preparation of Compound 1

[chemical structure]

[2229] For three batches. To a solution of Compound 3B (70 g, 187.93 mmol, 1 eq.) in the mixture of ACN (500 mL) and H₂O (500 mL) was added PhI(OAc)₂ (133.17 g, 413.44 mmol, 2.2 eq.) and TEMPO (5.91 g, 37.59 mmol, 0.2 eq.). The mixture was stirred at 20° C. for 2 hr. LCMS showed the desired mass was detected. The resulting mixture was concentrated then filtrated, and the solid was desired product. Compound 1 (150 g, crude) was obtained as a white solid.

[2230] LCMS (M−H+): 385.3

### 4. Preparation of Compound 2

[chemical structure]

[2231] For three batches. To a solution of compound 1 (40 g, 103.50 mmol) in DCM (400 mL) was added DIEA (26.75 g, 207.00 mmol) and 2,2-dimethylpropanoyl chloride (16.22 g, 134.55 mmol). The mixture was stirred at −10˜0° C. for 2 hr. TLC indicated compound 1 was consumed completely and one new spot formed. The crude product compound 2 (146 g, crude) in 400 mL DCM was used into the next step without further purification.

[2232] TLC (Petroleum ether:Ethyl acetate=1:1), Rf=0.69

### 5. Preparation of Compound 3

[chemical structure]

[2233] To a solution of Compound 2 (146 g, 310.25 mmol) in DCM 400 mL was added TEA (94.18 g, 930.75 mmol, 129.55 mL) then added N-methoxymethanamine;hydrochloride (90.79 g, 930.75 mmol). The mixture was stirred at 0° C. for 2 hr. TLC showed the desired mass was detected. The resulting mixture was washed with HCl (1M, 800 mL*2) and then aqueous NaHCO₃ (600 mL*2). The combined organic layers were dried over anhydrous Na₂SO₄, filtered and concentrated to get the product as a crude white solid. The residue was purified by column chromatography (SiO₂, Petroleum ether/Ethyl acetate=I/O to 0:1). Compound 3 (45 g, 33.77% yield) was obtained as a white solid.

[2234] TLC (Petroleum ether:Ethyl acetate=0:1), Rf=0.47

### 6. Preparation of Compound 4

[chemical structure]

[2235] For three batches. To a solution of compound 3 (24 g, 55.87 mmol) in THF (300 mL) was added MeMgBr (3 M, 37.25 mL). The mixture was stirred at 0° C. for 1.5 hr. indicated compound 3 was consumed completely and new spot formed. The resulting mixture was poured into sat. NH₄Cl aq. (500 mL) under stirring, extracted with EtOAc (800 mL*3). The combined organic layers were dried over anhydrous Na₂SO₄, filtered and concentrated to give a crude. The residue was purified by column chromatography (SiO₂, Petroleum ether/Ethyl acetate=1/0 to 0:1). Compound 4 (53 g, 82.23% yield) was obtained as a white solid.

[2236] 1H NMR (400 MHz, DMSO-d₆) δ=11.43 (s, 1H), 8.03 (d, J=8.1 Hz, 1H), 5.92 (d, J=5.9 Hz, 1H), 5.75 (d, J=8.1 Hz, 1H), 4.64-4.53 (m, 1H), 4.50 (d, J=3.5 Hz, 1H), 3.88-3.79 (m, 1H), 3.31 (s, 3H), 2.20 (s, 3H), 0.91 (s, 9H), 0.13 (d, J=3.1 Hz, 6H) TLC (Petroleum ether:Ethyl acetate=1:1), R_{f}=0.6

### 7. Preparation of Compound 5

[chemical structure]

[2237] For five batches. To a solution of NaH (4.85 g, 121.30 mmol, 60% purity) in THF (50 mL) was added 1-[diethoxyphosphorylmethyl(ethoxy)phosphoryl]oxyethane (34.96 g, 121.30 mmol) in THF (400 mL) at 0° C. The reaction mixture was warmed up to 20° C., and stirred for 1 hr. A solution of LiBr (10.53 g, 121.30 mmol, 3.04 mL) in THF (100 mL) was added and the resultant slurry was stirred, and then cooled to 0° C. To the above mixture was added a solution of compound 4 (10.6 g, 27.57 mmol) in THF (100 mL) at 0° C. The mixture was stirred at 0-20° C. for 12 hr. LCMS indicated compound 4 was consumed completely and one new spot formed. The resulting mixture was diluted with water (1000 mL), extracted with EtOAc (1000 mL*3). The combined organic layers were washed with sat.brine (500 mL*2), dried over anhydrous Na₂SO₄, filtered and concentrated to afford the crude. Compound 5 (71 g, crude) was obtained as a colorless gum.

[2238] LCMS (M−H⁺): 517.4

### 8. Preparation of Compound WV-NU-230

[chemical structure]

[2239] To a solution of compound 5 (71 g, 136.90 mmol) in THF (700 mL) was added N,N-diethylethanamine;trihydrofluoride (176.56 g, 1.10 mol, 178.53 mL). The mixture was stirred at 40° C. for 6 hr. LCMS showed compound 5 was consumed completely and one main peak with desired mass was detected. The reaction mixture was quenched by addition sat. NaHCO₃ aq. (500 mL) and NaHCO₃ solid to pH=7˜8 and stirred 20 min. The mixture was dried over Na₂SO₄, and concentrated under reduced pressure to give a residue. The residue was purified by column chromatography (SiO₂, Petroleum ether:Ethyl acetate=1/1 to 0/1 then Ethyl acetate: Methanol=I/O to 3/1). TLC (Ethyl acetate:Methanol=10:1, Rf=0.3). Compound WV-NU-230 (42.5 g, 76.77% yield) was obtained as a colorless gum.

[2240] ¹H NMR (400 MHz, DMSO-d₆) δ=11.44 (s, 1H), 7.65 (d, J=8.0 Hz, 1H), 5.77 (d, J=4.4 Hz, 1H), 5.70-5.59 (m, 2H), 5.48 (d, J=7.1 Hz, 1H), 4.19-4.11 (m, 2H), 3.99-3.88 (m, 5H), 3.37 (s, 3H), 2.06-2.03 (m, 3H), 1.22 (dt, J=4.2, 7.0 Hz, 6H)

[2241] LCMS (M−H⁺): 403.1, purity: 95.16%

[2242] TLC (Ethyl acetate:Methanol=10:1), Rf=0.3

### 9. Preparation of Compound WV-NU-231

[chemical structure]

[2243] For three batches. To a mixture of compound WV-NU-230 (13 g, 32.15 mmol) in MeOH (200 mL) was added Josiphos SL-J216-1 (1.04 g, 1.62 mmol), (1Z,5Z)-cycloocta-1,5-diene;rhodium(1+);tetrafluoroborate (522.21 mg, 1.29 mmol.) and zinc;trifluoromethanesulfonate (4.68 g, 12.86 mmol). And the system was stirred under H₂ (50 psi) for 20 hr at 20° C. LCMS showed the desired mass was detected. The reaction mixture was filtered and concentrated under reduced pressure to give a residue. The residue was purified by prep-HPLC column: Welch Xtimate C18 250*70 mm #10 um; mobile phase: [water (NH₄HCO₃)-ACN]; B %: 10%-30%, 20 min. Compound WV-NU-231 (28 g, 71.79% yield) was obtained as a white solid. 6.47 g for batch 1(99.68% purity), 21.6 g for batch 2(100% purity).

[2244] ¹H NMR (400 MHz, DMSO-d₆) δ=11.35 (s, 1H), 7.63 (d, J=8.1 Hz, 1H), 5.73-5.69 (m, 1H), 5.69-5.65 (m, 1H), 4.07-3.92 (m, 5H), 3.82 (t, J=5.6 Hz, 1H), 3.57 (t, J=5.9 Hz, 1H), 3.35-3.32 (m, 3H), 2.07 (s, 1H), 2.02-1.90 (m, 1H), 1.57 (ddd, J=9.8, 15.6, 17.4 Hz, 1H), 1.23 (t, J=7.0 Hz, 6H), 1.03 (d, J=6.6 Hz, 3H)

[2245] LCMS (M−H⁺): 405.2; purity: 99.68%

[2246] 1H NMR (400 MHz, DMSO-d₆) δ=11.39 (br s, 1H), 7.63 (d, J=8.1 Hz, 1H), 5.71 (d, J=5.1 Hz, 1H), 5.67 (d, J=8.1 Hz, 1H), 5.18 (d, J=6.8 Hz, 1H), 4.07-3.93 (m, 5H), 3.82 (t, J=5.5 Hz, 1H), 3.57 (t, J=5.9 Hz, 1H), 3.35-3.34 (m, 3H), 2.07 (s, 1H), 2.04-1.91 (m, 1H), 1.57 (dt, J=9.8, 16.5 Hz, 1H), 1.23 (t, J=7.0 Hz, 6H), 1.03 (d, J=6.6 Hz, 3H) LCMS (M−H⁺): 405.2; purity: 100%

### Example 39: Synthesis of WV-NU-306

[chemical structure]

[chemical structure]

[chemical structure]

### 1. Preparation of Compound 1B

[chemical structure]

[2247] To a solution of compound 1A (20 g, 127.76 mmol) in THF (200 mL) and bromo(ethynyl)magnesium (0.5 M, 258.07 mL) was added at 0° C., and the mixture was stirred at 0° C. for 1 hr. TLC showed compound 1A was consumed completely and two new spots formed. The mixture was quenched by addition sat. NH₄Cl (aq., 50 mL) at 0° C., then diluted with H₂O (200 mL) and extracted with DCM (150 mL*3). The combined organic layers were dried over Na₂SO₄, filtered to get the crude. Compound 1B (18.6 g, crude) in DCM as a yellow liquid was used for next step.

[2248] TLC: Petroleum ether:Ethyl acetate=5:1, Rf=0.24

### 2. Preparation of Compound 2A

[chemical structure]

[2249] For two batches. To a solution of compound 1B (9 g, 61.59 mmol) in DCM (500 mL) was added m-CPBA (25.01 g, 123.18 mmol, 85% purity). The mixture was stirred at 20° C. for 1 hr. TLC indicated compound 1B was consumed completely and one new spot formed. The reaction was clean according to TLC. Two batches combined with together. The reaction mixture was quenched by sat. aq. Na₂SO₃ (500 mL) and NaHCO₃ (500 mL), then extracted with DCM (100 mL*3). The combined organic layers were washed with brine (100 mL*2), dried over Na₂SO₄, filtered and concentrated under reduced pressure to give a residue. The residue was purified by column chromatography (SiO₂, Petroleum ether/Ethyl acetate=I/O to 0/1). Compound 2A (10 g, 50.07% yield) was obtained as a colorless oily liquid.

[2250] ¹H NMR (400 MHz, CHLOROFORM-d) 6=4.21-4.13 (m, 4H), 2.94 (d, J=13.3 Hz, 1H), 1.35 (t, J=7.1 Hz, 6H)

[2251] TLC: Petroleum ether:Ethyl acetate=1:1, Rf=0.45

### 3. Preparation of Compound 2

[chemical structure]

[2252] For two batches. To a solution of compound 1 (40 g, 154.90 mmol, 1 eq) in DMF (500 mL) was added imidazole (52.73 g, 774.51 mmol) and TBSCl (93.39 g, 619.61 mmol), the mixture was stirred at 20° C. for 2 hr. TLC indicated compound 1 was consumed completely and one new spot formed. The reaction mixture was concentrated under reduced pressure to remove DMF. The residue was purified by column chromatography (SiO₂, Petroleum ether/Ethyl acetate=1/0 to 0/1). Compound 2 (150 g, 99.47% yield) was obtained as a white solid.

[2253] TLC: Petroleum ether:Ethyl acetate=1:1, Rf=0.55

### 4. Preparation of Compound 3

[chemical structure]

[2254] For four batches: To a solution of compound 2 (22.5 g, 46.23 mmol, 1 eq) in THF (350 mL) was added TFA (69.07 g, 605.80 mmol) and H₂O (45.00 g, 2.50 mol). The mixture was stirred at 0° C. for 1 hr. LCMS showed compound 2 was consumed completely and the desired mass was detected. For four batches were combined for workup. The reaction mixture was added NH₃·H₂O (20 ml), then filtered and concentrated under reduced pressure to give a residue. The residue was purified by column chromatography (SiO₂, Petroleum ether/Ethyl acetate=1/0 to 0/1). Compound 3 (55 g, 60.44% yield) was obtained as a white solid.

[2255] ¹H NMR (400 MHz, CHLOROFORM-d) 6=8.77 (br s, 1H), 7.69 (d, J=8.2 Hz, 1H), 5.74 (dd, J=1.7, 8.0 Hz, 1H), 5.68 (d, J=4.0 Hz, 1H), 4.36 (t, J=5.1 Hz, 1H), 4.10-4.04 (m, 1H), 3.98 (t, J=4.4 Hz, 2H), 3.76 (dd, J=1.7, 12.2 Hz, 1H), 3.50 (s, 4H), 0.92 (s, 10H), 0.12 (d, J=5.4 Hz, 6H)

[2256] LCMS (M−H+):371.3

[2257] TLC: Petroleum ether:Ethyl acetate=1:1, Rf=0.2

### 5. Preparation of Compound 4

[chemical structure]

[2258] To a solution of compound 3 (50 g, 134.23 mmol) in Py (1000 mL) was added PPh₃ (63.37 g, 241.62 mmol) and I₂ (51.10 g, 201.35 mmol). The mixture was stirred at 25° C. for 12 hr under N₂ atmosphere. LCMS showed compound 3 was consumed completely and the desired mass was detected. The reaction mixture was quenched by sat. aq. Na₂SO₃ (100 mL) and extracted with EtOAc (300 mL*3). The combined organic layers were washed with brine (100 mL*2), dried over Na₂SO₄, filtered and concentrated under reduced pressure to give a residue. The residue was purified by column chromatography (SiO₂, Petroleum ether/Ethyl acetate=I/O to 0/1). Compound 4 (30 g, 42.86% yield) was obtained as a purple solid.

[2259] ¹H NMR (400 MHz, DMSO-d₆) δ=11.44 (s, 1H), 7.71 (d, J=8.1 Hz, 1H), 5.85 (d, J=5.5 Hz, 1H), 5.71 (dd, J=1.6, 8.1 Hz, 1H), 4.24 (t, J=4.4 Hz, 1H), 4.07 (t, J=5.3 Hz, 1H), 3.87-3.82 (m, 1H), 3.54 (dd, J=6.5, 10.6 Hz, 1H), 3.41-3.36 (m, 1H), 3.31 (s, 3H), 0.89 (s, 9H), 0.14 (d, J=9.2 Hz, 6H)

[2260] LCMS (M−H+):483

[2261] TLC: Petroleum ether:Ethyl acetate=1:1, Rf=0.6

### 6. Preparation of Compound 5

[chemical structure]

[2262] To a solution of compound 4 (24 g, 49.75 mmol) in DMF (120 mL) was added NaN₃ (3.95 g, 60.76 mmol) 0.5 g for 4 portions under N₂. After additional, the mixture was stirred at 50° C. for 12 hr under N₂. LCMS showed compound 4 was consumed completely and the desired mass was detected. The reaction was quenched by H₂O (200 mL), and extracted with Ethyl acetate (300 mL*3). The combined organic layers were washed with saturated aqueous NaCl 150 mL, dried over Na₂SO₄, filtered and concentrated under reduced pressure to give a residue. Compound 5 (19.78 g, crude) was obtained as a red solid.

[2263] LCMS: (M+H+):398.1

### 7. Preparation of Compound 6

[chemical structure]

[2264] To a solution of compound 5 (19.78 g, 49.76 mmol) in THF (200 mL) was added N,N— diethylethanamine;trihydrofluoride (32.09 g, 199.04 mmol). The mixture was stirred at 20° C. for 12 hr. LCMS showed compound 5 was consumed completely and the desired mass was detected. The reaction mixture was neutralized with sat.Na₂CO₃ (aq.) until pH=7. The mixture was concentrated under reduced pressure to removed most of water. The mixture was added DCM (40 mL) and dried over Na₂SO₄, filtered and concentrated under reduced pressure to give a residue. The residue was purified by column chromatography (SiO₂, Petroleum ether/Ethyl acetate=1/0 to 0/1). Compound 6 (11 g, 8.07% yield) was obtained as a yellow solid.

[2265] ¹H NMR (400 MHz, DMSO-d₆) δ=11.41 (s, 1H), 7.70 (d, J=8.1 Hz, 1H), 5.83 (d, J=4.9 Hz, 1H), 5.68 (dd, J=1.9, 8.1 Hz, 1H), 5.36 (d, J=6.3 Hz, 1H), 3.96-3.87 (m, 2H), 3.61 (d, J=4.9 Hz, 2H), 3.36 (s, 3H)

[2266] LCMS (M−H+):284.1

[2267] TLC: Petroleum ether:Ethyl acetate=0:1, R_{f}=0.4

### 8. Preparation of WV-NU-306

[chemical structure]

[2268] For three batches. To a solution of compound 6 (4 g, 14.12 mmol) and compound 2A (2.68 g, 16.52 mmol) in DMF (40 mL) was degassed and purged with N₂ for 3 times, then DIEA (3.65 g, 28.24 mmol), CuI (5.38 g, 28.24 mmol) was added. The mixture was stirred at 20° C. for 4 hr under N₂ atmosphere. LCMS showed compound 6 was consumed completely and the desired mass was detected. Three batches combined with together. The reaction mixture was concentrated under reduced pressure to give product. The residue was purified by column chromatography (SiO₂, DCM: Methanol=1/0 to 0/1). WV-NU-306 (16 g, 84.79% yield) was obtained as a yellow solid.

[2269] ¹H NMR (400 MHz, CHLOROFORM-d) 6=9.78 (s, 1H), 8.28 (s, 1H), 7.03 (d, J=8.1 Hz, 1H), 5.73 (dd, J=1.6, 8.1 Hz, 1H), 5.61 (d, J=2.3 Hz, 1H), 4.96-4.88 (m, 1H), 4.75 (dd, J=5.7, 14.4 Hz, 1H), 4.28-4.15 (m, 6H), 3.97 (dd, J=2.3, 5.0 Hz, 1H), 3.66 (br d, J=6.8 Hz, 1H), 3.55 (s, 3H), 1.35 (t, J=7.0 Hz, 6H)

[2270] ³¹P NMR (162 MHz, CHLOROFORM-d) δ=6.72 (s, 1P)

[2271] LCMS (M−H⁺):446, LCMS purity: 94.74%

[2272] TLC: DCM:MeOH=10:1, Rf=0.65

### Example 40: Synthesis of WV-NU-299

[chemical structure]

[chemical structure]

### 1. Preparation of Compound 2B

[chemical structure]

[2273] To a solution of compound 1B (50 g, 193.63 mmol) in DMF (800 mL) was added imidazole (65.91 g, 968.14 mmol) and TBSCl (116.74 g, 774.51 mmol). The mixture was stirred at 20° C. for 2 hr. LCMS showed compound 1B was consumed completely and one main peak with desired mass was detected. The reaction mixture was concentrated under reduced pressure to remove DMF. The residue was purified by column chromatography (SiO₂, Petroleum ether/Ethyl acetate=1/0 to 0/1). Compound 2B (180 g, 95.74% yield) was obtained as a white solid.

[2274] ¹HNMR (400 MHz, CHLOROFORM-d) 6=9.35-9.27 (m, 1H), 8.05 (d, J=8.1 Hz, 1H), 5.93 (d, J=1.5 Hz, 1H), 5.67 (d, J=8.0 Hz, 1H), 4.23 (dd, J=4.9, 7.1 Hz, 1H), 4.06-4.01 (m, 2H), 3.77 (d, J=10.4 Hz, 1H), 3.59 (dd, J=1.6, 4.8 Hz, 1H), 3.55 (s, 3H), 0.91 (s, 9H), 0.90 (s, 9H), 0.09 (t, J=3.6 Hz, 12H)

[2275] TLC (Ethyl acetate:Methanol=3:1), R_{f}=0.3

[2276] LCMS (M−H⁺): 485.4

### 2. Preparation of Compound 3B

[chemical structure]

[2277] For two batches: To a solution of compound 2B (94 g, 193.12 mmol, 1 eq) in THF (800 mL) was added the mixture of TFA (200 mL) and H₂O (200 mL). The mixture was stirred at 0° C. for 3 hr. LCMS showed compound 2B was consumed completely and one main peak with desired mass was detected. The reaction mixture was concentrated under reduced pressure to remove solvent. The residue was purified by column chromatography (SiO2, Petroleum ether/Ethyl acetate=1/0 to 0/1). Compound 3B (74 g, 52.86% yield) was obtained as a white solid.

[2278] ¹HNMR (400 MHz, CHLOROFORM-d) 6=9.55-9.48 (m, 1H), 7.74 (d, J=8.1 Hz, 1H), 5.77-5.69 (m, 2H), 4.35 (t, J=5.3 Hz, 1H), 4.09-4.04 (m, 1H), 4.02-3.93 (m, 2H), 3.79-3.72 (m, 1H), 3.49 (s, 3H), 2.74 (br s, 1H), 0.91 (s, 9H), 0.11 (d, J=5.0 Hz, 6H)

[2279] LCMS (M−H⁺): 371.1

[2280] TLC (Petroleum ether:Ethyl acetate=1:1), Rf=0.5

### 3. Preparation of Compound 4

[chemical structure]

[2281] For two batches: To a solution of compound 3B (25 g, 67.12 mmol) in DCM (1400 mL) was added DMP (42.70 g, 100.67 mmol) at 0° C. The mixture was stirred at 20° C. for 3 hr. TLC indicated compound 3B was consumed completely and one new spot formed. The reaction mixture of two batches were diluted with Na₂SO₃: NaHCO₃=1:2 700 mL and extracted with DCM 60*3 mL. The combined organic layers were washed with Sat. NaCl 800 mL, dried over Na₂SO₄, filtered and concentrated under reduced pressure to get compound 4 (49.7 g, crude) was obtained as a yellow oil.

[2282] TLC (Petroleum ether:Ethyl acetate=1:1), Rf=0.18

### 4. Preparation of Compound 5

[chemical structure]

[2283] To a solution of NaH (11.78 g, 294.54 mmol, 60% purity) in THF (120 mL) was added compound 4A (84.89 g, 294.54 mmol) in THF (800 mL) at 0° C. The reaction mixture was warmed up to 20° C., and stirred for 1 hr. A solution of LiBr (25.58 g, 294.54 mmol) in THF (250 mL) was added and the resultant slurry was stirred, and then cooled to 0° C. To the above mixture was added a solution of compound 4 (24.8 g, 66.94 mmol) in THF (250 mL) at 0° C. The mixture was stirred at 0-20° C. for 12 hr. LCMS showed compound 4 was consumed completely and one main peak with desired mass was detected. The reaction mixture was diluted with H2O 3000 mL and extracted with EtOAc 500*3 mL. The combined organic layers were washed with Sat. NaCl 1000 mL, dried over Na₂SO₄, filtered and concentrated under reduced pressure to give a residue. The residue was purified by column chromatography (SiO₂, Petroleum ether/Ethyl acetate=I/O to 0/1). Compound 5 (31.2 g, 46.57% yield) was obtained as a white solid.

[2284] ¹H NMR (400 MHz, DMSO-d₆) δ=11.41 (s, 1H), 7.70 (d, J=8.1 Hz, 1H), 6.75-6.62 (m, 1H), 6.14-6.01 (m, 1H), 5.77 (d, J=3.1 Hz, 1H), 5.67 (d, J=8.1 Hz, 1H), 4.36-4.26 (m, 2H), 3.99-3.93 (m, 5H), 3.37 (s, 3H), 1.23 (s, 12H), 0.87 (s, 9H)

[2285] LCMS (M+H⁺): 505.4

[2286] TLC (Petroleum ether:Ethyl acetate=3:1), Rf=0.4

### 5. Preparation of Compound WV-NU-299

[chemical structure]

[2287] To a solution of compound 5 (34 g, 67.38 mmol) in THF (340 mL) was added N,N-diethylethanamine;trihydrofluoride (43.45 g, 269.53 mmol). The mixture was stirred at 40° C. for 6 hr. TLC indicated compound 5 was consumed completely and one new spot formed. The reaction mixture was concentrated under reduced pressure to remove DMF. The residue was purified by column chromatography (SiO₂, DCM:MeOH=1:0 to 0:1) to get WV-NU-299 (11.3 g, 42.96% yield) as a white solid.

[2288] ¹H NMR (400 MHz, DMSO-d₆) δ=11.41 (s, 1H), 7.63 (d, J=8.1 Hz, 1H), 6.80-6.66 (m, 1H), 6.07-5.96 (m, 1H), 5.81 (d, J=4.1 Hz, 1H), 5.66 (d, J=8.0 Hz, 1H), 5.50 (d, J=6.6 Hz, 1H), 4.38-4.31 (m, 1H), 4.04-3.91 (m, 6H), 3.38 (s, 3H), 1.23 (dt, J=1.4, 7.1 Hz, 6H)

[2289] LCMS (M−H⁺): 389.0

[2290] TLC (DCM:MeOH=10:1, R_{f}=0.25)

### Example 41: Synthesis of (WV-NU-301)

[chemical structure]

[chemical structure]

### 1. Preparation of (2R,3R,3aS,9aR)-3-hydroxy-2-(hydroxymethyl)-2,3,3a,9a-tetrahydro-6H-furo[2′,3′:4,5]oxazolo[3,2-c]pyrimidine-6,8(7H)-dione (WV-NU-302-02)

[chemical structure]

[2291] To a stirred solution of Uridine (50 g, 0.2049 mol) and diphenyl carbonate (47.79 g, 0.2233 mol.) in dry DMF (60 mL, 1.2 vol.) was added sodium bicarbonate (430 mg, 0.00512 mol) stirred at 130° C. for 3 h. Progress of the reaction was monitored by TLC. Then reaction mixture was cooled to room temperature, precipitated product was observed, filtered and washed with cool methanol (2×20 mL), dried under vacuum to get as off white solid (WV—NU-301-02) (35 g, 70%). TLC Mobile phase details: 15% MeOH in DCM.

[2292] ¹H NMR (400 MHz, DMSO-d₆): δ in ppm=7.82 (dd, 1H, J1=7.4 Hz, J2=0.8 Hz), 6.30 (d, 1H, J1=5.8 Hz), 5.85 (dd, 1H, J1=7.4 Hz, J2=0.4 Hz), 5.19 (d, 1H, J1=5.6 Hz), 4.37 (s, 1H), 4.07 (dd, 1H, J1=5.3 Hz, J2=1.5 Hz), 3.27 (dd, 1H, J1=11.6 Hz, J2=5.0 Hz), 3.18 (q, 3H, J1=5.8 Hz).

[2293] MS: m z calcd for C₉H₁₀N₂O₆, 242.2; found 242.3. [M⁺].

### 2. Preparation of (2R,3R,3aS,9aR)-2-(((tert-butyldiphenylsilyl)oxy)methyl)-3-hydroxy-2,3,3a,9a-tetrahydro-6H-furo[2′,3′:4,5]oxazolo[3,2-c]pyrimidine-6,8(7H)-dione (WV—NU-301-03)

[chemical structure]

[2294] To a stirred solution of (WV-NU-301-02) (30 g, 0.1239 mol) and DMAP (1.38 g, 0.0123 mol.) in anhydrous pyridine (150 mL, 5 vol.) was added TBDPSCl (47.2 mL, 0.1859 mol.) dropwise over a period of 30 mins, at 0° C. Above reaction mixture was stirred at rt for 30 h. Progress of the reaction was monitored by TLC. The reaction was diluted with cold sat. NaHCO₃ (150 mL) and extracted with DCM (2×200 mL), washed with brine (1×100 mL) solution (1×100 mL), dried over Na₂SO₄ and concentrated under reduced pressure. The crude compound was purified by column chromatography over silica-gel (230-400 mesh) eluted in 3% MeOH/DCM to afford an off-white solid. (WV-NU-301-03) (27 g, 46%). TLC Mobile phase details: 10% MeOH in DCM.

[2295] ¹H NMR (400 MHz, DMSO-d₆): δ in ppm=7.92 (d, 1H, J1=7.4 Hz), 7.53 (m, 4H), 7.43 (m, 6H), 6.32 (d, 1H, J1=5.8 Hz), 6.01 (d, 1H, J1=4.7 Hz), 5.87 (d, 1H, J1=7.4 Hz), 5.26 (dd, 1H, J1=5.6 Hz), 4.44 (t, 1H, J1=3.2 Hz), 3.59 (dd, 1H, J1=11.3 Hz, J2=4.7 Hz), 3.47 (dd, 1H, J1=11.3 Hz, J2=6.5 Hz), 0.92 (s, 9H), 7.53 (m, 4H).

### 3. Preparation of 1-((2R,3R,4R,5R)-3-(hexadecyloxy)-4-hydroxy-5-(hydroxymethyl)tetrahydrofuran-2-yl)pyrimidine-2,4(1H,3H)-dione (WV-NU-301-05)

[chemical structure]

[2296] To a stirred solution of 1-Hexadecanol (108.9 g, 0.451 mol)) in anhydrous diglyme (84 L, 2.8 vol.) was added Trimethylaluminum (71.1 mL, 0.150 mol, 2M solution in toluene) dropwise over a period of 40 min. The resulting mixture was heated to 120° C. and stirred for 2 h. Then the mass was allowed to rt and (WV-NU-301-03) (30 g, 0.0625 mol) was added, stirred at 145° C. for 15 h. Progress of the reaction was monitored by TLC. The reaction mixture was diluted 10% H₃PO₄ (500 mL) and EtOAc (300 mL), organic layer was separated washed with 5% NaCl (100 mL), dried over Na₂SO₄ and concentrated under vacuum to afford as a gummy syrup (56 g, crude). The syrup was dissolved in THF (300 mL, 10 vol.), was added triethyl amine hydrofluoride (40.7 mL, 0.250 mol.), stirred rt for 3 days. Progress of the reaction was monitored by TLC. The reaction was diluted 5% NaCl (300 mL) and EtOAc (300 mL), organic layer was separated washed with 5% NaCl (100 mL) washed with sat. NaCl solution (1×100 mL), dried over Na₂SO₄ and concentrated under reduced pressure. The crude compound was purified by column chromatography over silica-gel (230-400 mesh) eluted in 3% MeOH in DCM to afford an off-white solid. (WV—NU-301-05) (12 g, 40%). TLC Mobile phase details: 10% MeOH in DCM.

[2297] ¹H NMR (400 MHz, DMSO-d₆): δ in ppm=11.33 (s, 1H), 7.94 (d, 1H, J1=8.2 Hz), 5.83 (d, 1H, J1=5.1 Hz), 5.64 (dd, 1H, J1=8.1 Hz, J2=1.6 Hz), 5.14 (d, 1H, J1=5.1 Hz), 5.04 (d, 1H, J1=5.8 Hz), 4.09 (dt, 2H, J1=7.6 Hz, J1=2.6 Hz), 3.84 (m, 2H), 3.64 (m, 1H), 3.55 (m, 2H), 3.46 (m, 2H), 3.23 (s, 1H), 3.17 (d, 2H, J1=5.2 Hz), 1.43 (m, 3H), 1.23 (s, 34H), 0.85 (t, 4H, J1=6.8 Hz), MS: m czalcd for C₂₅H₄₄N₂O₆, 468.6; found 467.3 (M−H⁺

### 4. Preparation of 1-((2R,3R,4R,5R)-5-((bis(4-methoxyphenyl)(phenyl)methoxy)methyl)-3-(hexadecyloxy)-4-hydroxytetrahydrofuran-2-yl)pyrimidine-2,4(1H,3H)-dione (WV—NU-301)

[chemical structure]

[2298] To a stirred solution of (WV-NU-301-05) (6 g, 0.01282 mol) in anhydrous Pyridine (90 mL, 15 vol.) was added DMTCl (7.3 g, 0.02179 mol) portion-wise over a period of 15 min at 0° C. Above reaction was stirred at rt for 30 h. Progress of the reaction was monitored by TLC. Then reaction was concentrated under vacuum to get crude mass. The crude was dissolved in ethyl acetate (100 mL), washed with sat. NaHCO₃ (30 mL×2), brine solution (30 mL×1), dried over Na₂SO₄, concentrated and purified by column chromatography over silica gel (230-400 mesh) eluted in 35% EtOAc/Hexane to get as an off white solid (WV—NU-313) (7 g, 70%). TLC Mobile phase details: 50% EtOAc in Hexane.

[2299] ¹H NMR (400 MHz, DMSO-d₆): δ in ppm=11.37 (s, 1H), 7.72 (d, 1H, J1=8.1 Hz), 7.38 (m, 1H), 7.32 (m, 2H), 7.24 (m, 5H), 6.90 (d, 4H, J1=8.8 Hz), 5.80 (d, 1H, J1=3.8 Hz), 5.28 (d, 1H, J1=8.0 Hz), 5.12 (d, 1H, J1=6.6 Hz), 4.17 (dd, 1H, J1=11.6 Hz, J1=6.1 Hz), 4.96 (m, 1H), 3.90 (t, 1H, J1=4.5 Hz), 3.74 (s, 6H), 3.56 (m, 2H), 3.25 (m, 2H), 1.49 (q, 2H, J1=6.6 Hz), 2.14 (d, 28H, J1=15.0 Hz), 0.85 (t, 3H, J1=6.9 Hz),

[2300] MS: m czalcd for C₄₆H₆₂N₂O₈, 771.0; found 770.01 (M−H⁺).

### Example 42: Synthesis of L- and D-DPSE-2′-OMe-5′-Phosphonate Uridine Amidites

### General Procedure for Preparation of L- and D-DPSE-2′-OMe-5′-Phosphonate Uridine Amidites

[2301] Nucleosides (1.0 eq.) in an appropriate size three necked flask was azeotrope with anhydrous toluene (15 mL/g) and anhydrous acetonitrile (15 mL/g) and was dried for 24 hours on high vacuum. To the flask was added anhydrous THF (0.2 M solution) under argon and solution was cooled to −5° C. To the reaction mixture was added triethyl amine (5.0 eq.) followed by addition of D-DPSE-Cl (1.25 M) or L-DPSE-Cl (0.9M) solution (1.8-2.2 eq.) over the period of 5-10 min. The reaction mixture was warmed to room temperature and reaction progress was monitored by HPLC. After disappearance of starting material, the reaction mixture was filtered through fritted glass tube. Reaction flask and precipitate was washed with anhydrous THF. Obtained filtrate was collected and solvent was removed under reduced pressure. The residue was purified by column chromatography (SiO2, 40-100% Ethyl acetate in Hexanes with 5% triethyl amine) to give the corresponding D-DPSE and/or L-DPSE Amidites as off-white solid.

### Synthesis of L-DPSE-2′-OMe-5′-(R)-Me-PO(OEt)₂-Uridine amidite

[chemical structure]

[2302] Nucleoside, 2′-OMe′-5′-(R)-Me-PO(OEt)₂-U (WV-NU-231, 5.0 g) was converted to L-DPSE-2′-OMe-5′-(R)-Me-PO(OEt)₂-Uridine amidite by general procedure (7.9 g g, 84% yield) as an off-white solid.

[2303] LCMS: C₃₅H₄₉N₃O₉P₂Si (M−H⁻). 744.85

[2304] ¹H NMR (600 MHz, CDCl₃) δ ¹H NMR (600 MHz, CDCl₃) δ 8.48 (s, 1H), 7.64-7.47 (m, 5H), 7.38 (ddt, J=16.6, 8.8, 4.8 Hz, 5H), 7.27 (d, J=8.1 Hz, 1H), 5.77 (d, J=8.1 Hz, 1H), 5.72 (d, J=3.2 Hz, 1H), 4.95 (q, J=7.1 Hz, 1H), 4.21 (dt, J=9.7, 6.5 Hz, 1H), 4.18-4.04 (m, 3H), 3.89 (t, J=6.4 Hz, 1H), 3.69 (dd, J=5.7, 3.2 Hz, 1H), 3.57 (ddt, J=14.8, 10.5, 7.5 Hz, 1H), 3.46-3.39 (m, 1H), 3.27 (s, 3H), 3.18 (tdt, J=15.2, 10.6, 5.3 Hz, 1H), 2.34-2.22 (m, 1H), 2.10-1.97 (m, 2H), 1.85 (dtt, J=12.2, 8.1, 3.3 Hz, 1H), 1.69 (pd, J=16.4, 8.5 Hz, 4H), 1.51 (dd, J=14.5, 7.8 Hz, 1H), 1.34 (td, J=7.0, 2.2 Hz, 6H), 1.31-1.22 (m, 2H), 1.17 (d, J=6.8 Hz, 3H), 0.67 (s. 3H).

[2305] ³¹P NMR (243 MHz, CDCl₃) δ=155.81, 30.61

[2306] ¹³C NMR (151 MHz, CDCl₃) δ 162.64, 149.63, 140.01, 136.33, 136.11, 134.55, 134.51, 134.48, 134.46, 134.42, 129.58, 129.53, 128.09, 128.01, 127.98, 127.87, 102.66, 88.98, 85.60, 85.57, 85.45, 82.70, 79.07, 79.01, 71.21, 71.11, 67.33, 67.31, 61.60, 61.55, 61.51, 58.45, 46.86, 46.63, 30.53, 30.50, 29.72, 28.78, 26.96, 25.97, 25.95, 18.03, 18.01, 16.52, 16.51, 16.48, 16.46, 15.85, 15.82, −3.40.

### Synthesis of D-DPSE-2′-OMe-5′-(R)-Me-PO(OEt)₂-Uridine amidite

[chemical structure]

[2307] Nucleoside, 2‘—OMe’-5′-(R)-Me-PO(OEt)₂-U (WV-NU-231,2.5 g) was converted to D-DPSE-2′-OMe-5′-(R)-Me-PO(OEt)₂-Uridine amidite by general procedure (2.8 g g, 83% yield) as an off-white solid.

[2308] LCMS: C₃₅H₄₉N₃O₉P₂Si (M−H⁻). 744.85

[2309] ¹H NMR (600 MHz, CDCl₃) δ 9.24 (s, 1H), 7.54 (td, J=7.4, 1.7 Hz, 5H), 7.42-7.32 (m, 5H), 7.27 (d, J=8.1 Hz, 1H), 5.77 (d, J=8.1 Hz, 1H), 5.73 (d, J=3.1 Hz, 1H), 4.94 (td, J=7.5, 5.3 Hz, 1H), 4.21 (ddd, J=9.7, 7.2, 5.6 Hz, 1H), 4.11 (qdd, J=15.1, 6.9, 4.1 Hz, 4H), 3.88 (dd, J=7.3, 5.5 Hz, 1H), 3.69 (dd, J=5.7, 3.1 Hz, 1H), 3.56 (ddt, J=14.7, 10.6, 7.6 Hz, 1H), 3.41 (ddd, J=12.3, 9.8, 5.5 Hz, 1H), 3.27 (s, 3H), 3.18 (tdd, J=10.9, 8.8, 4.5 Hz, 1H), 2.29 (ttd, J=8.8, 6.4, 3.0 Hz, 1H), 2.06-1.97 (m, 1H), 1.84 (dp, J=12.7, 4.3 Hz, 1H), 1.68 (td, J=15.5, 7.5 Hz, 3H), 1.51 (dd, J=14.5, 7.8 Hz, 1H), 1.33 (td, J=7.0, 1.8 Hz, 6H), 1.29-1.24 (m, 1H), 1.17 (d, J=6.7 Hz, 3H), 0.68 (s, 3H).

[2310] ³¹P NMR (243 MHz, CDCl₃) δ=155.73, 30.66

[2311] ¹³C NMR (151 MHz, CDCl₃) δ 163.22, 149.88, 139.98, 136.34, 136.11, 134.55, 134.51, 134.49, 134.45, 129.57, 129.52, 128.00, 127.97, 127.85, 102.68, 88.93, 82.73, 79.06, 79.00, 71.24, 71.14, 67.32, 67.30, 61.60, 61.56, 61.51, 58.45, 46.85, 46.62, 30.52, 30.50, 29.69, 28.75, 26.96, 25.97, 25.95, 18.03, 18.01, 16.52, 16.50, 16.48, 16.46, 15.86, 15.84, −3.40.

### Synthesis of L-DPSE-2′-OMe-5′-Me-PO(OEt)₂-Uridine amidite

[chemical structure]

[2312] Nucleoside, 2‘—OMe’-5′-Me-PO(OEt)₂-U (WV-NU-230,1.6 g) was converted to L-DPSE-2′-OMe-5′-Me-PO(OEt)₂-Uridine amidite by general procedure (1.98 g g, 67% yield) as an off-white solid.

[2313] LCMS: C₃₅H₄₇N₃O₉P₂Si (M−H⁻). 742.69

[2314] ³¹P NMR (243 MHz, CDCl₃) δ=153.09, 17.24

[2315] ¹H NMR (600 MHz, CDCl₃) δ=9.20 (s, 1H), 7.47-7.35 (m, 5H), 7.24 (q, J=6.2 Hz, 7H), 7.07 (d, J=8.1 Hz, 1H), 5.71-5.61 (m, 2H), 5.56 (t, J=2.7 Hz, 1H), 4.80 (q, J=6.8 Hz, 1H), 4.32 (dt, J=9.4, 6.1 Hz, 1H), 4.11 (d, J=6.3 Hz, 1H), 3.98 (tt, J=12.8, 7.9 Hz, 4H), 3.63 (t, J=4.8 Hz, 1H), 3.47-3.39 (m, 1H), 3.37-3.32 (m, 1H), 3.28 (d, J=2.0 Hz, 3H), 3.08 (qd, J=10.4, 4.2 Hz, 1H), 1.95 (d, J=3.2 Hz, 3H), 1.75 (dp, J=12.9, 5.1 Hz, 1H), 1.62-1.52 (m, 2H), 1.37 (dd, J=14.6, 6.6 Hz, 1H), 1.32-1.27 (m, 1H), 1.22 (t, J=6.9 Hz, 6H), 1.15 (td, J=8.6, 2.4 Hz, 1H), 0.55 (s, 3H).

[2316] ¹³C NMR (151 MHz, CDCl₃) δ=163.12, 156.31, 156.26, 149.74, 141.09, 136.48, 135.94, 134.53, 134.51, 134.48, 134.36, 129.54, 129.47, 129.27, 128.14, 128.00, 127.96, 127.86, 113.72, 112.46, 102.90, 90.63, 85.36, 85.34, 85.21, 85.19, 81.33, 81.31, 79.55, 79.49, 77.27, 77.06,

### Synthesis of L-DPSE-2′-OMe-5′-Triazole-PO(OEt)₂-Uridine amidite

[chemical structure]

[2317] Nucleoside, 2‘—OMe’-5′-triazole-PO(OEt)₂-U (WV-NU-306, 3.12 g) was converted to L-DPSE-2′-OMe-5′-triazole-PO(OEt)₂-Uridine amidite by general procedure (3.18 g, 60% yield) as an off-white solid.

[2318] LCMS: C₃₅H₄₆N₆O₉P₂Si (M−H⁻). 783.36

[2319] ¹H NMR (600 MHz, CDCl₃) δ 8.70 (s, 1H), 8.07 (s, 1H), 7.54 (d, J=7.6 Hz, 2H), 7.50 (d, J=7.7 Hz, 2H), 7.32 (s, 7H), 6.82 (d, J=8.1 Hz, 1H), 5.70 (d, J=8.1 Hz, 1H), 5.37 (d, J=3.1 Hz, 1H), 4.92 (d, J=8.3 Hz, 1H), 4.61 (dd, J=14.6, 2.9 Hz, 1H), 4.44 (s, 2H), 4.20 (s, 5H), 3.79 (d, J=2.4 Hz, 1H), 3.59 (dd, J=7.0, 3.4 Hz, 1H), 3.50 (d, J=2.8 Hz, 1H), 3.38 (s, 3H), 3.21 (dd, J=9.0, 4.4 Hz, 1H), 1.89 (dd, J=8.1, 3.5 Hz, 1H), 1.75 (d, J=9.6 Hz, 1H), 1.65 (dd, J=14.7, 8.5 Hz, 1H), 1.47 (d, J=6.2 Hz, 2H), 1.36 (d, J=5.0 Hz, 6H), 0.67 (s, 3H)

[2320] ³¹P NMR (243 MHz, CDCl₃) δ 152.69, 6.72

[2321] ¹³C NMR (151 MHz, CDCl₃) δ 162.85, 149.56, 141.88, 136.59, 135.94, 134.57, 134.36, 132.29, 129.49, 129.43, 127.99, 127.94, 102.90, 93.49, 81.01, 80.59, 79.58, 77.11, 76.90, 76.69, 70.73, 70.67, 67.90, 63.12, 63.08, 58.93, 50.34, 46.74, 46.51, 27.26, 27.21, 25.93, 25.91, 17.75, 16.32, 16.28.

### Synthesis of D-DPSE-2′-OMe-5′-triazole-PO(OEt)₂-2′OMe-Uridine amidite

[chemical structure]

[2322] Nucleoside, 2‘—OMe’-5′-triazole-PO(OEt)₂-U (WV-NU-306, 3.11 g) was converted to D-DPSE-2′-OMe-5′-triazole-PO(OEt)₂-2′OMe-Uridine amidite by general procedure (3.35 g, 63% yield) as an off-white solid.

[2323] LCMS: C₃₅H₄₆N₆O₉P₂Si (M−H⁻). 783.36

[2324] ¹H NMR (600 MHz, CDCl₃) δ 9.33 (s, 1H), 8.10 (s, 1H), 7.53 (ddt, J=17.2, 6.5, 1.6 Hz, 4H), 7.33 (dtdd, J=11.0, 8.5, 3.9, 1.9 Hz, 6H), 6.82 (d, J=8.1 Hz, 1H), 5.70 (d, J=8.1 Hz, 1H), 5.47 (d, J=3.3 Hz, 1H), 4.92 (td, J=7.4, 5.4 Hz, 1H), 4.70 (dd, J=14.5, 3.1 Hz, 1H), 4.45 (dd, J=14.6, 6.8 Hz, 1H), 4.37 (ddd, J=9.4, 6.7, 5.6 Hz, 1H), 4.30-4.15 (m, 5H), 3.85 (dd, J=5.6, 3.4 Hz, 1H), 3.59 (ddt, J=14.5, 10.6, 7.5 Hz, 1H), 3.50-3.44 (m, 1H), 3.26 (s, 3H), 3.17 (tdd, J=10.8, 8.7, 4.6 Hz, 1H), 1.85 (dtq, J=12.4, 8.1, 3.6 Hz, 1H), 1.71 (dtd, J=15.0, 8.3, 4.5 Hz, 1H), 1.56 (ddd, J=88.8, 14.6, 7.5 Hz, 2H), 1.45-1.37 (m, 1H), 1.35 (td, J=7.0, 5.7 Hz, 6H), 1.29 (dt, J=9.8, 8.2 Hz, 1H), 0.67 (s, 3H).

[2325] ³¹P NMR (243 MHz, CDCl₃) δ 154.12, 6.58

[2326] ¹³C NMR (151 MHz, CDCl₃) δ 162.90, 149.72, 141.36, 136.44, 136.05, 134.61, 134.45, 132.33, 132.11, 129.53, 129.48, 127.99, 127.96, 102.96, 92.53, 81.07, 81.06, 80.62, 80.59, 79.60, 79.53, 70.72, 70.65, 67.50, 67.48, 63.16, 63.12, 58.58, 50.50, 46.93, 46.69, 27.15, 26.02, 26.00, 17.92, 17.89, 16.33, 16.31, 16.29, 16.27.

### Synthesis of L-DPSE-2′-OMe-5′-Vinyl-PO(OEt)₂-Uridine amidite

[chemical structure]

[2327] Nucleoside, 2′-OMe-5′-Vinyl-PO(OEt)₂-Uridine (WV-NU-299, 2.45 g) was converted to L-DPSE-2′-OMe-5′-Vinyl-PO(OEt)₂-Uridine amidite. by general procedure (2.58 g, 56% yield) as an off-white solid.

[2328] LCMS: C₃₄H₄₅N₃O₉P₂Si (M−H⁻): 728.48

[2329] ¹H NMR (600 MHz, CDCl₃) δ 8.47 (s, 1H), 7.55-7.50 (m, 4H), 7.40-7.31 (m, 6H), 7.18 (d, J=8.1 Hz, 1H), 6.79 (ddd, J=22.0, 17.2, 4.7 Hz, 1H), 5.99 (ddd, J=19.1, 17.2, 1.7 Hz, 1H), 5.76-5.73 (m, 2H), 4.86 (dt, J=8.1, 6.2 Hz, 1H), 4.43 (dddd, J=6.4, 4.7, 3.1, 1.8 Hz, 1H), 4.26 (ddd, J=8.8, 6.4, 5.2 Hz, 1H), 4.14-4.06 (m, 4H), 3.73 (dd, J=5.2, 3.7 Hz, 1H), 3.54 (dddd, J=14.6, 10.6, 8.1, 6.9 Hz, 1H), 3.41 (s, 4H), 3.18 (tdd, J=10.8, 8.8, 4.5 Hz, 1H), 1.85 (dtq, J=12.4, 8.1, 4.1, 3.5 Hz, 1H), 1.73-1.61 (m, 2H), 1.46 (dd, J=14.6, 6.6 Hz, 1H), 1.43-1.36 (m, 1H), 1.33 (td, J=7.1, 4.7 Hz, 6H), 1.28-1.22 (m, 1H), 0.66 (s, 3H).

[2330] ³¹P NMR (243 MHz, CDCl₃) δ 152.97, 16.88

[2331] ¹³C NMR (151 MHz, CDCl₃) δ 162.70, 149.59, 146.68, 146.65, 140.33, 136.48, 135.99, 134.54, 134.39, 129.56, 129.49, 128.01, 127.97, 120.08, 118.84, 102.79, 90.28, 81.72, 81.70, 79.58, 79.51, 73.20, 73.14, 67.73, 67.71, 62.06, 62.02, 61.99, 58.72, 58.71, 46.66, 46.42, 27.17, 25.93, 25.91, 17.80, 17.77, 16.46, 16.41.

### Synthesis of D-DPSE-2′-OMe-5′-Vinyl-PO(OEt)₂-Uridine amidite

[chemical structure]

[2332] Nucleoside, 2′-OMe-5′-Vinyl-PO(OEt)₂-Uridine (WV-NU-299, 5.39 g) was converted D-DPSE-2′-OMe-5′-Vinyl-PO(OEt)₂-Uridine amidite by general procedure (8.60 g, 85% yield) as an off-white solid.

[2333] LCMS: C₃₄H₄₅N₃O₉P₂Si (M−H⁻). 728.29

[2334] ¹H NMR (600 MHz, CDCl₃) δ 8.98 (s, 1H), 7.52 (ddt, J=8.2, 6.4, 1.6 Hz, 4H), 7.35 (dddd, J=13.7, 8.3, 7.0, 3.9 Hz, 6H), 7.24 (d, J=8.2 Hz, 1H), 6.82 (ddd, J=22.1, 17.2, 4.9 Hz, 1H), 6.01 (ddd, J=18.9, 17.2, 1.7 Hz, 1H), 5.82 (d, J=2.5 Hz, 1H), 5.75 (d, J=8.2 Hz, 1H), 4.89 (td, J=7.5, 5.3 Hz, 1H), 4.59-4.53 (m, 1H), 4.16-4.04 (m, 5H), 3.67 (dd, J=5.1, 2.5 Hz, 1H), 3.53 (ddt, J=14.8, 10.6, 7.6 Hz, 1H), 3.40 (ddt, J=9.5, 7.2, 5.4 Hz, 1H), 3.26 (s, 3H), 3.17 (tdd, J=10.8, 8.8, 4.3 Hz, 1H), 1.87-1.78 (m, 1H), 1.67 (dd, J=14.6, 7.2 Hz, 2H), 1.49 (dd, J=14.5, 7.8 Hz, 1H), 1.33 (q, J=7.0 Hz, 7H), 1.27-1.18 (m, 2H), 0.65 (s, 3H).

[2335] ³¹P NMR (243 MHz, CDCl₃) δ 152.43, 16.64

[2336] ¹³C NMR (151 MHz, CDCl₃) δ 161.50, 148.55, 145.48, 145.44, 138.46, 135.24, 134.98, 133.51, 133.41, 128.59, 128.52, 127.00, 126.96, 119.66, 118.41, 101.69, 88.59, 81.37, 77.98, 77.92, 72.29, 72.20, 66.40, 66.38, 61.05, 61.01, 57.44, 45.86, 45.63, 25.95, 24.86, 24.84, 16.92, 16.89, 15.41, 15.37.

### Example 43: Synthesis of D-PSM and L-PSM Amidite

### General Procedure for Synthesis of D-PSM and L-PSM Amidite

[2337] Nucleosides (1.0 eq.) in an appropriate size three necked flask was azeotrope with anhydrous toluene (15 mL/g) and anhydrous acetonitrile (15 mL/g) and was dried for 24 hours on high vacuum. To the flask was added anhydrous THF (0.2 M solution) under argon and solution was cooled to 0° C. To the reaction mixture was added triethyl amine (2.2 eq.) followed by addition of D-PSM-Cl or L-PSM-Cl solution (1.8-2 eq, 0.9M) over the period of 5-10 min. The reaction mixture was warmed to room temperature and reaction progress was monitored by HPLC. After disappearance of starting material, the reaction mixture was filtered through fritted glass tube. Reaction flask and precipitate was washed with anhydrous THF. Obtained filtrate was collected and solvent was removed under reduced pressure. The residue was purified by column chromatography (SiO2, 0-100% Ethyl acetate in Hexanes with 1.25% triethyl amine) to give the corresponding D-PSM, L-PSM, or Nu-D-PSM amidites as off-white solid.

### Synthesis of L-PSM-2′-O—C16 lipid-5′-ODMTr-Uridine amidite

[chemical structure]

[2338] Nucleoside, 2′-O—C16 lipid-5′-ODMTr-Uridine (WV-NU-301, 4.11 g) was converted to L-PSM-2′-O—C16 lipid-5′-ODMTr-Uridine amidite by general procedure (1.21 g, 23% yield) as an off-white solid.

[2339] LCMS: C₅₈H₇₆N₃O₁₁P₂S (M−H⁻): 1052.34

[2340] ¹H NMR (600 MHz, CDCl₃) δ 8.98 (s, 1H), 7.52 (ddt, J=8.2, 6.4, 1.6 Hz, 4H), 7.35 (dddd, J=13.7, 8.3, 7.0, 3.9 Hz, 6H), 7.24 (d, J=8.2 Hz, 1H), 6.82 (ddd, J=22.1, 17.2, 4.9 Hz, 1H), 6.01 (ddd, J=18.9, 17.2, 1.7 Hz, 1H), 5.82 (d, J=2.5 Hz, 1H), 5.75 (d, J=8.2 Hz, 1H), 4.89 (td, J=7.5, 5.3 Hz, 1H), 4.59-4.53 (m, 1H), 4.16-4.04 (m, 5H), 3.67 (dd, J=5.1, 2.5 Hz, 1H), 3.53 (ddt, J=14.8, 10.6, 7.6 Hz, 1H), 3.40 (ddt, J=9.5, 7.2, 5.4 Hz, 1H), 3.26 (s, 3H), 3.17 (tdd, J=10.8, 8.8, 4.3 Hz, 1H), 1.87-1.78 (m, 1H), 1.67 (dd, J=14.6, 7.2 Hz, 2H), 1.49 (dd, J=14.5, 7.8 Hz, 1H), 1.33 (q, J=7.0 Hz, 7H), 1.27-1.18 (m, 2H), 0.65 (s, 3H).

[2341] ³¹P NMR (243 MHz, CDCl₃) δ 155.06.

[2342] ¹³C NMR (151 MHz, CDCl₃) δ 162.78, 158.79, 158.75, 149.89, 144.34, 140.27, 139.47, 135.17, 135.04, 133.99, 130.28, 130.20, 129.31, 128.23, 128.12, 128.04, 127.23, 113.33, 102.05, 87.58, 87.18, 82.71, 82.68, 81.49, 74.48, 74.41, 71.14, 70.35, 70.27, 66.20, 66.18, 61.56, 58.12, 58.09, 55.28, 46.56, 46.33, 31.94, 29.72, 29.70, 29.68, 29.66, 29.53, 29.38, 27.34, 26.05, 26.03, 26.01, 22.71, 14.14.

### Synthesis of D-PSM-2′-O—C16 lipid-5′-ODMTr-Uridine amidite

[chemical structure]

[2343] Nucleoside, 2′-O—C16 lipid-5′-ODMTr-Uridine (WV-NU-301, 5.17 g) was converted to D-PSM-2′-O—C16 lipid-5′-ODMTr-Uridine amidite by general procedure (4.80 g, 68% yield) as an off-white solid.

[2344] LCMS: C₅₈H₇₆N₃O₁₁P₂S (M−H⁻). 1052.52

[2345] ¹H NMR (600 MHz, CDCl₃) δ 8.23 (s, 1H), 8.09 (d, J=8.2 Hz, 1H), 7.93-7.89 (m, 2H), 7.68-7.63 (m, 1H), 7.55 (t, J=7.9 Hz, 2H), 7.39-7.36 (m, 2H), 7.33-7.23 (m, 11H), 6.86-6.82 (m, 4H), 5.91 (d, J=1.9 Hz, 1H), 5.22 (d, J=8.2 Hz, 1H), 5.11 (q, J=6.2 Hz, 1H), 4.66 (dd J=9.4, 7.7, 4.7 Hz, 1H), 4.22 (dt, J=7.8, 2.3 Hz, 1H), 3.90 (dd, J=4.8, 1.9 Hz, 1H), 3.80 (d, J=2.2 Hz, 6H), 3.76-3.71 (m, 1H), 3.67 (dd, J=15.7, 9.3, 6.2 Hz, 2H), 3.60 (dd, J=11.3, 2.2 Hz, 1H), 3.52-3.32 (m, 4H), 3.17-3.10 (m, 1H), 1.93-1.74 (m, 2H), 1.70-1.63 (m, 1H), 1.63-1.56 (m, 2H), 1.39-1.31 (m, 2H), 1.31-1.21 (m, 26H), 1.13 (dd, J=11.5, 10.1, 8.3 Hz, 1H), 0.88 (t, J=7.0 Hz, 3H).

[2346] ³¹P NMR (243 MHz, CDCl₃) δ 156.17.

[2347] 13C NMR (151 MHz, CDCl₃) δ 162.86, 158.77, 158.73, 149.77, 144.21, 140.23, 139.66, 135.11, 134.95, 134.06, 130.30, 130.27, 129.38, 128.26, 128.08, 128.02, 127.21, 113.30, 113.27, 101.86, 88.00, 87.09, 81.85, 81.59, 73.98, 73.92, 70.93, 69.18, 66.13, 60.30, 58.12, 58.09, 55.27, 46.62, 46.39, 31.94, 29.81, 29.73, 29.70, 29.68, 29.57, 29.38, 27.37, 26.11, 26.04, 26.02, 22.71, 14.14.

### Synthesis of 5′-(R)—C-Me-5′-ODMTr-2′OMe-A(Bz)-D-PSM

[chemical structure]

[2348] Nucleoside 5′-(R)—C-Me-5′-ODMTr-2′OMe-A(Bz) (6.38 g) was converted to 5′-(R)—C-Me-5′-ODMTr-2′OMe-A(Bz)-D-PSM-amidite by general procedure (6.1 g, 72.9% yield) as an off-white solid.

[2349] LCMS: C₅₂H₅₃N₆O₁₀P₂S (M−H⁻). 983.81

[2350] ¹H NMR (600 MHz, CDCl₃) δ 8.96 (s, 1H), 8.66 (s, 1H), 8.00 (d, J=7.5 Hz, 2H), 7.98-7.94 (m, 2H), 7.90 (s, 1H), 7.60 (d, J=11.4 Hz, 2H), 7.52 (s, 6H), 7.44-7.38 (m, 4H), 7.26 (s, 3H), 7.21 (s, 1H), 6.83 (s, 4H), 5.96 (d, J=7.1 Hz, 1H), 5.23 (d, J=6.6 Hz, 1H), 4.76 (d, J=16.3 Hz, 1H), 4.34 (d, J=11.7 Hz, 1H), 3.77 (s, 7H), 3.75-3.57 (m, 3H), 3.52 (s, 1H), 3.43 (d, J=14.5 Hz, 1H), 3.31 (d, J=8.8 Hz, 1H), 3.18 (s, 3H), 1.89 (d, J=52.7 Hz, 3H), 1.67 (s, 1H), 1.17 (s, 1H), 0.92 (s, 3H).

[2351] ³¹P NMR (243 MHz, CDCl₃) δ 156.98.

[2352] ¹³C NMR (151 MHz, CDCl₃) δ 164.64, 158.70, 152.53, 151.80, 149.55, 143.05, 139.61, 136.86, 136.84, 134.11, 133.78, 132.90, 130.59, 129.43, 129.00, 128.58, 128.37, 127.91, 127.82, 126.99, 113.17, 113.14, 88.44, 86.72, 86.61, 80.33, 73.72, 73.66, 71.46, 71.36, 69.59, 66.22, 66.20, 60.50, 58.50, 58.28, 58.26, 55.35, 47.04, 46.80, 27.46, 26.27, 21.23-21.10 (m), 18.41, 14.31.

### Synthesis of 5′-(S)—C-Me-5′-ODMTr-2′OMe-A(Bz)-D-PSM

[chemical structure]

[2353] Nucleoside 5′-(S)—C-Me-5′-ODMTr-2′OMe-A(Bz) (2.24 g) was converted to 5′-(S)—C-Me-5′-ODMTr-2′OMe-A(Bz)-D-PSM-amidite by general procedure (2.47 g, 78.6% yield) as an off-white solid.

[2354] LCMS: C₅₂H₅₃N₆O₁₀P₂S (M−H⁻). 983.24

[2355] ¹H NMR (600 MHz, CDCl₃) δ 9.02-8.99 (m, 1H), 8.79 (s, 1H), 8.28 (s, 1H), 8.05-8.01 (m, 2H), 7.97-7.91 (m, 2H), 7.64-7.57 (m, 2H), 7.56-7.49 (m, 6H), 7.40 (t, J=8.6 Hz, 4H), 7.24 (dd, J=8.4, 6.9 Hz, 2H), 7.22-7.15 (m, 1H), 6.83-6.75 (m, 4H), 6.06 (d, J=6.3 Hz, 1H), 5.12 (q, J=6.2 Hz, 1H), 4.77-4.68 (m, 2H), 4.11 (q, J=7.1 Hz, 1H), 4.03 (t, J=3.4 Hz, 1H), 3.78 (d, J=5.0 Hz, 5H), 3.78-3.69 (m, 1H), 3.72-3.65 (m, 1H), 3.51 (dd, J=14.5, 6.8 Hz, 1H), 3.48-3.36 (m, 2H), 3.33 (s, 3H), 3.14 (tdd, J=10.1, 8.8, 3.9 Hz, 1H), 2.04 (s, 2H), 1.91-1.83 (m, 1H), 1.78 (td, J=11.8, 7.5 Hz, 1H), 1.70-1.62 (m, 1H), 1.25 (t, J=7.1 Hz, 2H), 1.16-1.07 (m, 1H), 0.93 (d, J=6.4 Hz, 3H).

[2356] ³¹P NMR (243 MHz, CDCl₃) δ 155.82.

[2357] ¹³C NMR (151 MHz, CDCl₃) δ 158.69, 158.64, 149.68, 146.15, 142.65, 139.62, 136.85, 136.52, 134.16, 133.84, 132.93, 130.75, 130.62, 129.47, 129.04, 128.57, 128.37, 127.98, 127.78, 126.94, 123.97, 113.11, 113.09, 88.02, 87.99, 86.92, 86.08, 81.46, 81.44, 73.98, 73.92, 70.62, 70.53, 69.30, 66.24, 66.22, 60.53, 58.48, 58.33, 58.30, 55.36, 46.92, 46.68, 27.48, 26.21, 26.18, 21.19, 17.67, 14.34.

### Synthesis of 2′O-C16-U-L-PSM

[chemical structure]

[2358] Nucleoside 2′O-C16-U (4.11 g) was converted to 2′O-C16-U-L-PSM-amidite by general procedure (1.21 g, 23% yield) as an off-white solid.

[2359] LCMS: C₅₈H₇₆N₃O₁₁P₂S (M−H⁻): 1052.34

[2360] ¹H NMR (600 MHz, CDCl₃) δ 8.98 (s, 1H), 7.52 (ddt, J=8.2, 6.4, 1.6 Hz, 4H), 7.35 (dddd, J=13.7, 8.3, 7.0, 3.9 Hz, 6H), 7.24 (d, J=8.2 Hz, 1H), 6.82 (ddd, J=22.1, 17.2, 4.9 Hz, 1H), 6.01 (ddd, J=18.9, 17.2, 1.7 Hz, 1H), 5.82 (d, J=2.5 Hz, 1H), 5.75 (d, J=8.2 Hz, 1H), 4.89 (td, J=7.5, 5.3 Hz, 1H), 4.59-4.53 (m, 1H), 4.16-4.04 (m, 5H), 3.67 (dd, J=5.1, 2.5 Hz, 1H), 3.53 (ddt, J=14.8, 10.6, 7.6 Hz, 1H), 3.40 (ddt, J=9.5, 7.2, 5.4 Hz, 1H), 3.26 (s, 3H), 3.17 (tdd, J=10.8, 8.8, 4.3 Hz, 1H), 1.87-1.78 (m, 1H), 1.67 (dd, J=14.6, 7.2 Hz, 2H), 1.49 (dd, J=14.5, 7.8 Hz, 1H), 1.33 (q, J=7.0 Hz, 7H), 1.27-1.18 (m, 2H), 0.65 (s, 3H).

[2361] ³¹P NMR (243 MHz, CDCl₃) δ 155.06.

[2362] ¹³C NMR (151 MHz, CDCl₃) δ 162.78, 158.79, 158.75, 149.89, 144.34, 140.27, 139.47, 135.17, 135.04, 133.99, 130.28, 130.20, 129.31, 128.23, 128.12, 128.04, 127.23, 113.33, 102.05, 87.58, 87.18, 82.71, 82.68, 81.49, 74.48, 74.41, 71.14, 70.35, 70.27, 66.20, 66.18, 61.56, 58.12, 58.09, 55.28, 46.56, 46.33, 31.94, 29.72, 29.70, 29.68, 29.66, 29.53, 29.38, 27.34, 26.05, 26.03, 26.01, 22.71, 14.14.

### Synthesis of 2′O-C16-U-D-PSM

[chemical structure]

[2363] Nucleoside 2′O—C16-U (5.17 g) was converted to 2′O—C16-U-D-PSM-amidite by general procedure (4.80 g, 68% yield) as an off-white solid.

[2364] LCMS: C₅₈H₇₆N₃O₁₁P₂S (M−H⁻): 1052.52

[2365] ¹H NMR (600 MHz, CDCl₃) δ 8.23 (s, 1H), 8.09 (d, J=8.2 Hz, 1H), 7.93-7.89 (m, 2H), 7.68-7.63 (m, 1H), 7.55 (t, J=7.9 Hz, 2H), 7.39-7.36 (m, 2H), 7.33-7.23 (m, 11H), 6.86-6.82 (m, 4H), 5.91 (d, J=1.9 Hz, 1H), 5.22 (d, J=8.2 Hz, 1H), 5.11 (q, J=6.2 Hz, 1H), 4.66 (ddd, J=9.4, 7.7, 4.7 Hz, 1H), 4.22 (dt, J=7.8, 2.3 Hz, 1H), 3.90 (dd, J=4.8, 1.9 Hz, 1H), 3.80 (d, J=2.2 Hz, 6H), 3.76-3.71 (m, 1H), 3.67 (ddt, J=15.7, 9.3, 6.2 Hz, 2H), 3.60 (dd, J=11.3, 2.2 Hz, 1H), 3.52-3.32 (m, 4H), 3.17-3.10 (m, 1H), 1.93-1.74 (m, 2H), 1.70-1.63 (m, 1H), 1.63-1.56 (m, 2H), 1.39-1.31 (m, 2H), 1.31-1.21 (m, 26H), 1.13 (dtd, J=11.5, 10.1, 8.3 Hz, 1H), 0.88 (t, J=7.0 Hz, 3H).

[2366] ³¹P NMR (243 MHz, CDCl₃) δ 156.17.

[2367] ¹³C NMR (151 MHz, CDCl₃) δ 162.86, 158.77, 158.73, 149.77, 144.21, 140.23, 139.66, 135.11, 134.95, 134.06, 130.30, 130.27, 129.38, 128.26, 128.08, 128.02, 127.21, 113.30, 113.27, 101.86, 88.00, 87.09, 81.85, 81.59, 73.98, 73.92, 70.93, 69.18, 66.13, 60.30, 58.12, 58.09, 55.27, 46.62, 46.39, 31.94, 29.81, 29.73, 29.70, 29.68, 29.57, 29.38, 27.37, 26.11, 26.04, 26.02, 22.71, 14.14.

### Example 44: Synthesis of Stereorandom CNE Amidite

### General Procedure for Synthesis of Stereorandom CNE Amidite

[2368] Nucleosides (1.0 eq.) in an appropriate size three necked flask was azeotroped with anhydrous toluene (15 mL/g) and anhydrous acetonitrile (15 mL/g) and was dried for 24 hours on high vacuum. To the flask was added anhydrous acetonitrile (0.1 M solution) under argon at room temperature. To the reaction mixture was added 5-ethylsulfanyl-1H-tetrazole (1.0 eq.) followed by dropwise addition of 3-bis(diisopropylamino)phosphanyloxypropanenitrile (1.2-1.5 eq.) over the period of 5-10 min. The reaction progress was monitored by HPLC. After disappearance of starting material, the reaction mixture was filtered through fritted glass tube. Reaction flask and precipitate was washed with anhydrous THF. Obtained filtrate was collected and solvent was removed under reduced pressure. The residue was purified by column chromatography (SiO2, 0-100% Ethyl acetate in Hexanes with 5% triethyl amine) to give the corresponding stereorandom CNE or nucleoside CNE amidite as off-white solid.

### Synthesis of 2′-OMe-5′-triazole-PO(OEt)₂-3′-CNE Uridine Amidite

[chemical structure]

[2369] Nucleoside, 2‘—OMe’-5′-triazole-PO(OEt)₂-U (WV-NU-306, 1.81 g) was converted to 2′-OMe-5′-triazole-PO(OEt)₂-3′-CNE Uridine amidite by general procedure (1.82 g, 73% yield) as an off-white solid.

[2370] LCMS: C₂₅H₄₁N₇O₉P₂(M−H⁻): 644.50

[2371] ¹H NMR (600 MHz, CDCl₃) δ 8.92 (s, 1H), 8.19 (s, 1H), 8.16 (s, 1H), 6.91 (d, J=8.1 Hz, 1H), 6.88 (d, J=8.1 Hz, 1H), 5.71 (d, J=8.1 Hz, 1H), 5.68 (d, J=8.1 Hz, 1H), 5.63 (d, J=3.6 Hz, 1H), 5.58 (d, J=3.6 Hz, 1H), 4.94 (dd, J=14.6, 3.1 Hz, 1H), 4.83 (dd, J=14.5, 3.2 Hz, 1H), 4.76 (dd, J=14.6, 6.2 Hz, 1H), 4.69 (dd, J=14.5, 6.8 Hz, 1H), 4.45 (td, J=6.3, 3.1 Hz, 1H), 4.40 (td, J=6.6, 3.2 Hz, 1H), 4.34 (dd, J=14.2, 9.7, 5.8 Hz, 2H), 4.27-4.14 (m, 8H), 4.11 (dd, J=5.4, 3.6 Hz, 1H), 3.97 (dd, J=5.4, 3.7 Hz, 1H), 3.95-3.90 (m, 2H), 3.81 (dd, J=10.4, 8.1, 6.1 Hz, 1H), 3.75-3.69 (m, 1H), 3.69-3.60 (m, 4H), 3.50 (s, 3H), 3.47 (s, 2H), 2.84-2.61 (m, 4H), 1.35 (tq, J=7.8, 3.7 Hz, 12H), 1.27 (dd, J=8.2, 6.8 Hz, 2H), 1.23-1.16 (m, 24H).

[2372] ³¹P NMR (243 MHz, CDCl₃) δ 150.53, 150.42, 14.17, 6.59, 6.54.

[2373] ¹³C NMR (151 MHz, CDCl₃) δ 162.66, 149.82, 141.50, 140.92, 138.48, 136.90, 132.51, 132.33, 132.11, 118.15, 117.80, 103.11, 102.97, 92.77, 91.68, 81.21, 81.19, 80.93, 80.89, 80.85, 80.78, 71.63, 71.36, 71.27, 63.15, 63.11, 58.82, 58.75, 58.55, 58.43, 57.65, 57.52, 50.90, 50.59, 43.45, 43.36, 24.72, 24.70, 24.67, 24.65, 24.62, 24.56, 20.46, 20.41, 16.32, 16.28, 16.25.

### Synthesis of 2′-O—C16 lipid-5′-ODMTr-3′-CNE Uridine Amidite

[chemical structure]

[2374] Nucleoside, 2′-O—C16 lipid-5′-ODMTr-Uridine (WV-NU-301, 4.81 g) was converted to 2′-O—C16 lipid-5′-ODMTr-3′-CNE Uridine amidite by general procedure (4.10 g, 68% yield) as an off-white solid.

[2375] LCMS: C₅₈H₇₆N₃O₁₁P₂S (M−H⁻). 1052.52

[2376] ¹H NMR (600 MHz, CDCl₃) δ 8.23 (s, 1H), 8.01 (dd, J=53.9, 8.2 Hz, 1H), 7.39 (dd, J=21.3, 7.7 Hz, 2H), 7.30 (h, J=4.9 Hz, 4H), 7.26 (s, 6H), 6.84 (s, 4H), 5.95 (dd, J=25.5, 2.6 Hz, 1H), 5.21 (t, J=8.2 Hz, 1H), 4.60-4.42 (m, 1H), 4.28-4.18 (m, 1H), 4.00 (ddd, J=12.8, 4.9, 2.5 Hz, 1H), 3.95-3.88 (m, 1H), 3.80 (d, J=3.3 Hz, 6H), 3.78-3.64 (m, 2H), 3.63-3.53 (m, 4H), 3.45 (ddd, J=17.9, 11.1, 2.5 Hz, 1H), 2.63 (q, J=6.4 Hz, 1H), 2.42 (t, J=6.3 Hz, 1H), 1.60 (dhept, J=13.8, 7.1 Hz, 2H), 1.25 (s, 25H), 1.17 (s, 8H), 1.05 (s, 3H), 0.88 (s, 3H).

[2377] ³¹P NMR (243 MHz, CDCl₃) δ 150.12.

[2378] ¹³C NMR (151 MHz, CDCl₃) δ 162.95, 162.88, 158.77, 158.74, 140.22, 140.14, 135.26, 135.07, 130.32, 130.30, 130.27, 128.33, 128.29, 127.99, 127.98, 127.23, 113.26, 113.25, 113.23, 102.02, 101.90, 88.17, 87.98, 87.14, 86.96, 82.39, 82.36, 82.16, 82.10, 81.36, 71.19, 70.95, 69.84, 69.74, 61.44, 60.82, 58.56, 58.44, 57.99, 57.86, 55.28, 55.26, 43.34, 43.26, 43.24, 43.16, 31.94, 29.86, 29.84, 29.72, 29.68, 29.66, 29.62, 29.58, 29.54, 29.38, 26.07, 26.06, 24.71, 24.67, 24.62, 24.59, 24.54, 22.71, 20.50, 20.46, 20.32, 20.28, 14.14.

### Synthesis of 5′-(R)—C-Me-5′-ODMTr-2′OMe-A(Bz)-CNE

[chemical structure]

[2379] Nucleoside 5′-(R)—C-Me-5′-ODMTr-2′OMe-A(Bz) (2.1 g) was converted to 5′-(R)—C-Me-5′-ODMTr-2′OMe-A(Bz)-CNE-amidite by general procedure (2.16 g, 85.6% yield) as an off-white solid.

[2380] LCMS: C₄₉H₅₆N₇O₈P (M−H⁻). 900.79

[2381] ¹H NMR (600 MHz, CDCl₃) δ 8.90 (s, 1H), 8.69 (d, J=1.5 Hz, 1H), 8.03-7.97 (m, 2H), 7.86 (d, J=1.6 Hz, 1H), 7.63-7.58 (m, 1H), 7.52 (ddd, J=7.5, 4.2, 2.9 Hz, 4H), 7.44-7.38 (m, 4H), 7.30-7.26 (m, 2H), 7.23-7.18 (m, 1H), 6.85-6.79 (m, 4H), 5.99 (t, J=6.6 Hz, 1H), 4.72 (dddd, J=42.4, 10.6, 4.6, 2.6 Hz, 1H), 4.38 (td, J=6.9, 4.6 Hz, 1H), 4.25-4.15 (m, 1H), 3.92-3.79 (m, 2H), 3.78 (t, J=2.2 Hz, 6H), 3.71 (dtdd, J=27.3, 13.2, 6.3, 3.5 Hz, 3H), 3.31 (d, J=17.0 Hz, 3H), 2.66-2.48 (m, 2H), 1.26-1.21 (m, 13H), 0.89 (dd, J=7.9, 6.2 Hz, 3H).

[2382] ³¹P NMR (243 MHz, CDCl₃) δ 150.45, 149.14.

[2383] ¹³C NMR (151 MHz, CDCl₃) δ 164.60, 158.73, 158.70, 152.70, 152.67, 151.89, 149.56, 146.27, 142.63, 133.83, 132.93, 130.70, 130.67, 130.61, 130.59, 129.04, 128.62, 128.56, 127.92, 127.84, 127.01, 126.99, 123.79, 113.19, 113.15, 88.51, 88.45, 88.42, 86.96, 86.86, 86.79, 86.68, 81.02, 80.91, 71.23, 71.12, 69.73, 69.65, 60.53, 58.57, 58.49, 58.45, 58.07, 55.38, 55.37, 43.56, 43.48, 24.86, 24.80, 24.75, 21.19, 20.45, 20.41, 18.20, 17.98, 14.34.

### Synthesis of 5′-(R)—C-Me-5′-ODMTr-2′Fd-A(Bz)-CNE

[chemical structure]

[2384] Nucleoside 5′-(R)—C-Me-5′-ODMTr-2′Fd-A(Bz) (2.05 g) was converted to 5′-(R)—C-Me-5′-ODMTr-2′Fd-A(Bz)-CNE-amidite by general procedure (2.39 g, 90.4% yield) as an off-white solid.

[2385] LCMS: C₄₈H₅₃FN₇O₇P (M−H⁻). 888.66

[2386] ¹H NMR (600 MHz, CDCl₃) δ 8.97 (s, 1H), 8.68 (d, J=11.1 Hz, 1H), 8.05-7.98 (m, 2H), 7.63-7.58 (m, 1H), 7.55-7.43 (m, 3H), 7.40-7.31 (m, 3H), 7.27-7.15 (m, 2H), 6.83-6.74 (m, 3H), 6.20-6.13 (m, 1H), 4.16-4.07 (m, 1H), 3.95-3.79 (m, 1H), 3.77 (t, J=2.9 Hz, 4H), 3.75-3.57 (m, 2H), 2.62 (td, J=6.3, 1.5 Hz, 1H), 2.60-2.48 (m, 1H), 2.04 (s, 1H), 1.32-1.17 (m, 8H), 1.16 (d, J=6.8 Hz, 2H), 0.80 (d, J=6.4 Hz, 1H), 0.77 (d, J=6.3 Hz, 1H).

[2387] ³¹P NMR (243 MHz, CDCl₃) δ 150.82 (d, J=10.6 Hz), 149.71 (d, J=12.6 Hz).

[2388] ¹³C NMR (151 MHz, CDCl₃) δ 158.69, 158.67, 151.42, 151.34, 149.85, 146.07, 142.58, 136.79, 136.75, 136.73, 133.75, 133.72, 132.99, 132.97, 130.63, 130.62, 130.58, 130.55, 129.04, 128.55, 128.49, 127.98, 127.83, 127.79, 126.97, 126.91, 123.68, 117.65, 113.17, 113.15, 113.13, 87.70, 87.46, 87.24, 86.85, 86.81, 86.35, 86.32, 85.60, 85.56, 70.64, 70.58, 68.96, 68.82, 60.52, 58.85, 58.82, 58.73, 58.70, 55.37, 55.35, 43.58, 43.56, 43.50, 43.48, 24.89, 24.84, 24.81, 24.76, 24.71, 24.66, 24.62, 20.54, 20.50, 20.49, 20.44, 16.40, 16.38, 14.34.

### Synthesis of 5′-(R)—C-Me-5′-ODMTr-2′Fd-U-CNE

[chemical structure]

[2389] Nucleoside 5′-(R)—C-Me-5′-ODMTr-2′Fd-U (1.95 g) was converted to 5′-(R)—C-Me-5′-ODMTr-2′Fd-U-CNE-amidite by general procedure (782 mg, 29.6% yield) as an off-white solid.

[2390] LCMS: C₄₀H₄₈FN₄O₈P (M−H⁻). 761.46

[2391] ¹H NMR (600 MHz, CDCl₃) δ 8.33 (d, J=5.3 Hz, 1H), 7.48 (dt, J=8.2, 1.3 Hz, 2H), 7.43-7.33 (m, 4H), 7.31-7.23 (m, 2H), 7.23-7.17 (m, 1H), 6.86-6.79 (m, 4H), 5.93 (ddd, J=24.7, 17.0, 2.7 Hz, 1H), 5.14 (dq, J=8.3, 2.5 Hz, 1H), 5.12-5.03 (m, 1H), 4.89-4.75 (m, 1H), 4.12 (q, J=7.1 Hz, 1H), 4.01-3.89 (m, 2H), 3.91-3.71 (m, 5H), 3.79 (s, 2H), 3.71-3.62 (m, 3H), 2.67 (td, J=5.9, 1.5 Hz, 1H), 2.61 (t, J=6.2 Hz, 1H), 2.04 (s, 2H), 1.29-1.18 (m, 13H), 0.96 (dd, J=6.7, 3.4 Hz, 3H).

[2392] ³¹P NMR (243 MHz, CDCl₃) δ 150.55 (d, J=14.5 Hz), 150.28 (d, J=11.4 Hz).

[2393] ¹³C NMR (151 MHz, CDCl₃) δ 162.87, 158.83, 158.73, 149.98, 149.95, 146.41, 146.34, 140.70, 140.66, 136.30, 136.28, 136.20, 130.71, 130.67, 130.51, 128.27, 128.04, 127.08, 127.03, 117.90, 117.67, 113.39, 113.29, 102.66, 102.55, 93.52, 92.25, 88.31, 88.08, 87.30, 86.10, 86.07, 85.13, 85.08, 70.04, 69.19, 68.93, 60.57, 58.45, 58.36, 58.32, 58.23, 55.44, 55.42, 55.39, 43.68, 43.60, 43.57, 43.49, 24.92, 24.89, 24.84, 24.80, 24.75, 24.67, 24.62, 21.22, 20.69, 20.65, 20.63, 17.78, 17.67, 14.37.

### Synthesis of 5′-ODMTr-(S)-GNA-G(iBu)-CNE

[chemical structure]

[2394] Nucleoside 5′-ODMTr-(S)-GNA-G(iBu) (1.01 g) was converted to 5′-ODMTr-(S)-GNA-G(iBu)-CNE-amidite by general procedure (707 mg, 52.4% yield) as an off-white solid.

[2395] LCMS: C₄₂H₅₂N₇O₇P (M−H⁻): 796.63

[2396] ¹H NMR (600 MHz, CDCl₃) δ 11.85 (s, 1H), 7.44 (ddt, J=9.6, 6.3, 1.3 Hz, 2H), 7.32-7.28 (m, 4H), 7.28 (q, J=1.1 Hz, 1H), 7.27-7.24 (m, 2H), 7.23-7.19 (m, 1H), 6.80 (ddd, J=8.9, 3.8, 2.9 Hz, 4H), 4.37-4.24 (m, 2H), 3.78 (dd, J=2.6, 1.7 Hz, 6H), 3.64-3.52 (m, 3H), 3.16-3.05 (m, 2H), 2.69-2.57 (m, 1H), 2.52 (pd, J=6.9, 5.8 Hz, 1H), 2.49-2.44 (m, 1H), 2.00 (s, 3H), 1.23 (s, 1H), 1.23-1.19 (m, 5H), 1.16-1.12 (m, 9H), 1.11 (d, J=6.8 Hz, 3H).

[2397] ³¹P NMR (243 MHz, CDCl₃) δ 148.57, 148.47.

[2398] ¹³C NMR (151 MHz, CDCl₃) δ 178.37, 158.71, 155.69, 148.59, 147.03, 144.90, 140.04, 139.94, 135.98, 135.79, 130.18, 130.13, 130.09, 130.08, 128.19, 128.11, 128.00, 127.94, 127.07, 127.04, 121.04, 117.80, 113.31, 113.29, 113.23, 113.19, 86.44, 86.21, 71.17, 71.09, 63.71, 63.56, 57.50, 57.43, 57.37, 57.31, 55.40, 46.51, 45.77, 43.32, 43.27, 43.24, 43.19, 36.50, 36.34, 24.81, 24.77, 24.72, 24.67, 20.58, 20.53, 20.48, 19.07, 19.05, 2.03.

### Synthesis of 5′-ODMTr-(S)-GNA-T-CNE

[chemical structure]

[2399] Nucleoside 5′-ODMTr-(S)-GNA-T (1.19 g) was converted to 5′-ODMTr-(S)-GNA-T-CNE-amidite by general procedure (1.27 g, 76.3% yield) as an off-white solid.

[2400] LCMS: C₃₈H₄₇N₄O₇P (M−H⁻): 701.66

[2401] ¹H NMR (600 MHz, CDCl₃) δ 7.45 (ddd, J=8.2, 4.1, 1.3 Hz, 2H), 7.32 (tt, J=8.1, 3.3 Hz, 4H), 7.30-7.27 (m, 2H), 7.24-7.18 (m, 1H), 7.04 (dd, J=5.6, 1.4 Hz, 1H), 6.83 (ddd, J=11.0, 7.8, 1.7 Hz, 4H), 4.22 (tt, J=14.2, 4.5 Hz, 2H), 4.06 (dd, J=13.9, 4.7 Hz, 1H), 3.79 (d, J=5.4 Hz, 7H), 3.75-3.51 (m, 5H), 3.33-3.21 (m, 1H), 3.17 (ddd, J=31.9, 10.0, 4.8 Hz, 1H), 2.59 (q, J=6.2 Hz, 1H), 2.40 (t, J=6.4 Hz, 1H), 1.83 (dd, J=3.5, 1.2 Hz, 3H), 1.20-1.08 (m, 13H).

[2402] ³¹P NMR (243 MHz, CDCl₃) δ 149.61, 149.44.

[2403] ¹³C NMR (151 MHz, CDCl₃) δ 164.24, 164.17, 158.68, 150.94, 150.81, 144.76, 142.47, 142.40, 135.93, 130.20, 130.14, 130.13, 128.27, 128.20, 127.99, 127.02, 126.99, 117.58, 113.29, 113.26, 109.72, 86.34, 86.27, 71.23, 71.14, 70.55, 64.28, 64.04, 58.41, 58.27, 58.14, 55.37, 55.36, 51.81, 51.02, 43.39, 43.31, 43.23, 24.83, 24.78, 24.76, 24.73, 24.70, 24.67, 20.42, 20.38, 20.32, 20.27, 12.34.

### Synthesis of 5′-triazole-PO(OEt)₂-2′OMe-U-CNE

[chemical structure]

[2404] Nucleoside 5′-triazole-PO(OEt)₂-2′OMe-U (1.81 g) was converted to 5′-triazole-PO(OEt)₂-2′OMe-U-CNE-amidite by general procedure (1.82 g, 73% yield) as an off-white solid.

[2405] LCMS: C₂₅H₄₁N₇O₉P₂(M−H⁻): 644.50

[2406] ¹H NMR (600 MHz, CDCl₃) δ 8.92 (s, 1H), 8.19 (s, 1H), 8.16 (s, 1H), 6.91 (d, J=8.1 Hz, 1H), 6.88 (d, J=8.1 Hz, 1H), 5.71 (d, J=8.1 Hz, 1H), 5.68 (d, J=8.1 Hz, 1H), 5.63 (d, J=3.6 Hz, 1H), 5.58 (d, J=3.6 Hz, 1H), 4.94 (dd, J=14.6, 3.1 Hz, 1H), 4.83 (dd, J=14.5, 3.2 Hz, 1H), 4.76 (dd, J=14.6, 6.2 Hz, 1H), 4.69 (dd, J=14.5, 6.8 Hz, 1H), 4.45 (td, J=6.3, 3.1 Hz, 1H), 4.40 (td, J=6.6, 3.2 Hz, 1H), 4.34 (ddt, J=14.2, 9.7, 5.8 Hz, 2H), 4.27-4.14 (m, 8H), 4.11 (dd, J=5.4, 3.6 Hz, 1H), 3.97 (dd, J=5.4, 3.7 Hz, 1H), 3.95-3.90 (m, 2H), 3.81 (ddt, J=10.4, 8.1, 6.1 Hz, 1H), 3.75-3.69 (m, 1H), 3.69-3.60 (m, 4H), 3.50 (s, 3H), 3.47 (s, 2H), 2.84-2.61 (m, 4H), 1.35 (tq, J=7.8, 3.7 Hz, 12H), 1.27 (dd, J=8.2, 6.8 Hz, 2H), 1.23-1.16 (m, 24H).

[2407] ³¹P NMR (243 MHz, CDCl₃) δ 150.53, 150.42, 14.17, 6.59, 6.54.

[2408] ¹³C NMR (151 MHz, CDCl₃) δ 162.66, 149.82, 141.50, 140.92, 138.48, 136.90, 132.51, 132.33, 132.11, 118.15, 117.80, 103.11, 102.97, 92.77, 91.68, 81.21, 81.19, 80.93, 80.89, 80.85, 80.78, 71.63, 71.36, 71.27, 63.15, 63.11, 58.82, 58.75, 58.55, 58.43, 57.65, 57.52, 50.90, 50.59, 43.45, 43.36, 24.72, 24.70, 24.67, 24.65, 24.62, 24.56, 20.46, 20.41, 16.32, 16.28, 16.25.

### Synthesis of 2′O-C16-U-CNE

[chemical structure]

[2409] Nucleoside 2′O-C16-U (4.81 g) was converted to 2′O-C16-U-CNE-amidite by general procedure (4.10 g, 68% yield) as an off-white solid.

[2410] LCMS: C₅₈H₇₆N₃O₁₁P₂S (M−H⁻). 1052.52

[2411] ¹H NMR (600 MHz, CDCl₃) δ 8.23 (s, 1H), 8.01 (dd, J=53.9, 8.2 Hz, 1H), 7.39 (dd, J=21.3, 7.7 Hz, 2H), 7.30 (h, J=4.9 Hz, 4H), 7.26 (s, 6H), 6.84 (s, 4H), 5.95 (dd, J=25.5, 2.6 Hz, 1H), 5.21 (t, J=8.2 Hz, 1H), 4.60-4.42 (m, 1H), 4.28-4.18 (m, 1H), 4.00 (ddd, J=12.8, 4.9, 2.5 Hz, 1H), 3.95-3.88 (m, 1H), 3.80 (d, J=3.3 Hz, 6H), 3.78-3.64 (m, 2H), 3.63-3.53 (m, 4H), 3.45 (ddd, J=17.9, 11.1, 2.5 Hz, 1H), 2.63 (q, J=6.4 Hz, 1H), 2.42 (t, J=6.3 Hz, 1H), 1.60 (dhept, J=13.8, 7.1 Hz, 2H), 1.25 (s, 25H), 1.17 (s, 8H), 1.05 (s, 3H), 0.88 (s, 3H).

[2412] ³¹P NMR (243 MHz, CDCl₃) δ 150.12.

[2413] ¹³C NMR (151 MHz, CDCl₃) δ 162.95, 162.88, 158.77, 158.74, 140.22, 140.14, 135.26, 135.07, 130.32, 130.30, 130.27, 128.33, 128.29, 127.99, 127.98, 127.23, 113.26, 113.25, 113.23, 102.02, 101.90, 88.17, 87.98, 87.14, 86.96, 82.39, 82.36, 82.16, 82.10, 81.36, 71.19, 70.95, 69.84, 69.74, 61.44, 60.82, 58.56, 58.44, 57.99, 57.86, 55.28, 55.26, 43.34, 43.26, 43.24, 43.16, 31.94, 29.86, 29.84, 29.72, 29.68, 29.66, 29.62, 29.58, 29.54, 29.38, 26.07, 26.06, 24.71, 24.67, 24.62, 24.59, 24.54, 22.71, 20.50, 20.46, 20.32, 20.28, 14.14.

### Example 45: Experimental Procedure for Synthesis of 5′-Bis(Pivaloyloxymethyl)-Triazolyl Phosphonate-2′OMe-Uridine (WV-NU-332)

[chemical structure]

[2414] [(((1-(((2R,3R,4R,5R)-5-(2,4-dioxo-3,4-dihydropyrimidin-1(2H)-yl)-3-hydroxy-4-methoxytetrahydrofuran-2-yl)methyl)-1H-1,2,3-triazol-4-yl)phosphoryl)bis(oxy))bis(methylene) bis(2,2-dimethylpropanoate)].

[chemical structure]

[chemical structure]

### 1. Preparation of Compound 2C

[chemical structure]

[2415] To a solution of compound 1C (10 g, 69.21 mmol, 7.46 mL) in THF (100 mL) was added bromo(ethynyl)magnesium (0.5 M, 166.10 mL) under N₂. The mixture was stirred at 0-25° C. for 2 hr. TLC indicated compound 1C was consumed completely and one new spot formed. The reaction mixture was quenched by addition NH₄Cl 50 mL at 0° C., and then diluted with water 50 mL and extracted with EtOAc (100 mL*3). The combined organic layers were dried over Na₂SO₄, filtered, and concentrated under reduced pressure to give a residue. Without purification. Compound 2C (9 g, crude) was obtained as a yellow oil. TLC: Petroleum ether:Ethyl acetate=0:1, Rf=0.34

### 2. Preparation of Compound 5A

[chemical structure]

[2416] To a solution of compound 2C (9 g, 67.13 mmol) in ACN (200 mL) was added 4A MS (2 g, 67.13 mmol), iodomethyl 2,2-dimethylpropanoate (48.75 g, 201.39 mmol). The mixture was stirred at 82° C. for 10 hr. TLC indicated compound 2C was consumed completely and two new spots formed. The reaction mixture was filtered and concentrated under reduced pressure to give a residue. Compound 5A (5 g, 22.28% yield) was obtained as a colorless oil

[2417] ¹H NMR (400 MHz, CHLOROFORM-d) 6=5.72 (d, J=1.6 Hz, 2H), 5.69 (d, J=0.9 Hz, 2H), 3.03 (d, J=14.3 Hz, 1H), 1.22 (s, 18H)

[2418] ³¹P NMR (162 MHz, CHLOROFORM-d) δ=10.31 (s, 1P)

[2419] TLC: Petroleum ether:Ethyl acetate=3:1, Rf=0.38

### 3. Preparation of Compound 2

[chemical structure]

[2420] To a solution of compound 1 (50 g, 193.63 mmol) in THF (700 mL) was added imidazole (34.27 g, 503.43 mmol), I₂ (78.63 g, 309.80 mmol) and PPh₃ (81.26 g, 309.80 mmol) at 0° C. The mixture was stirred at 25° C. for 12 hr. LCMS showed compound 1 was consumed completely and the desired mass was detected. Four batches with together. The reaction was quenched by 10% aqueous sodium thiosulfate solution (500 ml). After removing the solvent and volatiles under reduced pressure, the residue was extracted into EtOAc (200 mL*3) and washed with saturated aqueous NaHCO₃ solution. The organic layer was separated, dried over anhydrous Na₂SO₄, filtered and concentrated. The residue was purified by column chromatography (SiO₂, Petroleum ether:Ethyl acetate=1:0 to 0:1). Compound 2 (270 g, 94.73% yield, together with four batches) was obtained as a white solid.

[2421] ¹H NMR (400 MHz, DMSO-d₆) δ=11.42 (s, 1H), 7.68 (d, J=8.0 Hz, 1H), 5.86 (d, J=5.4 Hz, 1H), 5.69 (d, J=8.0 Hz, 1H), 5.45 (d, J=6.0 Hz, 1H), 4.06-4.01 (m, 1H), 4.00-3.96 (m, 1H), 3.85 (td, J=5.0, 6.2 Hz, 1H), 3.55 (dd, J=5.4, 10.6 Hz, 1H), 3.40 (dd, J=6.9, 10.6 Hz, 1H), 3.34 (s, 3H)

[2422] LCMS (M+H+): 368.9

[2423] TLC: Petroleum ether:Ethyl acetate=0:1, R_{f}=0.5

### 4. Preparation of Compound 3

[chemical structure]

[2424] To a solution of compound 2 (10 g, 27.16 mmol) in DMF (100 mL) was added NaN₃ (1.86 g, 28.66 mmol) at 0° C. The mixture was stirred at 0-50° C. for 3 hr. LCMS showed compound 2 was consumed completely and the desired mass was detected. Six batches with together. The reaction was quenched by H₂O (1500 mL), and extracted with Ethyl acetate (500 mL*3). The combined organic layers were washed with saturated aqueous NaCl 100 mL, dried over Na₂SO₄, filtered and concentrated under reduced pressure to give a residue. The residue was purified by column chromatography (SiO₂, Petroleum ether:Ethyl acetate=1:0 to 0:1). The crude product was purified by re-crystallization from DCM (200 mL) at 25° C. Compound 3 (57 g, 93.44% yield, together with six batches) was obtained as a white solid.

[2425] ¹H NMR (400 MHz, DMSO-d₆) δ=11.41 (br s, 1H), 7.70 (d, J=8.0 Hz, 1H), 5.83 (d, J=4.9 Hz, 1H), 5.68 (d, J=8.0 Hz, 1H), 5.35 (br d, J=6.0 Hz, 1H), 4.07 (q, J=5.3 Hz, 1H), 3.95-3.89 (m, 2H), 3.61 (d, J=4.9 Hz, 2H), 3.36 (s, 3H)

[2426] LCMS: (M+H⁺): 284.0, LCMS purity: 100%

[2427] TLC: Petroleum ether:Ethyl acetate=0:1, Rf=0.45

### 5. Preparation of Compound WV-NU-332

[chemical structure]

[2428] To a solution of compound 3 (3 g, 10.59 mmol) and compound 5A (4.25 g, 12.71 mmol, 1.2 eq) in H₂O (10 mL) was degassed and purged with nitrogen for 3 times, sodium ascorbate (2.52 g, 12.71 mmol, 1.2 eq), diacetoxycopper (2.31 g, 12.71 mmol) was added. The mixture was stirred at 65° C. for 6 hr under N₂ atmosphere. TLC indicated compound 5A was consumed completely and one new spot formed. The reaction mixture was filtered and concentrated under reduced pressure to give a residue. The residue was purified by column chromatography (SiO₂, Petroleum ether:Ethyl acetate=15:1 to 0:1 to Ethyl acetate:MeCN=10:1 to 0:1 to Ethyl acetate:Methanol=8:1). Compound WV-NU-332 (2 g, 46.67% yield, 70% purity) was obtained as a white solid.

[2429] ¹H NMR (400 MHz, DMSO-d₆) δ=11.47-11.35 (m, 2H), 8.69 (s, 1H), 7.62 (d, J=8.1 Hz, 1H), 5.80 (d, J=5.0 Hz, 1H), 5.70 (s, 2H), 5.67 (s, 2H), 5.51 (d, J=5.8 Hz, 1H), 4.80 (d, J=3.8 Hz, 1H), 4.18-4.15 (m, 1H), 3.96-3.89 (m, 2H), 3.61 (d, J=4.8 Hz, 1H), 3.36 (s, 3H), 1.06 (s, 18H)

[2430] ³¹P NMR (162 MHz, DMSO-d₆) δ=7.08 (s, 1P)

[2431] LCMS: (M+H⁺):618.2, purity:70.8%

[2432] TLC: Petroleum ether:Ethyl acetate=0:1, R_{f}=0.06

### Example 46: Synthesis of 5′-DiethylTriazolyl Phosphonate-2′-OMe-Uridine (WV—NU-306)

[chemical structure]

[2433] Diethyl(1-(((2R,3R,4R,5R)-5-(2,4-dioxo-3,4-dihydropyrimidin-1(2H)-yl)-3-hydroxy-4-methoxytetrahydrofuran-2-yl)methyl)-1H-1,2,3-triazol-4-yl)phosphonate

[chemical structure]

### 1. Preparation of Compound 2A

[chemical structure]

[2434] To a solution compound 1A (10 g, 63.88 mmol) in THF (100 mL) was added bromo (ethynyl) magnesium (0.5 M, 124.75 mL) at 0° C. under N₂. The resulting mixture was stirred at 25° C. for 2 hr. TLC indicated compound 1A was consumed completely and two new spots formed. The reaction was clean according to TLC. Four batches with together. The reaction mixture was quenched by sat. aq. NH₄Cl (100 mL) at 0° C., then extracted with DCM (50 mL*3). The combined organic layers were dried over Na₂SO₄, filtered to get the crude. Compound 2A (37.34 g, crude, together with four batches) was obtained as a brown liquid and used into the next step without further purification. TLC: Petroleum ether:Ethyl acetate=2:1, R_{f}=0.25

### 2. Preparation of Compound 3A

[chemical structure]

[2435] To a solution of compound 2A (37 g, 253.21 mmol) in DCM (1000 mL) was added m-CPBA (102.82 g, 506.42 mmol, 85% purity) at 0° C. The mixture was stirred at 0-25° C. for 2 hr. TLC indicated compound 2A was consumed completely and one new spot formed. The reaction was clean according to TLC. Three batches with together. The reaction mixture was quenched by sat. aq. Na₂SO₃ (300 mL) and NaHCO₃ (300 mL), then extracted with DCM (200 mL*3). The combined organic layers were washed with brine (100 mL*2), dried over Na₂SO₄, filtered, and concentrated under reduced pressure to give a residue. The residue was purified by column chromatography (SiO₂, Petroleum ether: Ethyl acetate=1:0 to 0:1). Compound 3A (55 g, 44.66% yield, together with three batches) was obtained as a colorless oil.

[2436] ¹H NMR (400 MHz, CHLOROFORM-d) 6=4.16-4.07 (m, 4H), 2.97 (d, J=13.3 Hz, 1H), 1.31 (dt, J=0.7, 7.1 Hz, 6H)

[2437] ³¹P NMR (162 MHz, CHLOROFORM-d) 6=−8.43 (s, 1P)

[2438] TLC: Petroleum ether:Ethyl acetate=1:1, R_{f}=0.4

### 3. Preparation of Compound 2

[chemical structure]

[2439] To a solution of compound 1 (50 g, 193.63 mmol) in THF (700 mL) was added imidazole (34.27 g, 503.43 mmol), I₂ (78.63 g, 309.80 mmol) and PPh₃ (81.26 g, 309.80 mmol) at 0° C. The mixture was stirred at 25° C. for 12 hr. LCMS showed compound 1 was consumed completely and the desired mass was detected. Four batches with together. The reaction was quenched by 10% aqueous sodium thiosulfate solution (500 ml). After removing the solvent and volatiles under reduced pressure, the residue was extracted into EtOAc (200 mL*3) and washed with saturated aqueous NaHCO₃ solution. The organic layer was separated, dried over anhydrous Na₂SO₄, filtered and concentrated. The residue was purified by column chromatography (SiO₂, Petroleum ether:Ethyl acetate=1:0 to 0:1). Compound 2 (270 g, 94.73% yield, together with four batches) was obtained as a white solid.

[2440] ¹H NMR (400 MHz, DMSO-d₆) δ=11.42 (s, 1H), 7.68 (d, J=8.0 Hz, 1H), 5.86 (d, J=5.4 Hz, 1H), 5.69 (d, J=8.0 Hz, 1H), 5.45 (d, J=6.0 Hz, 1H), 4.06-4.01 (m, 1H), 4.00-3.96 (m, 1H), 3.85 (td, J=5.0, 6.2 Hz, 1H), 3.55 (dd, J=5.4, 10.6 Hz, 1H), 3.40 (dd, J=6.9, 10.6 Hz, 1H), 3.34 (s, 3H)

[2441] LCMS (M+H+): 368.9

[2442] TLC: Petroleum ether:Ethyl acetate=0:1, R_{f}=0.5

### 4. Preparation of Compound 3

[chemical structure]

[2443] To a solution of compound 2 (10 g, 27.16 mmol) in DMF (100 mL) was added NaN₃ (1.86 g, 28.66 mmol) at 0° C. The mixture was stirred at 0-50° C. for 3 hr. LCMS showed compound 2 was consumed completely and the desired mass was detected. Six batches with together. The reaction was quenched by H₂O (1500 mL), and extracted with Ethyl acetate (500 mL*3). The combined organic layers were washed with saturated aqueous NaCl 100 mL, dried over Na₂SO₄, filtered and concentrated under reduced pressure to give a residue. The residue was purified by column chromatography (SiO₂, Petroleum ether: Ethyl acetate=1:0 to 0:1). The crude product was purified by re-crystallization from DCM (200 mL) at 25° C. Compound 3 (57 g, 93.44% yield, together with six batches) was obtained as a white solid.

[2444] ¹H NMR (400 MHz, DMSO-d₆) δ=11.41 (br s, 1H), 7.70 (d, J=8.0 Hz, 1H), 5.83 (d, J=4.9 Hz, 1H), 5.68 (d, J=8.0 Hz, 1H), 5.35 (br d, J=6.0 Hz, 1H), 4.07 (q, J=5.3 Hz, 1H), 3.95-3.89 (m, 2H), 3.61 (d, J=4.9 Hz, 2H), 3.36 (s, 3H)

[2445] LCMS: (M+H⁺): 284.0, LCMS purity: 100% TLC: Petroleum ether:Ethyl acetate=0:1, R_{f}=0.45

### 5. Preparation of WV-NU-306

[chemical structure]

[2446] To a solution of compound 3 (9.31 g, 57.42 mmol) and compound 3A (9.31 g, 57.42 mmol) in THF (140 mL) was degassed and purged with N₂ for 3 times, then DIEA (12.69 g, 98.15 mmol), CuI (18.69 g, 98.15 mmol) was added. The mixture was stirred at 25° C. for 4 hr under N₂ atmosphere. LCMS showed compound 3 was consumed completely and the desired mass was detected. Two batches with together. The reaction mixture was concentrated under reduced pressure to give product. The residue was purified by column chromatography (SiO₂, Petroleum ether:Acetonitrile=1:0 to 0:1 to Dichloromethane:Methanol=1:0 to 0:1). Compound WV-NU-306 (56 g, 62.92% yield, together with two batches) was obtained as a yellow solid.

### Batch 2 (46.43 g):

[2447] ¹H NMR (400 MHz, CHLOROFORM-d) 6=9.79 (br s, 1H), 8.27 (s, 1H), 7.03 (d, J=8.0 Hz, 1H), 5.72 (d, J=8.0 Hz, 1H), 5.62 (d, J=2.4 Hz, 1H), 4.96-4.70 (m, 2H), 4.30-4.12 (m, 6H), 3.97 (dd, J=2.4, 4.9 Hz, 1H), 3.55 (s, 3H), 3.48 (s, 1H), 1.35 (t, J=7.0 Hz, 6H)

[2448] ³¹P NMR (162 MHz, CHLOROFORM-d) δ=6.69 (s, 1P)

[2449] LCMS (M+H⁺):446.1, purity: 97.42%; TLC: DCM:MeOH=10:1, R_{f}=0.65

### Batch 3 (9.22 g):

[2450] ¹H NMR (400 MHz, CHLOROFORM-d) 6=9.54 (s, 1H), 8.27 (s, 1H), 7.01 (d, J=8.0 Hz, 1H), 5.73 (dd, J=1.6, 8.0 Hz, 1H), 5.62 (d, J=2.3 Hz, 1H), 4.95-4.88 (m, 1H), 4.75 (dd, J=5.6, 14.4 Hz, 1H), 4.30-4.15 (m, 6H), 3.97 (dd, J=2.2, 4.8 Hz, 1H), 3.56 (s, 3H), 3.52 (br d, J=6.6 Hz, 1H), 1.36 (t, J=7.0 Hz, 6H)

[2451] ³¹P NMR (162 MHz, CHLOROFORM-d) δ=6.64 (s, 1P)

[2452] LCMS (M+H⁺): 446.1, purity: 93.76%

[2453] TLC: DCM:MeOH=10:1, R_{f}=0.65

### Example 47: Synthesis of 5′-Bis(2-cyanoethyl)-Triazolyl Phosphonate-2′-OMe-Uridine (WV-NU-336)

[chemical structure]

[2454] Bis(2-cyanoethyl) (1-(((2R,3R,4R,5R)-5-(2,4-dioxo-3,4-dihydropyrimidin-1(2H)-yl)-3-hydroxy-4-methoxytetrahydrofuran-2-yl)methyl)-1H-1,2,3-triazol-4-yl)phosphonate

[chemical structure]

[chemical structure]

### 1. Preparation of Compound 3B

[chemical structure]

[2455] To a solution of PCl₃ (35 g, 254.86 mmol) in THF (1000 mL) was added TEA (51.58 g, 509.71 mmol, 70.95 mL) and 3-hydroxypropanenitrile (36.23 g, 509.71 mmol, 34.67 mL). The mixture was stirred at 25° C. for 2 hr. TLC indicated compound 1B was consumed completely and one new spot formed. The reaction mixture was, filtered and concentrated under reduced pressure to give a residue. Without purification. Compound 3B (44 g, 83.58% yield) was obtained as a colorless oil.

[2456] TLC: Petroleum ether:Ethyl acetate=0:1, Rf=0.12

### 2. Preparation of Compound 4B

[chemical structure]

[2457] To a solution of compound 3B (10 g, 48.41 mmol) in THF (100 mL) was added bromo(ethynyl)magnesium (0.5 M, 116.19 mL) at 0° C. The mixture was stirred at 0-25° C. for 5 hr. TLC indicated compound 3B was consumed completely and two new spots formed. The reaction mixture was quenched by addition NH₄Cl 50 mL at 0° C., and then diluted with water 100 mL and extracted with EtOAc (100 mL*3). The combined organic layers were dried over Na₂SO₄, filtered, and concentrated under reduced pressure to give a residue. Compound 4B (6 g, 63.19% yield) was obtained as a yellow oil.

[2458] ¹H NMR (400 MHz, CHLOROFORM-d) 6=4.17-4.09 (m, 4H), 3.19 (d, J=2.1 Hz, 1H), 2.67 (t, J=6.1 Hz, 4H)

[2459] ³¹P NMR (162 MHz, CHLOROFORM-d) 6=132.04 (s, 1P)

### For the Scale Up Batch:

[2460] To a solution of compound 3B (44 g, 213.01 mmol) in THF (1000 mL) was added bromo(ethynyl)magnesium (0.5 M, 511.22 mL) at 0° C. The mixture was stirred at 0-25° C. for 3 hr. TLC indicated compound 3B was consumed completely and two new spots formed. The reaction mixture was quenched by sat. NH₄Cl (200 mL) at 0° C., then extracted with DCM (500 mL*3). The combined organic layers were dried over Na₂SO₄, filtered to get the crude. No purification. Compound 4B (40 g, crude) was obtained as a yellow oil.

[2461] TLC: Petroleum ether:Ethyl acetate=1:1, Rf=0.39

### 3. Preparation of Compound 5B

[chemical structure]

[2462] To a solution of compound 4B (40 g, 203.93 mmol) in DCM (1000 mL) was added mCPBA (62.10 g, 305.90 mmol, 85% purity). The mixture was stirred at 0-25° C. for 2 hr. TLC indicated compound 4B was consumed completely and one new spot formed. The reaction mixture was quenched by sat. Na₂SO₃ (2000 mL) and NaHCO₃ (2000 mL), then extracted with DCM (1000 mL*2). The combined organic layers were washed with brine (500 ml), dried over Na₂SO₄, filtered, and concentrated under reduced pressure to give a residue. The residue was purified by column chromatography (SiO₂, Petroleum ether:Ethyl acetate=10:1 to 0:1). Compound 5 B (13 g, 30.05% yield) was obtained as a yellow oil.

[2463] ¹H NMR (400 MHz, CHLOROFORM-d) 6=4.37-4.29 (m, 4H), 3.16 (dd, J=1.3, 13.9 Hz, 1H), 2.81 (t, J=6.1 Hz, 4H)

[2464] ³¹P NMR (162 MHz, CHLOROFORM-d) δ=−8.61 (s, 1P)

[2465] TLC: Petroleum ether:Ethyl acetate=1:1, R_{f}=0.23

### 4. Preparation of Compound 2

[chemical structure]

[2466] To a solution of compound 1 (50 g, 193.63 mmol) in THF (700 mL) was added imidazole (34.27 g, 503.43 mmol), 1₂ (78.63 g, 309.80 mmol) and PPh₃ (81.26 g, 309.80 mmol) at 0° C. The mixture was stirred at 25° C. for 12 hr. LCMS showed compound 1 was consumed completely and the desired mass was detected. Four batches with together. The reaction was quenched by 10% aqueous sodium thiosulfate solution (500 ml). After removing the solvent and volatiles under reduced pressure, the residue was extracted into EtOAc (200 mL*3) and washed with saturated aqueous NaHCO₃ solution. The organic layer was separated, dried over anhydrous Na₂SO₄, filtered and concentrated. The residue was purified by column chromatography (SiO₂, Petroleum ether:Ethyl acetate=1:0 to 0:1). Compound 2 (270 g, 94.73% yield, together with four batches) was obtained as a white solid.

[2467] ¹H NMR (400 MHz, DMSO-d₆) δ=11.42 (s, 1H), 7.68 (d, J=8.0 Hz, 1H), 5.86 (d, J=5.4 Hz, 1H), 5.69 (d, J=8.0 Hz, 1H), 5.45 (d, J=6.0 Hz, 1H), 4.06-4.01 (m, 1H), 4.00-3.96 (m, 1H), 3.85 (td, J=5.0, 6.2 Hz, 1H), 3.55 (dd, J=5.4, 10.6 Hz, 1H), 3.40 (dd, J=6.9, 10.6 Hz, 1H), 3.34 (s, 3H)

[2468] LCMS (M+H+): 368.9

[2469] TLC: Petroleum ether:Ethyl acetate=0:1, Rf=0.5

### 5. Preparation of Compound 3

[chemical structure]

[2470] For six batches. To a solution of compound 2 (10 g, 27.16 mmol) in DMF (100 mL) was added NaN₃ (1.86 g, 28.66 mmol) at 0° C. The mixture was stirred at 0-50° C. for 3 hr. LCMS showed compound 2 was consumed completely and the desired mass was detected. Six batches with together. The reaction was quenched by H₂O (1500 mL), and extracted with Ethyl acetate (500 mL*3). The combined organic layers were washed with saturated aqueous NaCl 100 mL, dried over Na₂SO₄, filtered and concentrated under reduced pressure to give a residue. The residue was purified by column chromatography (SiO₂, Petroleum ether:Ethyl acetate=1:0 to 0:1). The crude product was purified by re-crystallization from DCM (200 mL) at 25° C. Compound 3 (57 g, 93.44% yield) was obtained as a white solid.

[2471] ¹H NMR (400 MHz, DMSO-d₆) δ=11.41 (br s, 1H), 7.70 (d, J=8.0 Hz, 1H), 5.83 (d, J=4.9 Hz, 1H), 5.68 (d, J=8.0 Hz, 1H), 5.35 (br d, J=6.0 Hz, 1H), 4.07 (q, J=5.3 Hz, 1H), 3.95-3.89 (m, 2H), 3.61 (d, J=4.9 Hz, 2H), 3.36 (s, 3H)

[2472] LCMS: (M+H⁺): 284.0, LCMS purity: 100%

[2473] TLC: Petroleum ether:Ethyl acetate=0:1, Rf=0.45

### 6. Preparation of Compound WV-NU-336

[chemical structure]

[2474] To a solution of compound 3 (5 g, 17.65 mmol) and compound 5B (4.49 g, 21.18 mmol) in THF (10 mL) and H₂O (10 mL) was degassed and purged with N₂ for 3 times, then CuSO₄·5H₂O (5.29 g, 21.18 mmol), sodium ascorbate (4.20 g, 21.18 mmol) was added. The mixture was stirred at 65° C. for 10 hr under N₂ atmosphere. LCMS showed compound 3 was consumed completely and desired mass was detected. The reaction mixture was filtered and concentrated under reduced pressure to give a residue. The residue was purified by column chromatography (SiO₂, Petroleum ether:Ethyl acetate=10:1 to 0:1, Ethyl acetate MeCN=8:1 to 0:1). Compound WV-NU-336 (5.3 g, 60.61% yield) was obtained as a white solid.

[2475] ¹H NMR (400 MHz, DMSO-d₆) δ=11.40 (d, J=1.6 Hz, 1H), 8.72 (s, 1H), 7.60 (d, J=8.0 Hz, 1H), 5.79 (d, J=4.8 Hz, 1H), 5.66 (dd, J=2.1, 8.0 Hz, 1H), 5.50 (d, J=6.1 Hz, 1H), 4.87-4.73 (m, 2H), 4.32-4.17 (m, 5H), 4.14 (q, J=5.5 Hz, 1H), 3.93 (t, J=5.0 Hz, 1H), 3.36 (s, 3H), 2.95 (t, J=5.9 Hz, 4H)

[2476] ³¹P NMR (162 MHz, DMSO-d6) δ=7.72 (s, 1P)

[2477] LCMS (M+H⁺): 496.1, purity: 93.49%

[2478] TLC: Dichloromethane:Methanol=8:1, Rf=0.13

### Example 48: Synthesis of Conjugated Free Amine Oligonucleotide Lipid/Ligands

### General Procedure for Free Amine Oligonucleotide Lipid/Ligand Conjugation

[2479] A stock solution of 5′-amino oligo (SSR-0106564) was made by dissolving in 2:1 DMSO/water (1 mg/15 μL). A stock solution of HATU was made by dissolving in NMP (1 mg/50 μL). To a solution of conjugate in NMP (0.075M) was added DIPEA (2.5 eq.) and HATU (0.75 eq.). The ligand mixture was stirred at room temperature for 30 minutes. The conjugate solution (4 eq.) was added into the solution of SSR-0106564 (1 eq.). The reaction mixture was stirred at room temperature and monitored by UPLC-MS. After disappearance of starting material, reaction mixture purified by HPLC.

### Example 49: Synthesis of D-DPSE and L-DPSE Amidites

### General Procedure for Synthesis of D-DPSE and L-DPSE Amidites

[2480] Nucleosides (1.0 eq.) in an appropriate size three necked flask was azeotroped with anhydrous toluene (15 mL/g) and anhydrous acetonitrile (15 mL/g) and was dried for 24 hours on high vacuum. To the flask was added anhydrous THF (0.2 M solution) under argon and solution was cooled to −5° C. To the reaction mixture was added triethyl amine (5.0 eq.) followed by addition of D-DPSE-Cl (1.25 M) or L-DPSE-Cl (0.9M) solution (1.8-2.2 eq.) over the period of 5-10 min. The reaction mixture was warmed to room temperature and reaction progress was monitored by HPLC. After disappearance of starting material, the reaction mixture was filtered through fritted glass tube. Reaction flask and precipitate was washed with anhydrous THF. Obtained filtrate was collected and solvent was removed under reduced pressure. The residue was purified by column chromatography (SiO2, 40-100% Ethyl acetate in Hexanes with 5% triethyl amine) to give NU-D-DPSE or NU-L-DPSE Amidite as off-white solid.

### Synthesis of 5′-triazole-PO(OEt)₂-2′OMe-U-L-DPSE

[chemical structure]

[2481] Nucleoside 5′-triazole-PO(OEt)₂-2′OMe-U (3.12 g) was converted to 5′-triazole-PO(OEt)₂-2′OMe-U-L-DPSE-amidite by general procedure (3.18 g, 60% yield) as an off-white solid.

[2482] LCMS: C₃₅H₄₆N₆O₉P₂Si (M−H⁻): 783.36

[2483] ¹H NMR (600 MHz, CDCl₃) δ 8.70 (s, 1H), 8.07 (s, 1H), 7.54 (d, J=7.6 Hz, 2H), 7.50 (d, J=7.7 Hz, 2H), 7.32 (s, 7H), 6.82 (d, J=8.1 Hz, 1H), 5.70 (d, J=8.1 Hz, 1H), 5.37 (d, J=3.1 Hz, 1H), 4.92 (d, J=8.3 Hz, 1H), 4.61 (dd, J=14.6, 2.9 Hz, 1H), 4.44 (s, 2H), 4.20 (s, 5H), 3.79 (d, J=2.4 Hz, 1H), 3.59 (dd, J=7.0, 3.4 Hz, 1H), 3.50 (d, J=2.8 Hz, 1H), 3.38 (s, 3H), 3.21 (dd, J=9.0, 4.4 Hz, 1H), 1.89 (dd, J=8.1, 3.5 Hz, 1H), 1.75 (d, J=9.6 Hz, 1H), 1.65 (dd, J=14.7, 8.5 Hz, 1H), 1.47 (d, J=6.2 Hz, 2H), 1.36 (d, J=5.0 Hz, 6H), 0.67 (s, 3H).

[2484] ³¹P NMR (243 MHz, CDCl₃) δ 152.69, 6.72

[2485] ¹³C NMR (151 MHz, CDCl₃) δ 162.85, 149.56, 141.88, 136.59, 135.94, 134.57, 134.36, 132.29, 129.49, 129.43, 127.99, 127.94, 102.90, 93.49, 81.01, 80.59, 79.58, 77.11, 76.90, 76.69, 70.73, 70.67, 67.90, 63.12, 63.08, 58.93, 50.34, 46.74, 46.51, 27.26, 27.21, 25.93, 25.91, 17.75, 16.32, 16.28, −3.35, −3.39.

### Synthesis of 5′-triazole-PO(OEt)₂-2′OMe-U-D-DPSE

[chemical structure]

[2486] Nucleoside 5′-triazole-PO(OEt)₂-2′OMe-U (3.11 g) was converted to 5′-triazole-PO(OEt)₂-2′OMe-U-D-DPSE-amidite by general procedure (3.35 g, 63% yield) as an off-white solid.

[2487] LCMS: C₃₅H₄₆N₆O₉P₂Si (M−H⁻): 783.36

[2488] ¹H NMR (600 MHz, CDCl₃) δ 9.33 (s, 1H), 8.10 (s, 1H), 7.53 (ddt, J=17.2, 6.5, 1.6 Hz, 4H), 7.33 (dtdd, J=11.0, 8.5, 3.9, 1.9 Hz, 6H), 6.82 (d, J=8.1 Hz, 1H), 5.70 (d, J=8.1 Hz, 1H), 5.47 (d, J=3.3 Hz, 1H), 4.92 (td, J=7.4, 5.4 Hz, 1H), 4.70 (dd, J=14.5, 3.1 Hz, 1H), 4.45 (dd, J=14.6, 6.8 Hz, 1H), 4.37 (ddd, J=9.4, 6.7, 5.6 Hz, 1H), 4.30-4.15 (m, 5H), 3.85 (dd, J=5.6, 3.4 Hz, 1H), 3.59 (ddt, J=14.5, 10.6, 7.5 Hz, 1H), 3.50-3.44 (m, 1H), 3.26 (s, 3H), 3.17 (tdd, J=10.8, 8.7, 4.6 Hz, 1H), 1.85 (dtq, J=12.4, 8.1, 3.6 Hz, 1H), 1.71 (dtd, J=15.0, 8.3, 4.5 Hz, 1H), 1.56 (ddd, J=88.8, 14.6, 7.5 Hz, 2H), 1.45-1.37 (m, 1H), 1.35 (td, J=7.0, 5.7 Hz, 6H), 1.29 (dt, J=9.8, 8.2 Hz, 1H), 0.67 (s, 3H).

[2489] ³¹P NMR (243 MHz, CDCl₃) δ 154.12, 6.58

[2490] ¹³C NMR (151 MHz, CDCl₃) δ 162.90, 149.72, 141.36, 136.44, 136.05, 134.61, 134.45, 132.33, 132.11, 129.53, 129.48, 127.99, 127.96, 102.96, 92.53, 81.07, 81.06, 80.62, 80.59, 79.60, 79.53, 70.72, 70.65, 67.50, 67.48, 63.16, 63.12, 58.58, 50.50, 46.93, 46.69, 27.15, 26.02, 26.00, 17.92, 17.89, 16.33, 16.31, 16.29, 16.27, −3.27.

### Synthesis of 5′-vinyl-PO(OEt)₂-2′OMe-U-L-DPSE

[chemical structure]

[2491] Nucleoside 5′-vinyl-PO(OEt)₂-2′OMe-U (2.45 g) was converted to 5′-vinyl-PO(OEt)₂-2′OMe-U-L-DPSE-amidite by general procedure (2.58 g, 56% yield) as an off-white solid.

[2492] LCMS: C₃₄H₄₅N₃O₉P₂Si (M−H⁻). 728.48

[2493] ¹H NMR (600 MHz, CDCl₃) δ 8.47 (s, 1H), 7.55-7.50 (m, 4H), 7.40-7.31 (m, 6H), 7.18 (d, J=8.1 Hz, 1H), 6.79 (ddd, J=22.0, 17.2, 4.7 Hz, 1H), 5.99 (ddd, J=19.1, 17.2, 1.7 Hz, 1H), 5.76-5.73 (m, 2H), 4.86 (dt, J=8.1, 6.2 Hz, 1H), 4.43 (dddd, J=6.4, 4.7, 3.1, 1.8 Hz, 1H), 4.26 (ddd, J=8.8, 6.4, 5.2 Hz, 1H), 4.14-4.06 (m, 4H), 3.73 (dd, J=5.2, 3.7 Hz, 1H), 3.54 (dddd, J=14.6, 10.6, 8.1, 6.9 Hz, 1H), 3.41 (s, 4H), 3.18 (tdd, J=10.8, 8.8, 4.5 Hz, 1H), 1.85 (dtq, J=12.4, 8.1, 4.1, 3.5 Hz, 1H), 1.73-1.61 (m, 2H), 1.46 (dd, J=14.6, 6.6 Hz, 1H), 1.43-1.36 (m, 1H), 1.33 (td, J=7.1, 4.7 Hz, 6H), 1.28-1.22 (m, 1H), 0.66 (s, 3H).

[2494] ³¹P NMR (243 MHz, CDCl₃) δ 152.97, 16.88

[2495] ¹³C NMR (151 MHz, CDCl₃) δ 162.70, 149.59, 146.68, 146.65, 140.33, 136.48, 135.99, 134.54, 134.39, 129.56, 129.49, 128.01, 127.97, 120.08, 118.84, 102.79, 90.28, 81.72, 81.70, 79.58, 79.51, 73.20, 73.14, 67.73, 67.71, 62.06, 62.02, 61.99, 58.72, 58.71, 46.66, 46.42, 27.17, 25.93, 25.91, 17.80, 17.77, 16.46, 16.41, −3.38.

### Synthesis of 5′-vinyl-PO(OEt)₂-2′OMe-U-D-DPSE

[chemical structure]

[2496] Nucleoside 5′-vinyl-PO(OEt)₂-2′OMe-U (5.39 g) was converted to 5′-vinyl-PO(OEt)₂-2′OMe-U-D-DPSE-amidite by general procedure (8.60 g, 85% yield) as an off-white solid.

[2497] LCMS: C₃₄H₄₅N₃O₉P₂Si (M−H⁻): 728.29

[2498] ¹H NMR (600 MHz, CDCl₃) δ 8.98 (s, 1H), 7.52 (ddt, J=8.2, 6.4, 1.6 Hz, 4H), 7.35 (dddd, J=13.7, 8.3, 7.0, 3.9 Hz, 6H), 7.24 (d, J=8.2 Hz, 1H), 6.82 (ddd, J=22.1, 17.2, 4.9 Hz, 1H), 6.01 (ddd, J=18.9, 17.2, 1.7 Hz, 1H), 5.82 (d, J=2.5 Hz, 1H), 5.75 (d, J=8.2 Hz, 1H), 4.89 (td, J=7.5, 5.3 Hz, 1H), 4.59-4.53 (m, 1H), 4.16-4.04 (m, 5H), 3.67 (dd, J=5.1, 2.5 Hz, 1H), 3.53 (ddt, J=14.8, 10.6, 7.6 Hz, 1H), 3.40 (ddt, J=9.5, 7.2, 5.4 Hz, 1H), 3.26 (s, 3H), 3.17 (tdd, J=10.8, 8.8, 4.3 Hz, 1H), 1.87-1.78 (m, 1H), 1.67 (dd, J=14.6, 7.2 Hz, 2H), 1.49 (dd, J=14.5, 7.8 Hz, 1H), 1.33 (q, J=7.0 Hz, 7H), 1.27-1.18 (m, 2H), 0.65 (s, 3H).

[2499] ³¹P NMR (243 MHz, CDCl₃) δ 152.43, 16.64

[2500] ¹³C NMR (151 MHz, CDCl₃) δ 161.50, 148.55, 145.48, 145.44, 138.46, 135.24, 134.98, 133.51, 133.41, 128.59, 128.52, 127.00, 126.96, 119.66, 118.41, 101.69, 88.59, 81.37, 77.98, 77.92, 72.29, 72.20, 66.40, 66.38, 61.05, 61.01, 57.44, 45.86, 45.63, 25.95, 24.86, 24.84, 16.92, 16.89, 15.41, 15.37, −4.41.

### Example 50: Synthesis and Analysis of Homo-DNA and Amidite PNs

### General Structure for Sugar and Base Modifications

[chemical structure]

### Synthesis of WV-NU-223

[chemical structure]

[chemical structure]

[2501] 1. Preparation of Compound 2

[chemical structure]

[2502] BORON TRIFLUORIDE DIETHYL ETHERATE (22.16 g, 156.11 mmol) was added to a solution of Compound 1 (50 g, 183.65 mmol) in MeOH (12.95 g, 404.04 mmol, 16.35 mL, 2.2 eq.) and Tol. (600 mL) at 0° C. The mixture was stirred at 20° C. for 6.5 hrs. TLC indicated compound 1 was consumed completely and two new spots formed. The reaction was clean according to TLC. The solution was cooled to 0° C., and quenched with Et₃N (20.45 mL), after maintaining for 10 min at 0° C., Na₂CO₃ (19.45 g) was added to the solution. The filtrate was concentrated to give a residue, which was purified by silica gel column chromatography (SiO₂, Petroleum ether/Ethyl acetate=100/1 to 1/1, with 1.0 vol % Et₃N). Compound 2 (44 g, 98.09% yield) was obtained as a colorless oil.

[2503] ¹H NMR (CHLOROFORM-d, 400 MHz): δ=5.73-5.87 (m, 2H), 5.25 (dd, J=9.7, 1.5 Hz, 1H), 4.86 (s, 1H), 4.13-4.25 (m, 2H), 3.93-4.03 (m, 1H), 3.39 (s, 3H), 2.04 (s, 3H), 2.02 ppm (s, 4H)

[2504] TLC (Petroleum ether:Ethyl acetate=5:1) Rf=0.23

### 2. Preparation of Compound 3

[chemical structure]

[2505] To a solution of compound 2 (44 g, 180.15 mmol) in EtOAc (400 mL) was added Pd/C (0.07 mg, 180.15 mmol, 10% purity). The mixture was stirred at 25° C. for 18 hrs under H₂ (15 Psi) atmosphere. TLC indicated compound 2 was consumed completely and one new spot formed. The reaction was clean according to TLC. The insoluble material was removed by filtration through a pad of celite. The pad was washed with EtOAc (100 mL). The filtrate was concentrated. The residue was purified by column chromatography (SiO₂, Petroleum ether/Ethyl acetate=100/1 to 0/1). Compound 3 (43 g, 96.93% yield) was obtained as a colorless oil.

[2506] ¹H NMR (CHLOROFORM-d, 400 MHz): δ=4.67-4.80 (m, 2H), 4.22-4.31 (m, 1H), 4.11 (dd, J=11.9, 2.3 Hz, 1H), 3.90 (ddd, J=10.0, 5.3, 2.3 Hz, 1H), 3.37 (s, 3H), 2.09 (s, 3H), 2.04-2.06 (m, 3H), 1.81-2.02 ppm (m, 4H)

[2507] TLC: (Petroleum ether:Ethyl acetate=5:1) R_{f}=0.30

### 3. Preparation of Compound 4

[chemical structure]

[2508] To a solution of compound 1A (37.44 g, 244.46 mmol) in MeCN (500 mL) was added BSA (71.04 g, 349.23 mmol, 86.32 mL) and compound 3 (43 g, 174.61 mmol) and SnCl₄ (68.24 g, 261.92 mmol, 30.60 mL). The mixture was stirred at 45° C. for 2 hr. TLC indicated compound 1A was consumed completely and two new spot formed. The reaction was clean according to TLC. The reaction mixture was partitioned between H₂O (200 mL) and EtOAc (500 mL). The organic phase was separated, washed with brine 30 mL, dried over Na₂SO₄, filtered and concentrated under reduced pressure to give a residue. The residue was purified by column chromatography (SiO₂, Petroleum ether/Ethyl acetate=100/1 to 0/1). Compound 4 (34 g, crude) was obtained as a yellow oil.

[2509] ¹H NMR (DMSO-d₆, 400 MHz): δ=9.77 (br s, 1H), 8.70 (br s, 1H), 8.05 (d, J=7.9 Hz, 1H), 7.31 (br s, 1H), 6.68 (br s, 1H), 6.11-6.21 (m, 1H), 5.71-5.83 (m, 1H), 4.67 (td, J=10.2, 4.6 Hz, 1H), 4.03-4.14 (m, 2H), 2.14 (dt, J=7.8, 4.0 Hz, 1H), 2.03 (d, J=7.4 Hz, 6H), 1.81-1.95 ppm (m, 3H)

[2510] TLC (Ethyl acetate:Dichloromethane=10:1) Rf=0.46

### 4. Preparation of Compound 4A

[chemical structure]

[2511] To a solution of compound 4 (24 g, 65.33 mmol) in MeOH (5 mL) was added CH₃ONa (10.59 g, 196.00 mmol). The mixture was stirred at 15° C. for 12 hr. HPLC showed compound 4 was consumed completely and one main peak with desired mass was detected. The filter liquor was concentrated in vacuo. The crude product was purified by reverse-phase HPLC (0.1% FA condition). Compound 4A (13 g, 82.48% yield) was obtained as a white solid.

### 5. Preparation of Compound 5A

[chemical structure]

[2512] To a solution of compound 4A (13 g, 53.89 mmol) in pyridine (200 mL) was added DMT-Cl (18.26 g, 53.89 mmol). The mixture was stirred at 25° C. for 6 hr. LCMS showed compound 4A was consumed completely and one main peak with desired m/z. The reaction mixture was partitioned between H₂O (500 mL) and EtOAc (1000 mL). The organic phase was separated, washed with brine (50 mL), dried over Na₂SO₄, filtered and concentrated under reduced pressure to give a residue. The residue was purified by column chromatography (SiO₂, Dichloromethane: Methanol=100/1 to 0/1). Compound 5A (13 g, 44.38% yield) was obtained as a white solid.

[2513] LCMS: (M−H⁺)=542

[2514] TLC (Dichloromethane:Methanol=10:1), R_{f}=0.33

### 6. Preparation of WV-NU-223

[2515] (N-(1-((2R,5S,6R)-6-((bis(4-methoxyphenyl)(phenyl)methoxy)methyl)-5-hydroxytetrahydro-2H-pyran-2-yl)-2-oxo-1,2-dihydropyrimidin-4-yl)acetamide).

[chemical structure]

[2516] To a solution of compound 5A (13 g, 23.91 mmol) in Pyr. (130 mL) was added Ac₂O (2.44 g, 23.91 mmol, 2.24 mL). The mixture was stirred at 25° C. for 12 hr. TLC (Petroleum ether:Ethyl acetate=0:1) indicated compound 5A was consumed completely and one new spot formed. The reaction was clean according to TLC. The mixture was concentrated in vacuum. The residue was purified by column chromatography (SiO₂, Petroleum ether/Ethyl acetate=100/1 to 0/1). Compound WV-NU-223 (7.7 g, 52.78% yield, 96% purity) was obtained as a white solid.

[2517] ¹H NMR (DMSO-d₆, 400 MHz): δ=10.93 (s, 1H), 8.12 (d, J=7.5 Hz, 1H), 7.40 (br d, J=7.4 Hz, 2H), 7.14-7.34 (m, 8H), 6.79-6.91 (m, 4H), 5.73 (br d, J=10.4 Hz, 1H), 4.89 (d, J=6.1 Hz, 1H), 3.73 (s, 6H), 3.59-3.66 (m, 1H), 3.26 (br d, J=9.4 Hz, 1H), 3.15 (br dd, J=10.0, 6.7 Hz, 1H), 2.12 (s, 3H), 1.93 (br d, J=10.2 Hz, 2H), 1.53-1.72 ppm (m, 2H)

[2518] LCMS=(M−H⁺)=585.6

[2519] TLC (Petroleum ether:Ethyl acetate=0:1), R_{f}=0.43

### Synthesis of WV-NU-286

[chemical structure]

[chemical structure]

### 1. Preparation of Compound 2

[chemical structure]

[2520] For 4 batches: A mixture of compound 1 (50 g, 183.65 mmol), 5-methyl-2-trimethylsilyloxy-2,3-dihydro-1H-pyrimidin-4-one (44.15 g, 220.39 mmol), TMSOTf (40.00 g, 179.98 mmol) in ACN (200 mL) was degassed and purged with N₂ for 3 times, and then the mixture was stirred at 25° C. for 5 hr under N₂ atmosphere. TLC indicated compound 1 was consumed completely and two new spots formed. The reaction mixture was combined and concentrated under reduced pressure to remove ACN. The residue was diluted with H₂O 2000 mL and extracted with EtOAc (1000 mL*2). The combined organic layers were washed with NaCl 500 mL, dried over Na₂SO₄, filtered and concentrated under reduced pressure to give a residue. The residue was purified by column chromatography (SiO₂, Petroleum ether/Ethyl acetate=1/0 to 0/1) to get compound 1 (120 g, 50.00% yield) was obtained as a yellow oil.

[2521] TLC (Petroleum ether:Ethyl acetate=0:1), Rf1=0.57, Rf2=0.49

### 2. Preparation of Compound 3

[chemical structure]

[2522] For 3 batches: A mixture of compound 2 (27 g, 79.81 mmol), Pd/C (5 g, 10% purity) in EtOAc (300 mL) was degassed and purged with H₂ for 3 times, and then the mixture was stirred at 20° C. for 10 hr under H₂ atmosphere. LCMS showed compound 2 was consumed completely and desired mass was detected. The reaction mixture was combined and filtered, the filtrate concentrated under reduced pressure to give a residue to get compound 3 (78 g, crude) was obtained as a colorless oil.

[2523] ¹HNMR (400 MHz, DMSO-d₆) δ=11.36 (s, 1H), 7.65 (d, J=1.1 Hz, 1H), 5.73 (dd, J=1.9, 10.8 Hz, 1H), 4.67 (dt, J=4.6, 10.3 Hz, 1H), 4.08 (d, J=4.0 Hz, 2H), 3.91 (td, J=4.0, 9.8 Hz, 1H), 2.16-2.05 (m, 2H), 2.03 (s, 3H), 2.01 (s, 3H), 1.84-1.72 (m, 5H)

[2524] LCMS (M+H+): 341.2

### 3. Preparation of Compound 4

[chemical structure]

[2525] For three batches: To a solution of compound 3 (26 g, 76.40 mmol, 1 eq) was added NH₃/MeOH (7 M, 500 mL). The mixture was stirred at 25° C. for 10 hr. LCMS showed compound 3 was consumed completely and one main peak with desired mass was detected. The reaction mixture was concentrated under reduced pressure to get the crude. The residue was purified by column chromatography (SiO₂, DCM/MeOH=20/0 to 10/1). Compound 4 (15 g, 94.38% yield) was obtained as a white solid.

[2526] LCMS (M+H⁺): 257.2

[2527] TLC (DCM/MeOH=10:1), Rf=0.3

### 4. Preparation of Compound WV-NU-286

[chemical structure]

[2528] For 2 batches: To a solution of compound 4 (27 g, 105.36 mmol) in Py (700 mL) was added DMTCl (42.84 g, 126.44 mmol). The mixture was stirred at 25° C. for 6 hr. LCMS showed compound 4 was consumed completely and one main peak with desired mass was detected. The reaction mixture was concentrated under reduced pressure to remove pyridine. The residue was purified by column chromatography (SiO₂, Petroleum ether/Ethyl acetate=1/0 to 0/1, 5% TEA). WV-NU-286 (62.64 g, 38.5% yield) was obtained as a yellow solid.

[2529] ¹HNMR (400 MHz, DMSO-d₆) δ=11.42-11.38 (m, 1H), 7.60 (s, 1H), 7.42-7.38 (m, 2H), 7.31-7.16 (m, 8H), 6.86-6.78 (m, 4H), 5.67-5.60 (m, 1H), 4.84 (d, J=6.0 Hz, 1H), 3.73-3.70 (m, 6H), 3.61-3.54 (m, 1H), 3.31-3.20 (m, 2H), 3.09 (br dd, J=6.7, 9.9 Hz, 1H), 1.89-1.80 (m, 4H), 1.76 (br d, J=11.3 Hz, 1H), 1.62-1.53 (m, 1H)

[2530] LCMS: (M−H+): 557.2, LCMS purity: 97.48% purity

[2531] TLC (Petroleum ether:Ethyl acetate=1:1), Rf=0.3

### Synthesis of WV-NU-287

[chemical structure]

[chemical structure]

### 1. Preparation of ((2R,3S)-3-acetoxy-6-(6-benzamido-9H-purin-9-yl)tetrahydro-2H-pyran-2-yl)methyl acetate (WV-NU-287-03)

[chemical structure]

[2532] To a stirred solution of N-(9H-purin-6-yl)benzamide (100 g, 0.416 mol)) in dry acetonitrile (3.2 L, 32 vol.) was added BSA (305 mL, 1.25 mol) dropwise over a period of 20 min. The resulting mixture was heated to 80° C. and kept for 3 h. Then the mass was allowed to rt and concentrated under vacuum to get a thick mass. The mass was again dissolved in dry acetonitrile (3.2 L) and (WV-NU-287-02) (102.5 g, 0.416 mol) was added followed by TMSOTf (75.8 mL, 0.416 mol) dropwise over a period of 40 min. The reaction mixture was stirred at 80° C. for 40 h. Progress of the reaction was monitored by TLC. The reaction mixture was concentrated under reduced pressure. The crude mass was dissolved in EtOAC (1 L), washed with sat. NaHCO₃ (250 mL×2), brine (250 mL×1), dried over Na₂SO₄ and concentrated under vacuum to afford as a light yellow solid. The solid was purified by column chromatography over silica gel (230-400 mesh) eluted in 3% MeOH/DCM to get a yellowish solid. (WV-NU-287-03) (57 g, 30% (isomeric mixture of α and β), TLC Mobile phase details: 7% MeOH in DCM. ¹H NMR (400 MHz, DMSO-d₆): δ in ppm=11.23 (s, 1H), 8.78 (d, 1H, J1=3.4 Hz), 8.74 (s, 1H), 8.05 (d, 2H, J1=7.3 Hz), 7.65 (m, 1H), 7.56 (m, 3H), 6.07 (dd, 1H, J1=6.9 Hz, J2=4.0 Hz), 4.81 (m, 1H), 4.07 (m, 3H), 2.64 (m, 1H), 2.21 (m, 2H), 2.07 (d, 3H, J1=3 Hz), 1.94 (m, 4H). MS: m z calcd for C₂₂H₂₃N₅O₆, 453.2; found 454.48. [M+H⁺].

### 2. Preparation of N-(9-((2R,5S,6R)-5-hydroxy-6-(hydroxymethyl)tetrahydro-2H-pyran-2-yl)-9H-purin-6-yl)benzamide (WV-NU-287-04)

[chemical structure]

[2533] Compound (WV-NU-287-03) (57 g, 0.1213 mol) was treated with a solution of (0.1 M) NaOMe in methanol (1.7 L, 30 vol.) at 0° C. and maintained for 2.5 h. Progress of the reaction was monitored by TLC. The reaction mixture was neutralized with acetic acid (PH=7.0) and mixture was concentrated under vacuum to get a solid. The solid mass was purified by column chromatography over silica gel (230-400 mesh) eluted in 8% MeOH/DCM as a white solid (45 g) (mixture of a and R isomer). The solid was dissolved in (methanol: water) (1:1) (10 vol.) and stirred at 60° C. for 20 min, a clear solution was observed, kept at rt for 20 h. A solid precipitate was observed which was filtered off and dried under vacuum to get an off white solid. (WV-NU-287-04) (16 g, almost 100% β-isomer). TLC Mobile phase details: 10% MeOH in DCM. ¹H NMR (500 MHz, DMSO-d₆): δ in ppm=11.2 (s, 1H), 8.77 (s, 1H), 8.71 (s, 1H), 8.05 (d, 2H, J1=7.3 Hz), 7.65 (m, 1H), 7.55 (m, 2H), 5.87 (m, 1H), 4.98 (d, 1H, J1=5.1 Hz), 4.58 (t, 1H, J1=6.0 Hz), 3.70 (dd, 1H, J1=10.9 Hz, J2=6.6 Hz), 3.46 (m, 3H), 2.43 (m, 1H), 2.12 (m, 2H), 1.69 (m, 1H). MS: m czalcd for C₁₈H₁₉N₅O₄, 369.4.

### 3. Preparation of N-(9-((2R,5S,6R)-6-((bis(4-methoxyphenyl)(phenyl)methoxy)methyl)-5-hydroxy tetrahydro-2H-pyran-2-yl)-9H-purin-6-yl)benzamide (WV-NU-287)

[chemical structure]

[2534] To a stirred solution of (WV-NU-287-04) (25 g, 0.06776 mol) in anhydrous Pyridine (750 mL, 30 vol.) was added Silver nitrate (1.13 g, 0.00677), DMTCl (25.18 g, 0.0745 mol) portion-wise over a period of 30 min at 0° C. Above reaction was stirred at for 16 h. Progress of the reaction was monitored by TLC. Then reaction was concentrated under vacuum to get crude mass. The crude dissolved in ethyl acetate (250 mL), washed with sat. NaHCO₃ (60 mL×2), brine solution (60 mL×1), dried over Na₂SO₄, concentrated and purified by column chromatography over silica gel (230-400 mesh) eluted in 3% EtOH/DCM to get as an off white solid (WV-NU-287) (29 g, 63%, almost 100% 0-isomer).. TLC Mobile phase details: 10% EtOH in DCM. ¹H NMR (400 MHz, DMSO-d₆): δ in ppm=11.24 (s, 1H), 8.81 (s, 1H), 8.71 (s, 1H), 8.05 (m, 2H), 7.65 (m, 1H), 7.55 (m, 2H), 7.36 (m, 2H), 7.19 (m, 7H), 6.75 (m, 4H), 5.96 (d, 1H, J1=9.8 Hz), 4.94 (d, 1H, J1=5.9 Hz), 3.73 (m, 1H), 3.69 (d, 6H, J1=8.7 Hz), 3.43 (m, 2H), 3.26 (d, 1H, J1=8.7 Hz), 3.05 (dd, 1H, J1=10.01 Hz, J2=6.8 Hz), 2.15 (d, 2H, J1=11.1 Hz), 1.71 (m, 1H), 1.19 (m, 1H), 1.06 (t, 1H, J1=6.9 Hz), MS: m czalcd for C₃₉H₃₇N₅O₆, 671.8; found 672.8 (M+H⁺).

### Synthesis of WV-NU-288

[chemical structure]

[chemical structure]

### 1. Preparation of ((2R,3S)-3-acetoxy-6-methoxy-3,6-dihydro-2H-pyran-2-yl)methylacetate (WV-NU-288-01)

[chemical structure]

[2535] To a stirred solution of tri-O-acetyl-D-glucal (300 g, 1.102 mol) and dry methanol (32.6 mL, 2.426 mol.) in dry toluene (3 L, 10 vol.) was added boron trifluoride-ether complex (108 mL, 0.882 mol) dropwise over a period of 50 mins with vigorous stirring at 0° C. The reaction was maintained for 5 h at 0° C. Progress of the reaction was monitored by TLC. Then reaction mixture was quenched with trimethylamine (120 mL) at 0° C. and maintained for 20 min. After that sodium carbonate (106 g) was added to the solution. Then the mass was filtered and filtrate was washed washed with EtOAC (200 mL×3) dried over Na₂SO₄and concentrated under vacuum to get gummy syrup (WV-NU-288-01) (320 g, crude). TLC Mobile phase details: 20% EtOAC in Hexane. ¹H NMR (400 MHz, CDCl₃): δ in ppm=5.92 (m, 2H), 5.32 (m, 1H, J1=9.7 Hz, J2=1.5 Hz), 4.93 (d, 1H, J1=0.7 Hz), 4.23 (m, 2H), 4.08 (m, 2H), 3.47 (d, 3H, J1=5.8 Hz), 2.10 (s, 6H).

### 2. Preparation of ((2R,3S)-3-acetoxy-6-methoxytetrahydro-2H-pyran-2-yl)methyl acetate (WV-NU-288-02)

[chemical structure]

[2536] A solution of (WV-NU-288-01) (330 g, 1.341 mol) in dry EtOAC (3.3 L, 10 vol.) was Flushed with Ar gas and 10% Pd/C (30.3 g, 10 mol wt./wt.)) was added at rt. The system was filled up with H₂ gas and stirred at rt, for 8 h. Progress of the reaction was monitored by TLC. After that reaction mass was filtered through celite washed with EtOAC (200 mL×3) and concentrated under vacuum to get gummy mass. The mass was purified by column chromatography over neutral silica gel (230-400 mesh) eluted in 20% EtOAC/Hexane to get as a light yellowish oil. (WV-NU-288-02) (132 g, 49% for 2 step). TLC Mobile phase details: 20% EtOAC in Hexane. ¹H NMR (400 MHz, CDCl₃): δ in ppm=4.73 (m, 2H), 4.27 (ddd, 1H, J1=12.0 Hz, J2=5.3 Hz, J3=3.1 Hz), 4.15 (m, 2H), 3.91 (dq, 1H, J1=5.1 Hz, J2=2.2 Hz), 3.47 (s, 3H), 2.09 (s, 4H), 2.04 (s, 4H), 1.98 (m, 1H), 1.82 (m, 3H).

### 3. Preparation of ((2R,3S)-3-acetoxy-6-(2-isobutyramido-6-oxo-1,6-dihydro-9H-purin-9-yl)tetrahydro-2H-pyran-2-yl)methyl acetate (WV-NU-288-03)

[chemical structure]

[2537] To a stirred solution of N-(6-oxo-6,9-dihydro-1H-purin-2-yl)isobutyramide (100 g, 0.452 mol)) in dry acetonitrile (5 L, 50 vol.), was added BSA (553 mL, 2.262 mol) dropwise over a period of 30 min. The resulting mixture was warmed to 90° C. for 24 h. Then reaction mass was allowed to cool to rt and concentrated under vacuum to get thick syrup, The mass was again dissolved in dry acetonitrile (5 L, 50 vol.) and (WV-NU-288-02) (111.2 g, 0.452 mol) was added followed by TMSOTf (83.2 mL, 0.452 mol) dropwise over a period of 40 min. Then reaction mixture was stirred at 90° C. for 50 h. Progress of the reaction was monitored by TLC. The reaction mixture concentrated under reduced pressure. The crude mass was dissolved in EtOAC (1 L), washed with sat. NaHCO₃ (250 mL×2), brine (200 mL×1), dried over Na₂SO₄ and concentrated under vacuum to afford as a yellowish solid. The solid was purified by column chromatography over silica gel (230-400 mesh) eluted in 3% MeOH/DCM to get as a light yellow solid (45 g, mixture of isomers). The solid was dissolved EtOAc (10 vol.), stirred for 6 h and filter-off, solid was washed with EtOAc (30 ml×2) to get pale yellow solid (WV-NU-288-03) (18.2 g, almost 100% β-isomer).), TLC Mobile phase details: 7% MeOH in DCM. ¹H NMR (400 MHz, DMSO-d₆): δ in ppm=12.14 (s, 1H), 11.72 (s, 1H), 8.25 (s, 1H), 5.68 (dd, 1H, J1=11.3 Hz, J2=2.1 Hz), 4.73 (m, 1H), 4.10 (m, 2H), 3.90 (ddd, 1H, J1=9.8 Hz, J1=5.4 Hz, J1=2.5 Hz), 2.80 (m, 1H), 2.56 (m, 1H), 2.23 (m, 1H), 2.09 (m, 1H), 2.05 (s, 3H), 1.99 (s, 3H), 1.81 (m, 1H,), 1.26 (m, 1H), 1.12 (m, 6H). MS: m z calcd for C₁₉H₂₅N₅O₇, 435.4; found 434.22. [M−H⁺].

### 4. Preparation of N-(9-((2R,5S,6R)-5-hydroxy-6-(hydroxymethyl)tetrahydro-2H-pyran-2-yl)-6-oxo-6,9-dihydro-1H-purin-2-yl)isobutyramide (WV-NU-288-04)

[chemical structure]

[2538] Compound (WV-NU-288-03) (50 g, 0.1149 mol) was treated with a solution of 0.1 M NaOMe in methanol (750 mL, 30 vol.) at 0° C. and maintained for 2 h. Progress of the reaction was monitored by TLC. The reaction mixture was neutralized with acetic acid (pH=7.0) and mixture was concentrated under vacuum to get solid. The solid was purified by column chromatography over silica gel (230-400 mesh) eluted in 10% MeOH/DCM to get as off white solid. (WV-NU-288-04) (28 g, 69%, almost 100% β-isomer). TLC Mobile phase details: 15% MeOH in DCM. ¹H NMR (400 MHz, DMSO-d₆): δ in ppm=12.1 (s, 1H), 8.23 (d, 1H, J1=5.6 Hz), 5.5 (dd, 1H, J1=11.1 Hz, J2=2.1 Hz), 4.84 (d, 2H, J1=13.8 Hz), 3.68 (d, 1H, J1=11.9 Hz, J2=1.9 Hz), 3.48 (dd, 1H, J1=12.0 Hz, J2=5.7 Hz), 3.40 (m, 1H), 3.30 (ddd, 1H, J1=9.2 Hz, J2=5.8 Hz, J3=2.0 Hz), 2.78 (m, 1H), 2.46 (t, 2H, J1=7.1 Hz), 2.29 (m, 1H), 2.10 (m, 1H), 2.01 (s, 1H), 1.89 (s, 1H), 1.58 (ddd, 1H, J1=24 Hz, J2=13.0 Hz, J3=3.7 Hz), 1.12 (dd, 6H, J1=6.8 Hz, J2=0.6 Hz), 0.94 (t, 3H, J1=7.1 Hz) MS: m czalcd for C₁₅H₂₁N₅O₅, 351.4; found 350.14 [M−H].

### 5. Preparation of N-(9-((2R,5S,6R)-6-((bis(4-methoxyphenyl)(phenyl)methoxy)methyl)-5-hydroxyl tetrahydro-2H-pyran-2-yl)-6-oxo-6,9-dihydro-1H-purin-2-yl)isobutyramide (WV-NU-288)

[chemical structure]

[2539] To a stirred solution of (WV-NU-287-04) (28 g, 0.0797 mol) in anhydrous Pyridine (840 mL, 30 vol.) was added Silver nitrate (1.34 g, 0.00797), DMTCl (29.65 g, 0.0877 mol) portion-wise over a period of 25 min at 0° C. Above reaction was stirred at for 18 h. Progress of the reaction was monitored by TLC. Then reaction was concentrated under vacuum to get crude mass. The crude dissolved in ethyl acetate (300 mL), washed with sat. NaHCO₃ (10 mL×2), brine solution (100 mL×1), dried over Na₂SO₄, concentrated and purified by column chromatography over basic silica gel (230-400 mesh) eluted in 4% EtOH/DCM to get as a off white solid (WV-NU-288) (30 g, 58%). TLC Mobile phase details: 10% EtOH in DCM. ¹H NMR (500 MHz, DMSO-d₆): δ in ppm=12.15 (s, 1H), 11.74 (s, 1H), 8.24 (s, 1H), 7.37 (m, 2H), 7.19 (m, 7H), 6.78 (m, 4H), 5.64 (dd, 1H, J1=11.0 Hz, J2=2.1 Hz), 4.96 (d, 1H, J1=6.2 Hz), 3.70 (d, 6H, J1=1.4 Hz), 3.61 (m, 1H), 3.38 (m, 2H), 3.25 (d, 1H, J1=9.8 Hz), 3.06 (dd, 1H, J1=10 Hz, J2=6.5 Hz), 2.81 (m, 1H), 2.47 (t, 1H, J1=2.1 Hz), 2.31 (m, 1H), 2.09 (m, 2H), 1.61 (m, 1H), 1.26 (m, 1H), 1.12 (dd, 6H, J1=6.9 Hz, J2=5.5 Hz), 0.95 (t, 1H, J1=67.2 Hz). MS: m czalcd for C₃₆H₃₉N₅O₇, 653.7; found 652.62 [M−H].

### Preparation of amidite N568-362

[2540] (N-(1-((2R,5S,6R)-6-((bis(4-methoxyphenyl)(phenyl)methoxy)methyl)-5-(((1S,3S,3aS)-3-((phenylsulfonyl)methyl)tetrahydro-1H,3H-pyrrolo[1,2-c][1,3,2]oxazaphosphol-1-yl)oxy)tetrahydro-2H-pyran-2-yl)-2-oxo-1,2-dihydropyrimidin-4-yl)acetamide).

[chemical structure]

[2541] Amidite N568-362 was synthesized using general procedure from WV-NU-223. Yield, 74%. ³¹P NMR (243 MHz, CDCl₃) δ 149.44; MS (ES) m z calculated for C₄₅H₄₉N₄O₁₀PS [M+K]⁺ 907.25, Observed: 907.14 [M+K]⁺.

### Preparation of amidite N891-19

[chemical structure]

[2542] Amidite N891-19 was synthesized using general procedure from WV-NU-223. Yield, 79%. ³¹P NMR (243 MHz, CDCl₃) δ 148.37, 148.12; MS (ES) m z calculated for C₄₂H₅₂N₅O₈P [M+K]⁺824.32, Observed: 824.59 [M+K]⁺.

### Preparation of Amidite N891-6

[chemical structure]

[2543] Amidite N₈₉₁-6 was synthesized using general procedure from WV-NU-286. Yield, 62%.

[2544] ³¹P NMR (243 MHz, CDCl₃) δ 157.82; MS (ES) m z calculated for C₄₄H₄₈N₃O₁₀PS [M+K]+880.24, Observed: 880.32 [M+K]⁺.

### Preparation of amidite N891-7

[chemical structure]

[2545] Amidite N891-7 was synthesized using general procedure from WV-NU-286. Yield, 57%. ³¹P NMR (243 MHz, CDCl₃) δ 157.82; MS (ES) m z calculated for C₄₄H₄₈N₃O₁₀PS [M+K]⁺ 880.24, Observed: 880.32 [M+K]⁺.

### Preparation of amidite N920-3

[chemical structure]

[2546] Amidite N920-3 was synthesized using general procedure from WV-NU-288. Yield, 76%. ³¹P NMR (243 MHz, CDCl₃) δ 151.21; MS (ES) m/z calculated for C₄₈H₅₃N₆O₁₀PS [M+Na]⁺959.32, Observed: 959.08 [M+Na]⁺.

### Preparation of amidite N891-13

[chemical structure]

[2547] Amidite N₈₉₁-13 was synthesized using general procedure from WV-NU-288. Yield, 72%. ³¹P NMR (243 MHz, CDCl₃) δ 158.34; MS (ES) m z calculated for C₄₈H₅₃N₆O₁₀PS [M+Na]⁺ 935.33, Observed: 935.67 [M]⁻.

### Preparation of amidite N891-38

[chemical structure]

[2548] Amidite N891-38 was synthesized using general procedure from WV-NU-287. Yield, 68%. ³¹P NMR (243 MHz, CDCl₃) δ 148.47, 148.15; MS (ES) m z calculated for C₄₈H₅₄N₇O₇P [M]⁻ 871.38, Observed: 871.27 [M]⁻.

### Preparation of Amidite N920-2

[chemical structure]

[2549] Amidite N920-2 was synthesized using general procedure from WV-NU-287. Yield, 77%.

[2550] ³¹P NMR (243 MHz, CDCl₃) δ 150.71; MS (ES) m z calculated for C₅₁H₅₁N₆O₉PS [M+Na]⁺977.31, Observed: 977.56 [M+Na]⁺.

### Preparation of Amidite N₈₉₁-9

[chemical structure]

[2551] Amidite N891-9 was synthesized using general procedure from WV-NU-287. Yield, 63%. ³¹P NMR (243 MHz, CDCl₃) δ 157.7; MS (ES) m z calculated for C₅₁H₅₁N₆O₉PS [M+Na]⁺ 977.31, Observed: 977.65 [M+Na]⁺.

### Example 51: Synthesis of PN-Lipid Azides

### General Synthetic Method for Single Chain PN-Lipid Azides

[chemical structure]

[chemical structure]

### Synthesis of WV-DL-045 (n009)

[chemical structure]

### 1. Preparation of Compound 2

[chemical structure]

[2552] In a one-neck round bottom flask, ethane-1,2-diamine (337.59 g, 5.62 mol) was placed with a magnetic stirring bar, and compound 1 (50 g, 200.62 mmol) was added slowly at 0° C. After finishing the addition, the reaction mixture was warmed to 25° C., and left undisturbed for an additional 1 h. 300 mL of hexane was added into the reaction mixture, which was stirred vigorously for 12 h at 25° C. LCMS showed the reaction was completed, staring material was consumed and the product was obtained, the hexane layer was decanted and dried under reduced pressure to give compound 2 (123 g) crude as colorless oil. LCMS: (M+H⁺) 229.2

### 2. Preparation of Compound 3

[chemical structure]

[2553] Two batches in parallel. To a solution of compound 2 (61.5 g, 269.25 mmol) and CDI (43.66 g, 269.25 mmol) in THF (630 mL) was stirred at 15° C. for 12 hr. TLC showed the reaction was completed, starting material was consumed and the product was obtained. The crude reaction mixture (126 g scale) was combined to another two batch crude product (123 g scale) and (84 g scale) for further purification. The combined crude product was purified by column chromatography on a silica gel eluted with petroleum ether: ethyl acetate (from 10/1 to 1/12) to give product 3 (95 g, 65.09% yield) as a white solid.

[2554] TLC (Ethyl acetate:Methanol=10:1) R_{f1}=0.50

### 3. Preparation of Compound 4

[chemical structure]

[2555] Six batches in parallel. To a solution of compound 3 (40 g, 157.23 mmol) in DMF (650 mL) was added NaH (7.55 g, 188.67 mmol, 60% purity) at 0° C. and the reaction stirred for 0.5 h, Then added CH₃I (66.95 g, 471.68 mmol) to the above reaction mixture, and stirred at 25° C. for 3 h. TLC showed the reaction was completed, starting material was consumed and the product was obtained. The reaction mixture was quenched by addition H₂O (1000 mL) at 25° C., and extracted with Ethyl acetate (1000 mL*3). The combined organic layers were dried over anhydrous Na₂SO₄, filtered and concentrated under reduced pressure to give a residue. The residue was purified by column chromatography (SiO₂, Petroleum ether/Ethyl acetate=20/1 to 1/2) to give product 4 (232 g, crude) as yellow oil.

[2556] ¹H NMR (400 MHz, CHLOROFORM-d) 6=3.25-3.17 (m, 4H), 3.09 (t, J=7.3 Hz, 2H), 2.70 (d, J=1.6 Hz, 3H), 1.45-1.36 (m, 2H), 1.28-1.14 (m, 19H), 0.85-0.76 (m, 3H)

[2557] TLC (Petroleum ether:Ethyl acetate=0:1) R_{f1}=0.5

### 4. Preparation of Compound 5

[chemical structure]

[2558] A mixture of compound 4 (30 g, 111.76 mmol, 1 eq.) in Tol.(250 mL) was degassed and purged with N₂ for 3 times, and then to the mixture was added oxalyl chloride (212.78 g, 1.68 mol, 146.75 mL, 15 eq.) and stirred at 65° C. for 72 hr under N₂ atmosphere. LCMS showed the reaction was completed, staring material was consumed, the desired product was obtained. Then the mixture was concentrated in vacuo. The white solid was washed by cooled EtOAc (100 mL*2), and then the solid was concentrated in vacuo, to give product 5 (20 g, crude) as a white solid.

[2559] LCMS: M⁺, 287.3

### 5. Preparation of Compound WV-DL-044

[chemical structure]

[2560] To a solution of compound 5 (8 g, 24.74 mmol) in DCM (46 mL) and H₂O (26 mL) was added potassium hexafluorophosphate (4.55 g, 24.74 mmol) at 25° C. The reaction mixture was stirred at 25° C. for 1 h. TLC showed the reaction was completed, starting material was consumed, and the desired product was obtained. The filtrate was washed with H₂O (10 mL*2), and the white solid was desired compound. To give product WV-DL-044 (6.5 g, 60.69% yield, F6P) as a white solid. The product was combined with another two batches product (2.5 g), and (2.55 g) for analysis and delivery. Finally, 11.5 g of product was got

[2561] TLC (Petroleum ether:Ethyl acetate=0:1) R_{f}=0.0

### 6. Preparation of Lipid Azide WV-DL-045

[chemical structure]

[2562] 2.2 g WV-DL-044 and 495 mg NaN₃ were added to a round bottom flask. Dry ACN was added forming a suspension and stirred 2.5 hr at room temperature. The reaction mixture was filtered through a pad of celite and washed with CAN. The filtrate was dried on rotovap and was then redissolved in a minimal amount ACN and the solution was precipitated with diethyl ether to afford 1.75 g of fluffy white solid

[2563] ¹H NMR (600 MHz, Chloroform-d) δ 3.87 (dd, J=12.1, 8.1 Hz, 1H), 3.81-3.75 (m, 1H), 3.29 (t, J=7.8 Hz, 1H), 3.12 (s, 2H), 1.57-1.50 (m, 1H), 1.22 (s, 3H), 1.19 (s, 6H), 0.84-0.78 (m, 2H).

[2564] ¹³C NMR (151 MHz, CDCl₃) δ 154.76, 77.29, 77.07, 76.86, 49.38, 47.03, 46.52, 33.13, 31.90, 29.61, 29.61, 29.54, 29.42, 29.34, 29.05, 26.97, 26.47, 22.68, 14.11.

### Synthesis of Azide (SOPL-WLS-41, n033)

[chemical structure]

### 1. Preparation of SOPL-WLS-41b

[chemical structure]

[2565] In a clean and dry two-neck 1 Lit round bottom flask, ethane-1,2-diamine (306 mL, 4.585 mol) was placed with a magnetic stirring bar, and compound SOPL-WLS-41a (50 g, 0.164 mol) was added dropwise at 0° C. by using addition funnel. After finishing the addition, the reaction mixture was warmed to 25° C., and left undisturbed for an additional 1 h. Then, 300 mL of hexane was added into the reaction mixture and stirred vigorously for 16 h at 25° C. TLC showed the reaction was completed, staring material was consumed and the new spot was formed (TLC—10% MeOH:EtOAc; TLC charring—Phosphomolybdic acid). The hexane layer was separated by using separatory funnel. Again 300 mL of hexane was added to amine layer and stir for 4 h at rt. After that hexane layer was separated and combined with previous hexane layer, dried over sodium sulphate and evaporated to dryness under reduced pressure to get compound SOPL-WLS-41b (48 g) as a crude colorless liquid.

[2566] MS: m z calcd for C₁₈H₄₀N₂ ([M+H]⁺), 285.53; found 285.38.

### 2. Preparation of SOPL-WLS-41c

[chemical structure]

[2567] SOPL-WLS-41b (48.0 g, 0.169 mol) was taken in clean and dry 1 Lit two neck RBF under argon atmosphere. Then add 491 mL of THF to RBF. Cool the RB in ice bath (0° C.). Add portion wise 1,1′—Carbonyldiimidazole (28.17 g, 0.174 mol) to RM for period of 10 min. The reaction mixture was stir at 15° C. for 12 h. TLC showed the reaction was completed, staring material was consumed and the product was formed (TLC—10% MeOH:EtOAc; TLC charring—Phosphomolybdic acid). After completion of reaction, solvent was dried and purified on silica gel column chromatography (100-200 mesh). The product was eluted with 50% ethyl acetate: hexane. Fraction containing product was evaporated to get 37.1 g (71% yield) of SOPL-WLS-41c as a white solid.

[2568] ¹H NMR (400 MHz, CDCl₃): δ in ppm=4.33 (s, 1H), 3.40-3.43 (m, 4H), 3.17 (t, 2H, J=7.4 Hz), 1.50 (t, 2H, J=7.0 Hz), 1.25-1.30 (m, 28H), 0.88 (d, 3H, J=13.6 Hz).

[2569] MS: m/z calcd for C₁₉H₃₈N₂O ([M+H]⁺), 311.53; found 311.42.

### 3. Preparation of SOPL-WLS-41d

[chemical structure]

[2570] SOPL-WLS-41c (29.0 g, 0.093 mol) was taken in clean and dry 1 Lit two neck RBF under argon atmosphere. Then add 471 mL of dry DMF to RBF containing SM. Cool the RB in ice bath (Temp. 0° C.). Then, add portion wise 60% NaH (4.48 g, 0.112 mol) to RM for period of 15 min. at 0° C. and stir 30 min at same temp. Then add dropwise methyl iodide (17.4 mL, 0.281 mol) to the reaction mixture at 0° C. for duration of 15 min. Then allow the RM to rt and stir for 3 h. TLC showed the reaction was completed, staring material was consumed and the new spot was formed (TLC—EtOAc; TLC charring—Phosphomolybdic acid). After completion of reaction, reaction mixture was cool to 0° C. in ice bath and quenched with ice cold water (1 Lit). Then extracted with ethyl acetate (3×1000 mL). The organic layer was dried over sodium sulfate, filtered and concentrated to dryness. The crude product was purified by silica gel column chromatography (100-200 mesh). The product was eluted with 25%-35% ethyl acetate:hexane. The fraction containing product was evaporated to get 29.0 g (96% yield) of SOPL-WLS-41d as a white colour solid.

[2571] H NMR (500 MHz, CDCl₃): δ in ppm=3.27 (s, 4H), 3.16 (t, 2H, J=7.6 Hz), 2.78 (s, 3H), 1.48 (t, 2H, J=7.2 Hz), 1.29 (s, 7H), 1.25 (s, 22H), 0.88 (t, 3H, J=6.9 Hz).

[2572] MS: m/z calcd for C₂₀H₄₀N₂O ([M+H]⁺), 325.55; found 325.41.

### 4. Preparation of SOPL-WLS-41e

[chemical structure]

[2573] SOPL-WLS-41d (30.0 g, 0.092 mol) was taken in clean and dry 1 Lit two neck RBF under argon atmosphere. Then add 249 mL of dry toluene to RBF containing SM under argon atmosphere. After that add dropwise oxalyl chloride (118.9 mL, 1.386 mol) using addition funnel for a period of 30 min at rt. Then reaction mixture was heated to 65° C. for 72 hrs. After completion of reaction (TLC—ethyl acetate; TLC charring—Phosphomolybdic acid) solvent was evaporated to dryness to get crude compound. The crude compound was washed with cold ethyl acetate (2×100 mL) and dried to get 33.0 g of crude SOPL-WLS-41e as brown colour solid.

[2574] MS: m/z calcd for C₂₀H₄₀C₁₂N₂O ([M-Cl]⁺), 344.00; found 343.30.

### 5. Preparation of SOPL-WLS-41f

[chemical structure]

[2575] SOPL-WLS-41e (20.0 g, 0.053 mol) was taken in clean and dry 500 mL single neck RBF and dissolved in 115 mL DCM under argon atmosphere. Then added aq solution of KPF₆ (9.70 g, 0.053 mol, in 65 mL of water). Stir the reaction mixture at rt for 1 h. After completion of reaction (TLC—5% MeOH:DCM; TLC charring—Phosphomolybdic acid), the reaction mixture was poured into ice water, and extracted with DCM (2×400 mL). The combined organic layer washed with water (400 mL) and dried over sodium sulphate, filtered and evaporated to dryness. Then, residue was dissolved in DCM (70 mL) and product was precipitate by dropwise addition of diethyl ether (500 mL) under stirring. The solvent was decant and solid was dried under high vacuum to get 18.0 g (70% yield) of SOPL-WLS-41f as a white solid.

[2576] MS: m/z calcd for C₂₀H₄₀ClF₆N₂P ([M-PF₆]⁺), 344.00; found 343.34.

### 6. Preparation of SOPL-WLS-41

[chemical structure]

[2577] SOPL-WLS-41f (18.0 g, 0.037 mol) was taken in clean and dry 500 mL single neck RBF and dissolved in 90 mL of Dry MeCN under argon atmosphere. Then, added sodium azide (3.58 g, 0.055 mol) to the RM and stir at rt for 2.5 h. After completion of reaction (TLC—ethyl acetate; TLC charring—ninhydrin), reaction mixture was filtered through a pad of celite and washed with MeCN (20 mL). The organic layer was evaporated to dryness. The crude compound was dissolve in MeCN (70 mL) and precipitate by adding dropwise diethylether (500 mL). Solvent was decanted and solid was dried under high vacuum to get 14.1 g (77% yield) of SOPL-WLS-41 as a white solid.

[2578] ¹H NMR (400 MHz, CDCl₃): δ in ppm=3.94-4.00 (m, 2H), 3.85-3.90 (m, 2H), 3.41 (t, 2H, J=7.6 Hz), 3.21 (s, 3H), 1.62 (t, 2H, J=7.1 Hz), 1.26 (s, 27H), 0.88 (t, 3H, J=6.8 Hz).

[2579] ¹⁹F NMR (400 MHz, CDCl₃): δ in ppm=−73.35 and −75.24

[2580] MS: m/z calcd for C₂₀H₄₀F₆N₅P ([M-PF₆]⁺), 350.57; found 350.40.

### Synthesis of Azide (SOPL-WLS-97, n039)

[chemical structure]

[chemical structure]

### 1. Preparation of 1,3-didodecylimidazolidin-2-one (SOPL-WLS-97-02)

[chemical structure]

[2581] To a solution of (SOPL-WLS-97-01) (20 g, 0.232 mol) in dry DMF (260 mL, 13 vol.) was added pinch of potassium iodide, followed by sodium hydride (27.9 g, 0.697 mol.), (60% dispersed in mineral oil) portion-wise over a period of 30 min. at 0° C. The mixture was allowed to warm to 65° C. and kept for 2 h. Then 1-bromododecane (167.2 mL, 0.697 mol) was added dropwise over a period of 30 mins at 65° C. and further stirred for 5 h. Progress of the reaction was monitored by TLC. Then reaction mixture was diluted with ice water (100 mL) at 0° C. and extracted with ethyl acetate (3×150 mL), washed with cool brine solution (2×100 mL), dried over Na₂SO₄ and concentrated under vacuum. The crude mass was purified by column chromatography over silica-gel (230-400 mesh), eluted in 10% EtOAc/Hexane to afford a pale yellow oil. (SOPL-WLS-97-02) (48 g, 50%). TLC Mobile phase details: 10% MeOH in DCM. ¹H NMR (400 MHz, DMSO-d₆): δ in ppm=4.24 (t, 1H, J1=5.2 Hz), 3.29 (d, 2H, J1=6.5 Hz), 3.12, (s, 3H), 2.93 (t, 3H, J1=7.1 Hz), 1.32 (m, 7H), 1.12 (m, 62H), 0.75 (m, 12H). MS: m z calcd for C₂₇H₅₄N₂O, 422.7; found 423.7 [M+H].

### 1. Preparation of 2-chloro-1,3-didodecyl-4,5-dihydro-1H-imidazol-3-ium (SOPL-WLS-97-03)

[chemical structure]

[2582] To a stirred solution of (SOPL-WLS-97-02) (40 g, 0.0946 mol) in dry toluene (400 mL, 10 vol.) was added phosphorus chloride (44.2 mL, 0.4731 mol) dropwise at 0° C. Then reaction mixture was further stirred at 60° C. for 48 h. Progress of the reaction was monitored by TLC. Reaction mixture was concentrated under vacuum. The crude mass was stirred with diethyl ether (400 mL), filtered off, and dried under vacuum to afford a brownish solid (SOPL-WLS-97-03) (46 g, crude). TLC Mobile phase details: 7% MeOH in DCM. ¹H NMR (400 MHz, DMSO-d₆): δ in ppm=11.68 (s, 4H), 3.98 (s, 4H), 3.48 (t, 4H, J1=6.7 Hz), 3.21 (s, 1H), 3.02 (t, 1H, J1=6.8 Hz), 1.58 (s, 4H), 1.24 (s, 46H), 0.85 (d, 7H, J1=6.6 Hz). MS: m z calcd for C₂₇H₅₄ClN₂, 442.2; found 442.9 [M+].

### 2. Preparation of 2-chloro-1,3-didodecyl-4,5-dihydro-1H-imidazol-3-iumhexafluoro phosphate(V) (SOPL-WLS-97-04)

[chemical structure]

[2583] To an ice cool solution of (SOPL-WLS-97-03) (46 g, 0.1040 mol in DCM (460 mL, 10 vol.) was added a solution of KPF₆ (28 g, 0.1561 mol.) in water (230 mL, 5 vol.)) dropwise over a period of 50 min. at 0° C. Above reaction mixture was allowed to rt for 4 h. Progress of the reaction was monitored by TLC. Then the mixture was filtered through a celite bed, washed with DCM (2×80 mL), organic layer washed with water (2×60 mL), dried over Na₂SO₄ and concentrated under vacuum. The crude was washed with diethyl ether (150 ml×3) and dried under vacuum to aget an off white solid (SOPL-WLS-97-04) (32 g, 57%). TLC Mobile phase details: 7% MeOH in DCM. ¹H NMR (400 MHz, DMSO-d₆): δ in ppm=3.97 (s, 3H), 3.48 (t, 3H, J1=7.0 Hz), 3.20 (s, 1H), 3.02 (t, 1H, J1=7.0 Hz), 1.57 (s, 3H), 1.32 (m, 39H), 0.85 (m, 6H). MS: m z calcd for C₂₇H₅₄ClN₂, 442.2; found 442.8 [M⁺].

### 3. Preparation of 2-azido-1,3-didodecyl-4,5-dihydro-1H-imidazol-3-iumhexafluoro phosphate (V)) (SOPL-WLS-97)

[chemical structure]

[2584] To a stirred solution of (SOPL-WLS-97-04) (32 g, 0.0546 mol) in acetonitrile (480 mL, 15 vol.) was added sodium azide (5.3 g, 0.0849 mol.) portion-wise over a period of 15 mins at 0° C. The mixture was further stirred at (0° C. to 10° C.) for 3 h. Progress of the reaction was monitored by TLC. Then reaction mixture was filtered through a celite bed, washed with acetonitrile (2×70 mL) and concentrated under vacuum. The solid was washed with diethyl ether (100 ml×2) and dried under vacuum to afford an off white solid. (SOPL-WLS-97) (20 g, 62%). TLC Mobile phase details: 7% MeOH in DCM. ¹H NMR (400 MHz, DMSO-d₆): δ in ppm=3.83 (s, 4H), 3.40 (t, 4H, J1=7.4 Hz), 1.58 (d, 4H, J1=6.3 Hz), 1.25 (s, 38H), 0.86 (t, 6H, J1=6.8 Hz). MS: m z calcd for C₂₇H₅₄N₅; 448.8; found 448.87 [M⁺].

### Synthesis for Azide (SOPL-WLS-42, n040)

[chemical structure]

[chemical structure]

### 1. Preparation of 1,3-dihexadecylimidazolidin-2-one (SOPL-WLS-42-02)

[chemical structure]

[2585] To a stirred solution of (SOPL-WLS-42-01) (10 g, 0.1162 mol) in dry toluene (200 mL, 20 vol.) was added KOH (26 g, 0.4651 mol), K₂CO₃ (3.2 g, 0.0232 mol), TBAB (1.8 g, 0.00581 mol) and reaction mixture was stirred at rt for 30 mins. Then 1-bromo hexadecane (71 mL, 0.232 mol) was added dropwise over a period of 30 mins. The mixture was allowed to warm to 80° C. and kept for 16 h. Progress of the reaction was monitored by TLC. Then reaction mixture was diluted with ice water (80 mL) and extracted with ethyl acetate (2×100 mL), washed with brine solution (1×80 mL), dried over Na₂SO₄ and concentrated under vacuum. The crude mass was purified by column chromatography over silica-gel (230-400 mesh), eluted in 20% EtOAc/Hexane to afford an off white solid (SOPL-WLS-42-02) (40 g, 64%). TLC Mobile phase details: 20% EtOAc in Hexane. ¹H NMR (400 MHz, CDCl₃): δ in ppm=3.27 (s, 4H), 3.15 (t, 4H, J1=7.4 Hz), 1.48, (t, 4H, J1=6.8 Hz), 1.27, (d, 56H, J1=14.3 Hz), 0.88 (t, 6H, J1=6.9 Hz). MS: m z calcd for C₃₅H₇₀N₂O, 535; found 535.88 [M+H⁺]⁺.

### 2. Preparation of 2-chloro-1,3-dihexadecyl-4,5-dihydro-1H-imidazol-3-ium chloride (SOPL-WLS-42-03)

[chemical structure]

[2586] To a stirred solution of (SOPL-WLS-42-02) (20 g, 0.0373 mol) in dry toluene (400 mL, 20 vol.) was added oxalyl chloride (48.2 mL, 0.5607 mol) dropwise at 0° C. Then the mixture was further stirred at 60° C. for 56 h. Progress of the reaction was monitored by TLC. Reaction mixture was concentrated under vacuum. The crude mass was stirred with diethyl ether (300 mL), filtered off, and dried under vacuum to afford a brownish solid (SOPL-WLS-42-03) (24 g, crude). The crude material was directly used in next step without further purification. TLC Mobile phase details: 7% MeOH in DCM. ¹H NMR (400 MHz, CDCl₃): δ in ppm=4.33 (s, 4H), 3.64 (t, 4H, J1=7.2 Hz), 1.68, (s, 4H), 1.29, (m, 58H), 0.88 (m, 6H). MS: m z calcd for C₃₅H₇₀ClN₂, 554.4; found 555.06 [M].

### 3. Preparation of 2-chloro-1,3-dihexadecyl-4,5-dihydro-1H-imidazol-3-ium hexafluorophosphate (V) (SOPL-WLS-42-04)

[chemical structure]

[2587] To an ice cool solution of (SOPL-WLS-42-03) (24 g, 0.0407 mol) in DCM (240 mL, 10 vol.) was added a solution of KPF₆ (11.24 g, 0.0611 mol.) in water (110 mL, 5 vol.) dropwise over a period of 25 min. at 0° C. Above reaction mixture was allowed to rt for 4 h. Progress of the reaction was monitored by TLC. Then the mixture was filtered through a celite bed, washed with DCM (2×60 mL), organic layer washed with water (2×50 mL), dried over Na₂SO₄ and concentrated under vacuum. The crude was washed with diethyl ether (100 ml×3) and dried under vacuum to a get an off white solid (SOPL-WLS-42-04) (20 g, 70%). TLC Mobile phase details: 7% MeOH in DCM. ¹H NMR (400 MHz, CDCl₃): δ in ppm=4.10 (s, 4H), 3.54 (t, 4H, J1=7.6 Hz), 1.65, (t, 4H, J1=7.0 Hz), 1.28 (m, 56H, J1=20.5 Hz), 0.88 (m, 6H, J1=6.9 Hz). MS: m z calcd for C₃₅H₇₀ClN₂, 554.4; found 555.94 [M].

### 4. Preparation of -azido-1,3-dihexadecyl-4,5-dihydro-1H-imidazol-3-ium hexafluorophosphate (V) (SOPL-WLS-42)

[chemical structure]

[2588] To a stirred solution of (SOPL-WLS-42-04) (20 g, 0.0286 mol) in acetonitrile (400 mL, 20 vol.) was added sodium azide (3.72 g, 0.0572 mol.) portion-wise over a period of 10 mins at 0° C. The mixture was further stirred at (0° c. to 10° C.) for 3 h. Progress of the reaction was monitored by TLC. Then reaction mixture was filtered through a celite bed, washed with acetonitrile (2×50 mL) and concentrated under vacuum. The solid was washed with diethyl ether (80 ml×2) and dried under vacuum to afford an off white solid. (SOPL-WLS-42) (15 g, 74%). TLC Mobile phase details: 5% MeOH in DCM. ¹H NMR (400 MHz, CDCl₃): δ in ppm=3.92 (s, 4H), 3.45 (t, 4H, J1=7.7 Hz), 1.64, (t, 4H, J1=7.1 Hz), 1.28 (m, 54H), 0.88 (s, 6H, J1=6.9 Hz). MS: m z calcd for C₃₅H₇₀N₅, 561.0; found 561.48 [M].

### Synthesis of SOPL-WLS-70

[chemical structure]

[chemical structure]

### 1. Preparation of 1,3-dimethyl-1,3-dihydro-2H-benzo (d)imidazole-2-one (SOPL-WLS-70B)

[chemical structure]

[2589] To a mixture of 1,3-dihydro-2H-benzo(d)imidazole-2-one (30 g, 0.22 mol) in toluene (150 mL, 5 vol.) was added TBAB (3.6 g, 0.01 mol.), 40% KOH solution (50.14 g, 0.89 mol.). Then methyl iodide (32 mL, 0.51 mol) was added dropwise over a period of 30 mins at RT, stirred at 60° C. for 48 h. Progress of the reaction was monitored by TLC. Above reaction was extracted with ethyl acetate (3×100 mL) washed with 1N HCl (2×50 mL), sat. NaHCO₃ (2×50 mL). Combined organics were dried over Na₂SO₄, concentrated under reduced pressure to afford the crude which was purified by column chromatography over silica gel (230-400 mesh) eluted in 1% MeOH/DCM to afford compound (SOPL-WLS-70B) (27 g, 75%) as a pale yellow solid. TLC Mobile phase details: 70% EtOAC/Hexane.

[2590] ¹H NMR (500 MHz, DMSO-d₆): δ in ppm=7.02 (m, 2H), 7.07 (m, 2H), 3.32 (s, 6H). MS: m z calcd. for C₉H₁₀N₂O 162.19; found 163.13 (M+H⁺).

### 2. Preparation of 2-Chloro-1, 3-dimethyl-1H-benzo (d) imidazole-3-ium (SOPL-WLS-70C)

[chemical structure]

[2591] To a cool stirred solution of (SOPL-WLS-70B) (27 g, 0.16 mol) in toluene (247 mL) was added oxalyl chloride (145 mL, 1.68 mol.) dropwise over a period of 40 mins under argon atmosphere. Reaction mixture was stirred at 70° C. for 5 days. Progress of the reaction was monitored by TLC. A solid precipitated was observed upon cooling at 0° C. for 3 h. the solid was filtered and washed with cold toluene (3×40 ml), dried under vacuum to afford compound (SOPL-WLS-70C) (21 g, 68%) as an off-white solid. TLC Mobile phase details: 10% MeOH in DCM. ¹H NMR (500 MHz, DMSO-d₆): δ in ppm=8.09 (q, 2H, J=3 Hz), 7.72 (q, 2H, J=3.2 Hz), 4.05 (s, 6H). MS: m z calcd for C₉H₁₀N₂Cl 181.64; found 181.10 (M)+.

### 3. Preparation of 2-Chloro-1, 3-dimethyl-1H-benzo (d) imidazole-3-ium hexafluorophosphate (SOPL-WLS-70D)

[chemical structure]

[2592] To a stirred solution of (SOPL-WLS-70C) (21 g, 0.09 mol) in acetonitrile (262 mL, 12.5 vol.) was added KPF₆ (23.2 g, 0.12 mol.) portion-wise over a period of 30 mins at 0° C. Above reaction mixture was stirred at RT for 3 h. Progress of the reaction was monitored by TLC. Then the mixture was filtered through a celite bed, washed with acetonitrile (2×40 mL) and evaporated under reduced pressure to get a crude solid. The crude was re-dissolved in acetonitrile (15 ml), then was added to a precool diethyl ether (120 mL) drop-wise at −78° C. under stirring. Solid precipitated was filtered off and washed with ether (2×45 mL) and dried to get the desired compound (SOPL-WLS-70C) (23 g, 72%) as an off-white solid. TLC Mobile phase details: 7% MeOH in DCM. ¹H NMR (500 MHz, DMSO-d6): δ in ppm=8.07 (td, 2H, J1=6.5 Hz, J2=3.2 Hz), 7.71 (m, 2H), 4.04 (s, 6H). MS: m z calcd for C₉H₁₀N₂Cl: 181.64; found 181.15 (M)⁺.

### 4. Preparation of 2-azido-1, 3-dimethyl-1H-benzo[d]imidazole-3-ium (SOPL-WLS-70)

[chemical structure]

[2593] To an ice-cool stirred solution of (SOPL-WLS-70D) (23 g, 0.07 mol) in acetonitrile (276 mL, 12 vol.) was added sodium azide (6.87 g, 0.10 mol.) portion-wise over a period of 20 mins. Above reaction mixture was stirred at RT for 3 h. Progress of the reaction was monitored by TLC. Then the mixture was filtered through a celite bed, washed with acetonitrile (2×50 mL) and evaporated under reduced pressure to give a crude solid. The crude was re-dissolved in acetonitrile (20 ml), then was added to a precool diethyl ether (120 mL) drop-wise at −78° C. under stirring. The solid was precipitated out which was filtered off and washed with ether (2×45 mL), and dried under vacuum to get the desired compound (SOPL-WLS-70) (18 g, 76%) as a yellow solid. TLC Mobile phase details: 100% Ethyl acetate. ¹H NMR (500 MHz, DMSO-d₆): δ in ppm=7.94 (m, 2H,) 7.64 (td, 2H, J1=6.5 Hz, J₂=3.2 Hz), 3.97 (s, 6H). MS: m z calcd for C₉H₁₀N₅⁺PF₆⁻ 188.21; found 188.07 (M+). ¹⁹F NMR (500 MHz, DMSO-d₆): δ in ppm=−69.32, −70.33. IR (KBr)=2189 cm⁻¹.

### Synthesis of Azide (SOPL-WLS-96, n071)

[chemical structure]

[chemical structure]

### 1. Preparation of (3aS,7aS)-octahydro-2H-benzo[d]imidazol-2-one (SOPL-WLS-96-01)

[chemical structure]

[2594] To a stirred solution of (1S, 2S)-cyclcohexane-1, 2-diamine (11 g, 0.0964 mol) in 2-propanol (110 mL, 10 vol.), was added diphenyl carbonate (16.3 g, 0.0767 mol) at rt under argon atmosphere. Then the reaction mixture was allowed to 90° C. for 3 h. Progress of the reaction was monitored by TLC. Solvent was evaporated under reduced pressure to afford a gummy syrup. The gummy mass was purified by column chromatography over silica gel (230-400 mesh) eluted in 2% MeOH/DCM to get as an off white solid (SOPL-WLS-96-01) (7 g, 51%). TLC Mobile phase details: 7% MeOH in DCM. ¹H NMR (500 MHz, DMSO-d₆): δ in ppm=6.32 (s, 2H), 2.86 (q, 2H, J1=2.5 Hz), 1.82 (m, 2H), 1.68 (q, 2H, J1=1.8 Hz), 1.28 (d, 2H, J1=4.1 Hz). MS: m z calcd for C₇H₁₂N₂O, 140.02; found 140.92 [M+H⁺].

### 2. (Preparation of 3aS,7aS)-1,3-dimethyloctahydro-2H-benzo[d]imidazol-2-one (SOPL-WLS-96-02)

[chemical structure]

[2595] To a stirred solution of (SOPL-WLS-96-01) (11.5 g, 0.0821 mol) in dry 1,4 dioxan (230 mL, 20 vol.) was added NaH (60%) (8.2 g, 0.205 mol.), portion-wise at 10° C. and the reaction mixture was further stirred at 65° C. for 3 h. Then Iodomethane (12.7 mL, 0.205 mol) was added dropwise over a period of 20 min. at 0° C. Above mixture was allowed to rt for 12 h. Progress of the reaction was monitored by TLC. Then the mixture was quenched with ice water (100 ml), extracted with DCM (3×100 mL), washed with brine (80 ml×1) solution, dried over Na₂SO₄ and concentrated under vacuum to afford as a brown syrup. The syrup was purified by column chromatography over silica gel (230-400 mesh) eluted in 2% MeOH/DCM to get as a light yellow syrup. (SOPL-WLS-95-02) (10.5 g, 76%). TLC Mobile phase details: 7% MeOH in DCM; ¹H NMR (500 MHz, DMSO-d₆): δ in ppm=2.56 (s, 6H), 2.53 (m, 2H), 1.98 (dd, 2H, J1=11.0 Hz, J2=2.1 Hz,), 1.78 (m, 2H), 1.34 (m, 2H), 1.23 (m, 2H). MS: m z calcd for C₉H₁₆N₂O, 168.2; found 169.18 [M+H⁺].

### 3. Preparation of (3aS,7aS)-2-chloro-1,3-dimethyl-3a,4,5,6,7,7a-hexahydro-1H-benzo[d]imidazol-3-iumchloride (SOPL-WLS-96-03)

[chemical structure]

[2596] To a stirred solution of (SOPL-WLS-96-02) (10 g, 0.059 mol) in dry toluene (100 mL, 10 vol) was added oxalyl chloride (51.07 mL, 0.592 mol) dropwise at 0° C. and reaction mixture was further stirred at 70° C. for 40 h. Progress of the reaction was monitored by TLC. Then reaction mixture was concentrated under reduced pressure to afford a brown syrup; which was washed with n-pentane (50 ml×3), diethyl ether (120 ml×3) and dried under vacuum to afford (SOPL-WLS-96-03) as a brown syrup (14 g). the crude was used as such in next step. TLC Mobile phase details: 7% MeOH in DCM. ¹H NMR (500 MHz, DMSO-d₆): δ in ppm=14.35 (s, 1H), 8.38 (s, 1H), 2.57 (s, 6H), 2.53 (m, 2H), 1.99 (m, 2H), 1.80 (m, 2H), 1.33 (m, 2H), 1.22 (m, 2H). MS: m z calcd for C₉H₁₆ClN₂, 187.7; found 188.65 [M+H⁺].

### 4. Preparation of (3aS,7aS)-2-chloro-1,3-dimethyl-3a,4,5,6,7,7a-hexahydro-1H-benzo[d]imidazol-3-ium hexafluorophosphate (V) (SOPL-WLS-96-04)

[chemical structure]

[2597] To a stirred solution of (SOPL-WLS-96-03) (14 g, 0.627 mol) in dry ACN (280 mL, 20 vol.) was added KPF₆ (17.5 g, 0.0941 mol.) portion wise over a period of 20 mins at 0° C. Above reaction mixture was stirred at rt for 5 h. Progress of the reaction was monitored by TLC. Then the mixture was filtered through a celite bed washed with ACN (2×50 mL), dried over Na₂SO₄ and concentrated under vacuum to get a gummy mass. The syrup was treated with diethyl ether and a solid precipitation was observed. The solid was off, washed with diethyl ether (300 mL) and dried under vacuum to afford (SOPL-WLS-96-04) as a brown solid. (16 g, 76%). TLC Mobile phase details: 7% MeOH in DCM. ¹H NMR (500 MHz, DMSO-d₆): δ in ppm, 2.57 (s, 6H), 2.54 (t, 2H, J1=2.8 Hz), 1.99 (d, 2H, J1=11.0 Hz), 1.78 (t, 2H, J1=10.3 Hz), 1.33 (m, 2H), 1.23 (m, 2H). MS: m z calcd for C₉H₁₆ClN₂, 187.65, found 188.72 [M+H⁺].

### 5. Preparation of ((3aS,7aS)-2-azido-1,3-dimethyl-3a,4,5,6,7, 7a-hexahydro-1H-3l4-benzo[d]imidazole hexafluorophosphate (V) (SOPL-WLS-96)

[chemical structure]

[2598] To a stirred solution of (SOPL-WLS-96-04) (16 g, 0.0481 mol) in dry ACN (320 mL, 20 vol.) was added NaN₃ (4.7 g, 0.0722 mol.) portion wise over a period of 20 mins at 0° C. and reaction mixture was stirred at rt for 4 h. Progress of the reaction was monitored by TLC. Then the mixture was filtered through a celite bed washed with ACN (2×70 mL), dried over Na₂SO₄ and concentrated under vacuum to get brownish solid. The solid was filtered off and washed with diethyl ether (90 ml×4), dried under vacuum to afford (SOPL-WLS-96) as a brown solid. (12 g, 72%). TLC Mobile phase details: 7% MeOH in DCM. ¹H NMR (500 MHz, DMSO-d₆): δ in ppm, 3.27 (t, 2H, J1=3.8 Hz), 3.05 (s, 6H), 2.21 (d, 2H, J1=9.0 Hz), 1.85 (d, 2H, J1=6.9 Hz), 1.35 (m, 4H). MS: m z calcd for C₉H₁₆N₅, 194.3, found 194.01 [M⁺].

### Synthesis of Azide (SOPL-WLS-95)

[chemical structure]

[chemical structure]

### 1. Preparation of (3aR,7aS)—Octahydro-2H-benzo[d]imidazol-2-one (SOPL-WLS-95-01)

[chemical structure]

[2599] To a stirred solution of (1R, 2S)-cyclcohexane-1, 2-diamine (30 g, 0.263 mol) in 2-propanol (300 mL, 10 vol) was added diphenyl carbonate (54 g, 0.22 mol) at rt under argon atmosphere. Then the reaction mixture was allowed to 90° C. for 3 h. Progress of the reaction was monitored by TLC. Solvent was evaporated under reduced pressure to afford a gummy syrup. The syrup was purified by column chromatography over silica gel (230-400 mesh) eluted in 3% MeOH/DCM to get an off white solid (SOPL-WLS-95-01) (23 g, 63%). TLC Mobile phase details: 7% MeOH in DCM. ¹H NMR (400 MHz, DMSO-d₆): δ in ppm=6.14 (s, 2H), 3.44 (m, 2H), 1.57 (m, 2H), 1.42 (m, 4H), 1.22 (m, 2H). MS: m z calcd for C₇H₁₂N₂O, 140.02; found 140.92 ([M+H]).

### 2. Preparation of (3aR,7aS)-1,3-dimethyloctahydro-2H-benzo[d]imidazol-2-one (SOPL-WLS-95-02)

[chemical structure]

[2600] To a stirred solution of (SOPL-WLS-95-01) (24 g, 0.1714 mol) in 1,4 dioxan (480 mL, 20 vol.) was added NaH (60% dispersion in mineral oil)) (17.1 g, 0.4285 mol.) portion-wise over a period of 30 mins at 10° C. Then the mixture was allowed to 65° C. and kept for 3 h. After that the mixture was cool to 0° C. and Iodomethane (26.7 mL, 0.4285 mol) was added dropwise. Further, the mixture was stirred at rt for 12 h. Progress of the reaction was monitored by TLC. Then the mixture was quenched with ice water (150 ml), extracted with DCM (3×100 mL), washed with brine (50 ml×2) solution, dried over Na₂SO₄ and concentrated under vacuum to afford a brownish syrup. The syrup was purified by column chromatography over silica gel (230-400 mesh) eluted in 2% MeOH/DCM to get as a light yellow syrup. (SOPL-WLS-95-02) (21 g, 72%). TLC Mobile phase details: 7% MeOH in DCM; ¹H NMR (500 MHz, DMSO-d₆): δ in ppm=3.28 (m, 2H), 2.58 (s, 6H), 1.71 (qd, 2H, J1=8.7 Hz, J2=4.6 Hz,), 1.46 (m, 2H), 1.37 (m, 2H), 1.27 (m, 2H). MS: m z calcd for C₉H₁₆N₂O, 168.2; found 169.18 ([M+H⁺]).

### 3. Preparation of (3aR,7aS)-2-chloro-1,3-dimethyl-3a,4,5,6,7,7a-hexahydro-1H-benzo[d]imidazol-3-ium chlorid (SOPL-WLS-95-03)

[chemical structure]

[2601] To a stirred solution of (SOPL-WLS-95-02) (24 g, 0.1428 mol) in toluene (240 mL, 10 vol) was added oxalyl chloride (122.29 mL, 1.428 mol) dropwise at 0° C., the mixture was further stirred at 60° C. for 80 h. Progress of the reaction was monitored by TLC. Then reaction mixture was concentrated under reduced pressure to afford a crude mass; which was washed with n-pentane (100 ml×2), diethyl ether (100 ml×3) and dried under vacuum to afford (SOPL-WLS-95-03) as a brownish syrup (25 g). TLC Mobile phase details: 7% MeOH in DCM. ¹H NMR (500 MHz, DMSO-d₆): δ in ppm=10.85 (s, 4H), 3.30 (m, 2H), 2.58 (s, 6H), 1.71 (qd, 2H, J1=8.7 Hz, J2=4.5 Hz,), 1.46 (m, 2H), 1.37 (m, 2H), 1.28 (m, 2H). MS: m z calcd for C₉H₁₆ClN₂, 187.7; found 188.72 ([M+H⁺]).

### 4. Preparation of (3aR,7aS)-2-chloro-1,3-dimethyl-3a,4,5,6,7,7a-hexahydro-1H-benzo[d]imidazol-3-iumhexafluorophosphate (V) (SOPL-WLS-95-04)

[chemical structure]

[2602] To a stirred solution of (SOPL-WLS-95-03) (25 g, 0.1125 mol) in ACN (500 mL, 20 vol.) was added KPF₆ (31.27 g, 0.1685 mol.) portion wise over a period of 40 mins at 0° C. Then the reaction mixture was stirred at rt for 5 h. Progress of the reaction was monitored by TLC. After that the mixture was filtered through a celite bed washed with ACN (2×80 mL), dried over Na₂SO₄ and concentrated under vacuum to get crude syrup. The syrup was washed with diethyl ether (150 ml×3) and dried under vacuum afford (SOPL-WLS-95-04) as a brown solid. (28 g, 75%). TLC Mobile phase details: 7% MeOH in DCM. ¹H NMR (500 MHz, DMSO-d₆): δ in ppm 3.29 (t, 2H, J1=3.8 Hz), 2.58 (s, 6H), 1.71 (m, 2H), 1.46 (m, 2H), 1.38 (m, 2H), 1.27 (tt, 2H, J1=11.1 Hz, J2=3.9 Hz). MS: m z calcd for C₉H₁₆ClN₂, 187.65, found 187.7 ([M+H⁺])

### 5. Preparation of (3aR,7aS)-2-azido-1,3-dimethyl-3a,4,5,6,7,7a-hexahydro-1H-314-benzo[d]imidazole hexafluorophosphate (V) (SOPL-WLS-95)

[chemical structure]

[2603] To a stirred solution of (SOPL-WLS-95-04) (16 g, 0.0481 mol) in ACN (320 mL, 20 vol.) was added NaN₃ (4.69 g, 0.0722 mol.) portion wise over a period of 30 mins at 0° C. and reaction mixture was stirred at rt for 4 h. Progress of the reaction was monitored by TLC. Then the mixture was filtered through a celite bed washed with ACN (2×100 mL), dried over Na₂SO₄ and concentrated under vacuum to get crude syrup. The syrup was washed with diethyl ether (60 ml×3) and dried under vacuum afford (SOPL-WLS-95) as a light yellow solid. (12 g, 74%). TLC Mobile phase details: 7% MeOH in DCM. ¹H NMR (400 MHz, DMSO-d₆): δ in ppm 4.03 (m, 2H), 3.05 (s, 6H), 1.76 (m, 4H), 1.36 (m, 4H). MS: m/z calcd for C₉H₁₆N₅, 194.3, found 193.97 ([M+])

### Synthesis of (SOPL-WLS-94)

[chemical structure]

[chemical structure]

### 1. Preparation of 1-methylimidazolidin-2-one (SOPL-WLS-94-01)

[chemical structure]

[2604] To a solution of (SM-1) (50 g, 0.5813 mol) in 1, 4-dioxane (1.2 L, 30 vol.) was added sodium hydride (60% dispersion in mineral oil) (27.2 g, 0.6802 mol.) portion-wise at 0° C. Then the mixture was allowed to stir at 65° C. for 3 h. After that the mixture was cool to 0° C. and Iodomethane (66.8 mL, 1.074 mol) was added dropwise over a period of 50 mins. Further, the mixture was allowed to rt and kept for 16 h. Progress of the reaction was monitored by TLC. Above mixture was then filtered through a celite bed, washed with DCM (3×100 mL). Filtrate was concentrated under reduced pressure to afford a thick syrup. The syrup was purified by column chromatography over silica gel (230-400 mesh) eluted in 2% MeOH/DCM to get an off-white solid (SOPL-WLS-94-01) (17.5 g, 30%). TLC Mobile phase details: 10% MeOH in DCM. ¹H NMR (500 MHz, DMSO-d₆): δ in ppm=6.26 (s, 1H), 3.27 (m, 2H), 3.19 (dd, 2H, J1=8.6 Hz, J2=6.5 Hz), 2.60 (s, 3H). MS: m z calcd for C₄H₈N₂O, 100.1; found 101.08 ([M+H]).

### 2. Preparation of tert-butyl (3-(3-methyl-2-oxoimidazolidin-1-yl)propyl)carbamate) (SOPL-WLS-94-02)

[chemical structure]

[2605] To a stirred solution of (SOPL-WLS-94-01) (20 g, 0.2 mol) in 1, 4 dioxan (1 L, 20 vol.) was added sodium hydride (60% dispersion in mineral oil) (12 g, 0.3 mol.) portion-wise over a period of 30 min at 10° C. The mixture was further stirred at 65° C. for 3 h. After that the reaction mixture was cool to 0° C. and a solution of alkyl bromide (71. g, 0.3 mol) in 1, 4 dioxan (200 mL) was added dropwise. Above reaction was stirred at rt for 5 h. Progress of the reaction was monitored by TLC. Then reaction mixture was diluted with ice water (150 mL) and extracted with ethyl acetate (3×200 mL), dried over Na₂SO₄ and concentrated under reduced pressure to get a gummy mass. The crude was purified by column chromatography over silica-gel (230-400 mesh) eluted in 2% MeOH/DCM to afford a pale yellow oil (SOPL-WLS-94-02) (26 g, 50%). %). TLC Mobile phase details: 10% MeOH in DCM. ¹H NMR (400 MHz, DMSO-d₆): δ in ppm=6.75 (d, 1H, J1=5.4 Hz), 3.21 (s, 4H), 3.15, (m, 1H), 3.03 (t, 2H, J1=7.1 Hz), 2.89 (q, 2H, J1=6.6 Hz), 2.63 (s, 3H), 1.52 (m, 2H), 1.37 (s, 9H). MS: m z calcd for C₁₂H₂₃N₃O₃, 257.3; found 258.08 ([M+H])

### 3. Preparation of 1-methyl-3-(3-((2,2,2-trifluoroacetyl)-l4-azaneyl)propyl)imidazolidin-2-one (SOPL-WLS-94-03)

[chemical structure]

[2606] To a stirred solution of (SOPL-WLS-94-03) (29 g, 0.1124 mol) in DCM (290 mL, 10 vol.) was added trifluoroacetic acid (43.3 mL, 0.562 mol.) dropwise at 0° C. Above reaction mixture was stirred at rt for 8 h. Progress of the reaction was monitored by TLC. Then solvent was reduced under reduced pressure, co-distilled with toluene (2×100 mL) and dried to afford a pale yellow gummy mass (SOPL-WLS-94-01) (30 g, crude). The crude was directly used in next step without further purification. TLC Mobile phase details: 10% MeOH in DCM. ¹H NMR (400 MHz, DMSO-d₆): δ in ppm=10.05 (s, 2H), 7.73 (s, 4H), 3.22 (d, 4H, J1=8.6 Hz), 3.13 (t, 2H, J1=6.9 Hz), 2.76 (m, 2H), 2.64 (d, 3H, J1=6.9 Hz), 1.71 (m, 2H). MS: m z calcd for C₇H₁₅N₃O, 157.2; found 158.06 ([M+H]).

### 4. Preparation of 2,2,2-trifluoro-N-(3-(3-methyl-2-oxoimidazolidin-1-yl)propyl)acetamide) (SOPL-WLS-94-04)

[chemical structure]

[2607] To a cool stirred solution of (SOPL-WLS-94-03) (26 g, 0.10230 mol) in DCM (390 mL, 15 vol.) was added triethylamine (41.9 mL, 0.3073 mol.) dropwise. Then ethyl trifluoroacetate (18.16 mL, 0.1535 mol.) was added dropwise over a period of 20 mins, at 0° C. Above reaction mixture was stirred at rt for 16 h. Progress of the reaction was monitored by TLC. Then the reaction mass was diluted with ice water (150 mL) and extracted with DCM (2×200 mL), dried over Na₂SO₄ and concentrated under reduced pressure. The crude was purified by column chromatography over silica-gel (100-200 mesh) eluted in 5% MeOH in DCM to afford an off-white solid (SOPL-WLS-94-04) (14 g, 51% for 2 steps). TLC Mobile phase details: 10% MeOH in DCM. ¹H NMR (400 MHz, DMSO-d₆): δ in ppm=9.41 (s, 1H), 3.23 (m, 4H), 3.18, (m, 2H), 3.07 (t, 2H, J1=7.1 Hz), 2.64 (d, 3H, J1=2.1 Hz), 1.6 (m, 2H). MS: m z calcd for C₉H₁₄F₃N₃O₂, 253.2; found 254.08 ([M+H])

### 5. Preparation of N-(3-(2-chloro-3-methyl-4,5-dihydro-1H-3l4-imidazol-1-yl)propyl)-2,2,2-trifluoroaceta midechlorine (SOPL-WLS-94-05)

[chemical structure]

[2608] To a stirred solution of (SOPL-WLS-94-04) (14 g, 0.0054 mol) in Toluene (280 mL, 20 vol) was added phosphorus chloride (15.3 mL, 0.1634 mol) dropwise at 0° C. Then reaction mixture was further stirred at 50° C. for 64 h. Progress of the reaction was monitored by TLC. Then reaction mixture was concentrated under reduced pressure to afford a crude mass; which was washed with diethyl ether (100 ml×3) and dried under vacuum to afford as a yellowish solid (SOPL-WLS-94-05) (15 g, crude). TLC Mobile phase details: 7% MeOH in DCM. ¹H NMR (500 MHz, DMSO-d₆): δ in ppm=12.2 (s, 2H), 9.45 (s, 1H), 3.23 (m, 4H), 3.17 (q, 2H, J1=6.2 Hz), 3.07 (t, 2H, J1=7.2 Hz), 2.64 (s, 3H), 1.66 (m, 2H). MS: m z calcd for C₉H₁₄C₁F₃N₃O, 272.7; found 273.74 ([M+H]).

### 6. Preparation of N-(3-(2-chloro-3-methyl-4,5-dihydro-1H-3l4-imidazol-1-yl)propyl)-2,2,2-trifluoroacetamide) (SOPL-WLS-94-06)

[chemical structure]

[2609] To a cool solution of (SOPL-WLS-94-05) (16 g, 0.052130 mol in ACN (320 mL, 20 vol.) was added KPF₆ (14.5 g, 0.0781 mol.) portion wise over a period of 30 mins at 0° C. Above reaction mixture was stirred at rt for 4 h. Progress of the reaction was monitored by TLC. Then the mixture was filtered through a celite bed washed with ACN (2×80 mL), dried over Na₂SO₄ and concentrated under reduced pressure to get a crude mass; which was washed with diethyl ether (150 ml×3) and dried under vacuum to afford as a yellowish solid (SOPL-WLS-94-06) (18 g, 80%). TLC Mobile phase details: 10% MeOH in DCM.

[2610] ¹H NMR (500 MHz, DMSO-d₆): δ in ppm=11.45 (d, 2H, J1=687.9 Hz), 9.42 (s, 1H), 3.21, (d, 4H, J1=13.8 Hz), 3.17 (q, 2H, J1=6.2 Hz), 3.07 (t, 2H, J1=6.9 Hz), 2.64 (s, 3H), 2.07 (s, 3H), 1.66 (m, 2H). MS: m z calcd for C₉H₁₄C₁F₃N₃O, 272.7; found 273.73 ([M+H])

### 7. Preparations of N-(3-(2-azido-3-methyl-4,5-dihydro-1H-3l4-imidazol-1-yl)propyl)-2,2,2-trfluoroacetamide hexafluoro phosphate (V) (SOPL-WLS-94)

[chemical structure]

[2611] To a stirred solution of (SOPL-WLS-94-06) (18 g, 0.0431 mol) in acetonitrile (360 mL, 20 vol.) was added sodium azide (4.2 g, 0.0647 mol.) portion-wise over a period of 20 mins at 0° C. and further stirred at rt for 3 h. Progress of the reaction was monitored by TLC. Then reaction mixture was filtered through a celite bed washed with acetonitrile (2×80 mL) and concentrated under reduced pressure to afford a light yellow solid. The solid was washed with diethyl ether (80 ml×4) and dried under vacuum to afford as an off white solid. (SOPL-WLS-94) (12 g, 61%). TLC Mobile phase details: 7% MeOH in DCM. ¹H NMR (500 MHz, DMSO-d₆): δ in ppm=9.49 (s, 1H), 3.81 (m, 4H), 3.38 (t, 2H, J1=7.2 Hz), 3.24 (q, 2H, J1=6.4 Hz), 3.13 (s, 3H), 1.8 (m, 2H). MS: m z calcd for C₉H₁₄F₃N₆O; 279.2; found 279.10 ([M+]).

### 8. Preparation of 3-bromopropan-1-amine hydro bromide (SOPL-WLS-94-07)

[chemical structure]

[2612] To a stirred solution of (SM-2) (30 g, 0.4 mol) in DCM (1.5 L, 50 vol.) was added triethylamine (109.18 g, 0.8 mol.) dropwise at 0° C. and stirred for 20 mints. Then Boc-anhydride (100.9 mL, 0.44 mol) was added and stirred at rt for 24 h. Progress of the reaction was monitored by TLC. Above reaction was diluted with sat.NH₄Cl solution (300 mL) and extracted with DCM (2×300 mL), dried over Na₂SO₄and concentrated under vacuum to afford a light yellow liquid (SOPL-WLS-94-07) (60 g, crude). TLC Mobile phase details: 10% MeOH in DCM. ¹H NMR (400 MHz, DMSO-d₆): δ in ppm=6.72 (t, 1H, J1=5.1 Hz), 4.36 (t, 1H, J1=5.2 Hz), 3.39 (dd, 2H, J1=11.6 Hz, J2=6.3 Hz), 2.96 (q, 1H, J1=6.6 Hz), 1.52 (m, 2H), 1.37 (s, 9H). MS: m z calcd for C₃H₆Br, 175.2; found 75.91 ([M⁺−100]).

### 9. Preparation of tert-butyl (3-bromopropyl)carbamate (SOPL-WLS-94-08)

[chemical structure]

[2613] To a stirred solution of (SOPL-WLS-94-07) (60 g, 0.3429 mol) in DCM (1.2 L, 40 vol.) was added triphenylphosphine (134.6 g, 0.5143 mol.) and stirred at rt for 30 mins. Then the mixture was cool to 0° C. and carbon tetrabromide (170 g, 0.5143 mol) was added portion-wise. The mixture was further stirred at rt for 16 h. Progress of the reaction was monitored by TLC. Above mixture was concentrated under reduced pressure. The crude was purified by column chromatography over silica-gel (230-400 mesh) eluted in 20% EtOAC/Hexane to afford a pale yellow oil. (SOPL-WLS-94-08) (45 g, 45%). TLC Mobile phase details: 40% EtOAC/Hexane. ¹H NMR (400 MHz, DMSO-d₆): δ in ppm=6.89 (s, 1H), 3.50 (t, 2H, J1=6.5 Hz), 3.02, (q, 2H, J1=6.4 Hz), 1.90 (m, 2H), 1.37 (s, 9H). MS: m z calcd for C₈H₁₆BrNO₂, 238.1; found 139.84 ([M-99])

What is claimed is:

1. A double-stranded RNAi (dsRNAi) agent comprising a guide strand and a passenger strand wherein:
a) the guide strand is complementary or substantially complementary to a target RNA sequence, the guide strand comprises a backbone phosphoryl guanidine chiral center in the Sp configuration between the +3 nucleotide and the immediately downstream (+4) nucleotide, i.e., in the 3′ direction and further comprises:
i. backbone phosphorothioate chiral centers in Sp configuration between the 3′ terminal nucleotide and the penultimate (N-1) nucleotide and as between the penultimate (N-1) nucleotide and the immediately upstream (N-2) nucleotide;
ii. backbone phosphorothioate chiral centers in Rp, Sp, or alternating configurations between the 5′ terminal (+1) nucleotide and the immediately downstream (+2) nucleotide and between the +2 nucleotide and the immediately downstream (+3) nucleotide;
iii. one or more backbone phosphorothioate chiral centers in Rp or Sp configuration upstream of backbone phosphorothioate chiral centers in Sp configuration between the 3′ terminal nucleotide and the penultimate (N-1) nucleotide and as between the penultimate (N-1) nucleotide and the immediately upstream (N-2) nucleotide;
iv. one or more backbone phosphorothioate chiral centers in Rp or Sp configuration between the 5′ terminal (+1) nucleotide and the immediately downstream (+2) nucleotide; and/or between the (+2) nucleotide and the immediately downstream (+3) nucleotide;
v. one or more backbone phosphorothioate chiral centers in Rp or Sp configuration where linkage occurs between any two adjacent nucleotides between the penultimate 3′ (N-1) nucleotide of the guide strand, where N is the 3′ terminal nucleotide, and the upstream N-10 nucleotide;
vi. one or more backbone phosphoryl guanidine chiral center in the Sp configuration between the +7 and the immediately downstream (+8), i.e., in the 3′ direction; and/or
vii. a 5′ terminal modification;
b) the guide strand comprises one or more Rp, Sp, or stereorandom non-negatively charged internucleotidic linkage occurs between any two adjacent nucleotides between the second (+2) nucleotide relative to the 5′ terminal nucleotide of the guide strand and the penultimate 3′ (N-1) nucleotide of the guide strand, where N is the 3′ terminal nucleotide;
c) the guide strand comprises a 2′ modification, of the 3′ nucleotide of a nucleotide pair linked by an Rp, Sp, or stereorandom non-negatively charged internucleotidic linkage;
d) the guide strand comprises an Rp, Sp, or stereorandom non-negatively charged internucleotidic linkage between the tenth (+10) and eleventh (+11) nucleotides, relative to the 5′ terminal nucleotide;
e) the guide strand comprises an Rp, Sp, or stereorandom non-negatively charged internucleotidic linkage between the seventh (+7) and eighth (+8) nucleotides, relative to the 5′ terminal nucleotide;
f) the guide strand comprises one or more backbone phosphorothioate chiral centers in Rp or Sp configuration where linkage occurs between any two adjacent nucleotides between the penultimate 3′ nucleotide of the guide strand, where N is the 3′ terminal nucleotide, and the upstream N-10 nucleotide;
g) a passenger strand comprises one or more Rp, Sp, or stereorandom non-negatively charged internucleotidic linkage occurs upstream, i.e., in the 5′ direction, relative to the central nucleotide of the passenger strand;
h) the passenger strand comprises one or more Rp, Sp, or stereorandom non-negatively charged internucleotidic linkage occurs downstream, i.e., in the 3′ direction, relative to the central nucleotide of the passenger strand;
i) a passenger strand where one or more backbone phosphorothioate chiral centers in Rp or Sp configuration internucleotidic linkage occurs upstream, i.e., in the 5′ direction, relative to the central nucleotide of the passenger strand;
j) a passenger strand where one or more backbone phosphorothioate chiral centers in Rp or Sp configuration internucleotidic linkage internucleotidic linkage occurs downstream, i.e., in the 3′ direction, relative to the central nucleotide of the passenger strand;
k) a passenger strand in combination with one or more of the aforementioned guide strands, comprising one or more modified sugars between the 5′ terminal (+1) nucleotide and the penultimate (N-1) nucleotide;
l) the passenger strand comprises one or both of:
i. 0-n Rp, Sp, or stereorandom non-negatively charged internucleotidic linkages, where n is about 1 to 49;
ii. one or more backbone chiral centers in Rp or Sp configuration;
iii. one or more backbone phosphoryl guanidine chiral centers in the Rp configuration between the +7 nucleotide and the immediately downstream (+8) nucleotide, i.e., in the 3′ direction;
iv. one or more backbone phosphoryl guanidine chiral centers in the Rp configuration between the +15 nucleotide and the immediately downstream (+16) nucleotide, i.e., in the 3′ direction; and/or
v. backbone phosphorothioate chiral centers in the Sp configuration between the 5′ terminal (+1) nucleotide and the immediately downstream, i.e., in the 3′ direction, (+2) nucleotide and between the 3′ terminal nucleotide and the penultimate (N-1) nucleotide;
m) each strand of the dsRNAi agent independently has a length of about 15 to about 49 nucleotides; and/or
n) the dsRNAi is capable of directing target-specific RNA interference.

2. A chirally controlled oligonucleotide composition comprising double stranded oligonucleotides wherein the guide and passenger strands of the double stranded oligonucleotides are independently characterized by:
a) a common base sequence and length;
b) a common pattern of backbone linkages; and
c) a common pattern of backbone chiral centers;
which composition is chirally controlled in that it is enriched, relative to a substantially racemic preparation of guide strands having the same common base sequence and length, for oligonucleotides having a common pattern of chiral centers; and
a) wherein the guide strands are complementary or substantially complementary to a target RNA sequence, the guide strands comprise a backbone phosphoryl guanidine chiral center in the Sp configuration between the +3 nucleotide and the immediately downstream (+4) nucleotide, i.e., in the 3′ direction and further comprise:
i. backbone phosphorothioate chiral centers in Sp configuration between the 3′ terminal nucleotide and the penultimate (N-1) nucleotide and as between the penultimate (N-1) nucleotide and the immediately upstream (N-2) nucleotide,
ii. backbone phosphorothioate chiral centers in Rp, Sp, or alternating configurations between the 5′ terminal (+1) nucleotide and the immediately downstream (+2) nucleotide and between the +2 nucleotide and the immediately downstream (+3) nucleotide;
iii. one or more backbone phosphorothioate chiral centers in Rp or Sp configuration upstream of backbone phosphorothioate chiral centers in Sp configuration between the 3′ terminal nucleotide and the penultimate (N-1) nucleotide and as between the penultimate (N-1) nucleotide and the immediately upstream (N-2) nucleotide;
iv. one or more backbone phosphorothioate chiral centers in Rp or Sp configuration between the 5′ terminal (+1) nucleotide and the immediately downstream (+2) nucleotide; and/or between the (+2) nucleotide and the immediately downstream (+3) nucleotide; and/or backbone phosphorothioate chiral centers in the Sp configuration between the 5′ terminal (+1) nucleotide and the immediately downstream, i.e., in the 3′ direction, (+2) nucleotide and between the 3′ terminal nucleotide and the penultimate (N-1) nucleotide;
v. one or more backbone phosphoryl guanidine chiral center in the Sp configuration between the +7 and the immediately downstream (+8), i.e., in the 3′ direction; and/or
vi. a 5′ terminal modification;
b) the guide strand comprises one or more Rp, Sp, or stereorandom non-negatively charged internucleotidic linkage occurs between any two adjacent nucleotides between the second (+2) nucleotide relative to the 5′ terminal nucleotide of the guide strand and the penultimate 3′ (N-1) nucleotide of the guide strand, where N is the 3′ terminal nucleotide;
c) the guide strand comprises a 2′ modification, of the 3′ nucleotide of a nucleotide pair linked by an Rp, Sp, or stereorandom non-negatively charged internucleotidic linkage;
d) the guide strand comprises an Rp, Sp, or stereorandom non-negatively charged internucleotidic linkage between the tenth (+10) and eleventh (+11) nucleotides, relative to the 5′ terminal nucleotide;
e) the guide strand comprises an Rp, Sp, or stereorandom non-negatively charged internucleotidic linkage between the seventh (+7) and eighth (+8) nucleotides, relative to the 5′ terminal nucleotide;
f) the guide strand comprises one or more backbone phosphorothioate chiral centers in Rp or Sp configuration where linkage occurs between any two adjacent nucleotides between the penultimate 3′ nucleotide of the guide strand, where N is the 3′ terminal nucleotide, and the upstream N-10 nucleotide;
g) a passenger strand comprises one or more Rp, Sp, or stereorandom non-negatively charged internucleotidic linkage occurs upstream, i.e., in the 5′ direction, relative to the central nucleotide of the passenger strand;
h) the passenger strand comprises one or more Rp, Sp, or stereorandom non-negatively charged internucleotidic linkage occurs downstream, i.e., in the 3′ direction, relative to the central nucleotide of the passenger strand;
i) a passenger strand where one or more backbone phosphorothioate chiral centers in Rp or Sp configuration internucleotidic linkage occurs upstream, i.e., in the 5′ direction, relative to the central nucleotide of the passenger strand;
j) a passenger strand where one or more backbone phosphorothioate chiral centers in Rp or Sp configuration internucleotidic linkage internucleotidic linkage occurs downstream, i.e., in the 3′ direction, relative to the central nucleotide of the passenger strand;
k) a passenger strand in combination with one or more of the aforementioned guide strands, comprising one or more modified sugars between the 5′ terminal (+1) nucleotide and the penultimate (N-1) nucleotide;
l) the passenger strands comprise one or both of:
i. 0-n Rp, Sp, or stereorandom non-negatively charged internucleotidic linkages, where n is about 1 to 49;
ii. one or more backbone chiral centers in Rp or Sp configuration;
iii. one or more backbone phosphoryl guanidine chiral centers in the Rp configuration between the +7 nucleotide and the immediately downstream (+8) nucleotide, i.e., in the 3′ direction;
iv. one or more backbone phosphoryl guanidine chiral centers in the Rp configuration between the +15 nucleotide and the immediately downstream (+16) nucleotide, i.e., in the 3′ direction; and/or
v. backbone phosphorothioate chiral centers in the Sp configuration between the 5′ terminal (+1) nucleotide and the immediately downstream, i.e., in the 3′ direction, (+2) nucleotide and between the 3′ terminal nucleotide and the penultimate (N-1) nucleotide;
m) the guide and passenger strands have a length of about 15 to about 49 nucleotides; and/or
n) the guide and passenger strands are capable of directing target-specific RNA interference.

3. The double stranded oligonucleotide of claim 1 or the composition of claim 2, wherein the guide strand comprises backbone phosphorothioate chiral centers in Sp configuration between the 3′ terminal nucleotide and the penultimate (N-1) nucleotide and as between the penultimate (N-1) nucleotide and the immediately upstream (N-2) nucleotide, and the passenger strand comprises 0-n Rp, Sp, or stereorandom non-negatively charged internucleotidic linkages, where n is about 1 to 49.

4. The double stranded oligonucleotide of claim 1 or the composition of claim 2, wherein the guide strand comprises backbone phosphorothioate chiral centers in Rp, Sp, or alternating configurations between the 5′ terminal (+1) nucleotide and the immediately downstream (+2) nucleotide and between the +2 nucleotide and the immediately downstream (+3) nucleotide, and the passenger strand comprises 0-n Rp, Sp, or stereorandom non-negatively charged internucleotidic linkages, where n is about 1 to 49.5. The double stranded oligonucleotide of claim 1 or the composition of claim 2, wherein the guide strand comprises one or more backbone phosphorothioate chiral centers in Rp or Sp configuration where linkage occurs between any two adjacent nucleotides between the penultimate 3′ nucleotide of the guide strand, where N is the 3′ terminal nucleotide, and the upstream N-10 nucleotide, and the passenger strand comprises 0-n Rp, Sp, or stereorandom non-negatively charged internucleotidic linkages, where n is about 1 to 49.

6. The double stranded oligonucleotide of claim 1 or the composition of claim 2, wherein the guide strand comprises one or more backbone phosphorothioate chiral centers in Rp or Sp configuration upstream of backbone phosphorothioate chiral centers in Sp configuration between the 3′ terminal nucleotide and the penultimate (N-1) nucleotide and as between the penultimate (N-1) nucleotide and the immediately upstream (N-2) nucleotide, and the passenger strand comprises 0-n Rp, Sp, or stereorandom non-negatively charged internucleotidic linkages, where n is about 1 to 49.

7. The double stranded oligonucleotide of claim 1 or the composition of claim 2, wherein the guide strand comprises one or more Rp, Sp, or stereorandom non-negatively charged internucleotidic linkage occurs between any two adjacent nucleotides between the second (+2) nucleotide relative to the 5′ terminal nucleotide of the guide strand and the penultimate 3′ (N-1) nucleotide of the guide strand, where N is the 3′ terminal nucleotide, and the passenger strand comprises 0-n Rp, Sp, or stereorandom non-negatively charged internucleotidic linkages, where n is about 1 to 49.

8. The double stranded oligonucleotide of claim 1 or the composition of claim 2, wherein the guide strand comprises backbone phosphorothioate chiral centers in Sp configuration between the 3′ terminal nucleotide and the penultimate (N-1) nucleotide and as between the penultimate (N-1) nucleotide and the immediately upstream (N-2) nucleotide, and the passenger strand comprises one or more backbone chiral centers in Rp or Sp configuration.

9. The double stranded oligonucleotide of claim 1 or the composition of claim 2, wherein the guide strand comprises backbone phosphorothioate chiral centers in Rp, Sp, or alternating configurations between the 5′ terminal (+1) nucleotide and the immediately downstream (+2) nucleotide and between the +2 nucleotide and the immediately downstream (+3) nucleotide, and the passenger strand comprises one or more backbone chiral centers in Rp or Sp configuration.

10. The double stranded oligonucleotide of claim 1 or the composition of claim 2, wherein the guide strand comprises one or more backbone phosphorothioate chiral centers in Rp or Sp configuration where linkage occurs between any two adjacent nucleotides between the penultimate 3′ nucleotide of the guide strand, where N is the 3′ terminal nucleotide, and the upstream N-10 nucleotide, and the passenger strand comprises one or more backbone chiral centers in Rp or Sp configuration.

11. The double stranded oligonucleotide of claim 1 or the composition of claim 2, wherein the guide strand comprises a backbone phosphoryl guanidine chiral center in the Sp configuration between the +7 and the immediately downstream (+8), i.e., in 3′ the direction, and the passenger strand comprises 0-n Rp, Sp, or stereorandom non-negatively charged internucleotidic linkages, where n is about 1 to 49.

12. The double stranded oligonucleotide of claim 1 or the composition of claim 2, wherein the guide strand comprises a backbone phosphoryl guanidine chiral center in the Sp configuration between the +7 and the immediately downstream (+8), i.e., in 3′ the direction, and the passenger strand comprises one or more backbone chiral centers in Rp or Sp configuration.

13. The double stranded oligonucleotide of claim 1 or the composition of claim 2, wherein the guide strand comprises one or more backbone phosphorothioate chiral centers in Rp or Sp configuration upstream of backbone phosphorothioate chiral centers in Sp configuration between the 3′ terminal nucleotide and the penultimate (N-1) nucleotide and as between the penultimate (N-1) nucleotide and the immediately upstream (N-2) nucleotide, and the passenger strand comprises one or more backbone chiral centers in Rp or Sp configuration.

14. The double stranded oligonucleotide of claim 1 or the composition of claim 2, wherein the guide strand comprises one or more backbone phosphorothioate chiral centers in Rp or Sp configuration between the 5′ terminal (+1) nucleotide and the immediately downstream (+2) nucleotide; and/or between the (+2) nucleotide and the immediately downstream (+3) nucleotide.

15. The double stranded oligonucleotide of claim 1 or the composition of claim 2, wherein the guide strand comprises a 5′ terminal modification selected from: [chemical structure]
Base: A, C, G, T, U, abasic, and modified nucleobases;
R¹: H, OH, O-alkyl, O-Me, F, MOE, LNA bridge to the 4′ position, BNA bridge to the 4′ position.
R²: alkyl, methyl, ethyl, isopropyl, propyl, cyclohexyl, benzyl, phenyl, tolyl, xylyl, aryl, or arene group.

16. The double stranded oligonucleotide or composition of claim 13 wherein the guide strand comprises a 5′ terminal modification selected from 5′ MeP modifications and 5′ Trizole-P modifications.

17. The double stranded oligonucleotide or composition of claim 14 wherein the 5′ MeP modification is

[chemical structure]

18. The double stranded oligonucleotide or composition of claim 15, comprising a backbone phosphorothioate chiral center in Sp configuration between the 5′ terminal (+1) nucleotide and the immediately downstream (+2) nucleotide, and a backbone phosphorothioate chiral center in the Rp configuration between the +2 nucleotide and the immediately downstream (+3) nucleotide.

19. The double stranded oligonucleotide of claim 1 or the composition of claim 2, wherein the guide strand comprises one or more Rp, Sp, or stereorandom non-negatively charged internucleotidic linkage occurs between any two adjacent nucleotides between the second (+2) nucleotide relative to the 5′ terminal nucleotide of the guide strand and the penultimate 3′ (N-1) nucleotide of the guide strand, where N is the 3′ terminal nucleotide, and the passenger strand comprises one or more backbone chiral centers in Rp or Sp configuration.

20. The double stranded oligonucleotide of claim 1 or the composition of claim 2, wherein the guide strand comprises backbone phosphorothioate chiral centers in Sp configuration between the 3′ terminal nucleotide and the penultimate (N-1) nucleotide and as between the penultimate (N-1) nucleotide and the immediately upstream (N-2) nucleotide, and the passenger strand comprises 0-n Rp, Sp, or stereorandom non-negatively charged internucleotidic linkages, where n is about 1 to 49 and one or more backbone chiral centers in Rp or Sp configuration.

21. The double stranded oligonucleotide of claim 1 or the composition of claim 2, wherein the guide strand comprises backbone phosphorothioate chiral centers in Rp, Sp, or alternating configurations between the 5′ terminal (+1) nucleotide and the immediately downstream (+2) nucleotide and between the +2 nucleotide and the immediately downstream (+3) nucleotide, and the passenger strand comprises 0-n Rp, Sp, or stereorandom non-negatively charged internucleotidic linkages, where n is about 1 to 49 and one or more backbone chiral centers in Rp or Sp configuration.

22. The double stranded oligonucleotide of claim 1 or the composition of claim 2, wherein the guide strand comprises one or more backbone phosphorothioate chiral centers in Rp or Sp configuration upstream of backbone phosphorothioate chiral centers in Sp configuration between the 3′ terminal nucleotide and the penultimate (N-1) nucleotide and as between the penultimate (N-1) nucleotide and the immediately upstream (N-2) nucleotide, and the passenger strand comprises 0-n Rp, Sp, or stereorandom non-negatively charged internucleotidic linkages, where n is about 1 to 49 and one or more backbone chiral centers in Rp or Sp configuration.

23. The double stranded oligonucleotide of claim 1 or the composition of claim 2, wherein the guide strand comprises one or more Rp, Sp, or stereorandom non-negatively charged internucleotidic linkage occurs between any two adjacent nucleotides between the second (+2) nucleotide relative to the 5′ terminal nucleotide of the guide strand and the penultimate 3′ (N-1) nucleotide of the guide strand, where N is the 3′ terminal nucleotide, and the passenger strand comprises 0-n non-negatively charged internucleotidic linkages, where n is about 1 to 49 and one or more backbone chiral centers in Rp or Sp configuration.

24. The double stranded oligonucleotide or composition of any one of the preceding claims, wherein the Rp, Sp, or stereorandom non-negatively charged backbone internucleotidic linkages have neutral charge.

25. The double stranded oligonucleotide or composition of claim 24, wherein the neutral backbone internucleotidic linkages is

[chemical structure]

26. The double stranded oligonucleotide or composition of claim 25, wherein the guide strand comprises a linkage having the following structure [chemical structure]
between the third (+3) and fourth (+4) nucleotides of the guide strand, between the tenth (+10) and eleventh (+11) nucleotides of the guide strand, or both.

27. The double stranded oligonucleotide or composition of claim 25, wherein the guide strand comprises a linkage having the following structure [chemical structure]
between the third (+3) and fourth (+4) nucleotides of the guide strand, between the seventh (+7) and eighth (+8) nucleotides of the guide strand, between the tenth (+10) and eleventh (+11) nucleotides of the guide strand, between the eighteenth (+18) and nineteenth (+19) nucleotides of the guide strand, or combinations thereof.

28. The double stranded oligonucleotide or composition of claim 25, wherein the passenger strand comprises a linkage having the following structure [chemical structure]
5′ to the central nucleotide of the passenger strand, 3′ to the central nucleotide of the passenger strand, or both.

29. The composition of claim 2, where the guide and passenger strands in the composition that independently share a common base sequence, a common pattern of base modification, a common pattern of sugar modification, and/or a common pattern of internucleotidic linkages are at least 90% f all the guide and passenger strands in the composition.

30. The double stranded oligonucleotide or composition of any of the preceding claims, wherein the double stranded oligonucleotide comprises a carbohydrate moiety connected at a nucleoside or an internucleotide linkage, optionally through a linker.

31. The double stranded oligonucleotide or composition of any of the preceding claims, wherein the double stranded oligonucleotide comprises a lipid moiety connected to the double stranded oligonucleotide at a nucleoside or an internucleotide linkage, optionally through a linker.

32. The double stranded oligonucleotide or composition of any of the preceding claims, wherein one or both strands of the double stranded oligonucleotide comprises a target moiety connected at a nucleobase, optionally through a linker.

33. The double stranded oligonucleotide or composition of any one of the preceding claims, wherein at least 20%, 25%, 30%, 35%, 40%, 45%, 50%, 55%, 60%, 65%, 70%, 75%, 80%, 85%, 90% or 95% of the internucleotidic linkages of the double stranded oligonucleotide are independently chiral internucleotidic linkages.

34. The double stranded oligonucleotide or composition of any one of the preceding claims, wherein at least 3%, 5%, 10%, 15%, 20%, 25%, 30%, 35%, 40%, 45%, 50%, 55%, 60%, 65%, 70%, 75%, 80%, 85%, 90%, 95%, or 97% f the nucleotidic units of the double stranded oligonucleotide independently comprise a 2′-substitution.

35. The double stranded oligonucleotide or composition of any one of the preceding claims, wherein a modified sugar of the oligonucleotide comprises a 2′-F modification, 2′-OH modification, 2′-OMe modification, 2′-O—C16 lipid modification, 5′-alkyl modification, 2′-MOE modification, DNA, LNA, UNA, GNA, or a Homo-DNA.

36. The double stranded oligonucleotide or composition of any one of the preceding claims, wherein a modified sugar of the oligonucleotide is at one position or a plurality of positions.

37. The double stranded oligonucleotide or composition of any one of the preceding claims, wherein a modified sugar of the oligonucleotide is at one or more of: (a) position +1; (b) position +2; (c) position +3; (d) position +4; (e) position +5; and (f) position +6.

38. The double stranded oligonucleotide or composition of claims 35-37, wherein a modified sugar of the oligonucleotide is at position +4 and wherein the modified sugar of the oligonucleotide is a 2′-F modification.

39. The double stranded oligonucleotide or composition of any one of the preceding claims, wherein a 2′-substitution of the oligonucleotide is -L-, wherein L connects C₂ and C₄ of the sugar unit.

40. The double stranded oligonucleotide or composition of any one of the preceding claims, wherein at least 3%, 5%, 10%, 15%, 20%, 25%, 30%, 35%, 40%, 45%, 50%, 55%, 60%, 65%, 70%, 75%, 80%, 85%, 90%, 95%, or 97% f the nucleotidic units of the double stranded oligonucleotide comprise no 2′-substitution.

41. The double stranded oligonucleotide or composition of any one of the preceding claims, wherein the guide strand comprises a target-binding sequence that is completely complementary to a target sequence, wherein the target-binding sequence has a length of at least 10, 11, 12, 13, 14, 15, 16, 17, 18, 19 or 20 bases, wherein each base is optionally substituted adenine, cytosine, guanosine, thymine, or uracil, and wherein the target sequence comprises one or more allelic sites, wherein an allelic site is a SNP or a mutation.

42. The double stranded oligonucleotide or composition of any one of the preceding claims, wherein the target sequence comprises two SNPs.

43. The double stranded oligonucleotide or composition of any one of the preceding claims, wherein the target sequence comprises an allelic site and the target-binding sequence is completely complementary to the target sequence of a disease-associated allele but not that of an allele less associated with the disease.

44. The double stranded oligonucleotide or composition of any one of the preceding claims, wherein
the double stranded oligonucleotide comprises a guide strand that binds with a transcript of a target nucleic acid sequence for which a plurality of alleles exist within a population, each of which contains a specific nucleotide characteristic sequence element that defines the allele relative to other alleles of the same target nucleic acid sequence,
wherein the base sequence of the guide strand is or comprises a sequence that is complementary to the characteristic sequence element that defines a particular allele, and
the guide strand being characterized in that, when it is contacted with a cell comprising transcripts of target nucleic acid sequence, it shows suppression of transcripts of the particular allele, or a protein encoded thereby, at a level that is greater than a level of suppression observed for another allele of the same nucleic acid sequence.

45. The double stranded oligonucleotide or composition of any one of the preceding claims, wherein the passenger strand comprises:
an Sp backbone phosphorothioate chiral center between the 5′ terminal (+1) nucleotide and the immediately downstream (+2) nucleotide; and
an Sp backbone phosphorothioate chiral center between the penultimate (N-1) nucleotide and the 3′ terminal (N) nucleotide.

46. A method for reducing level and/or activity of a transcript or a protein encoded thereby, comprising administering to a cell expressing the transcript a double stranded oligonucleotide or a composition of any one of the preceding claims, wherein the guide strand of double stranded oligonucleotide or composition comprises a targeting-binding sequence that is completely complementary to a target sequence in the transcript.

47. The method of claim 41 wherein the cell is an immune cell, a blood cell, a cardiac cell, a lung cell, an optic cell, a muscle cell, a liver cell, a kidney cell, a brain cell, a cell of the central nervous system, or a cell of the peripheral nervous system.

48. A method for allele-specific suppression of a transcript from a nucleic acid sequence for which a plurality of alleles exist within a population, each of which contains a specific nucleotide characteristic sequence element that defines the allele relative to other alleles of the same target nucleic acid sequence, the method comprising steps of:
contacting a sample comprising transcripts of the target nucleic acid sequence with a double stranded oligonucleotide or a composition of any one of the preceding claims,
wherein the guide strand of the double stranded oligonucleotide or composition comprises a targeting-binding sequence that is identical or completely complementary to a target sequence in the nucleic acid sequence, which target sequence comprises a characteristic sequence element that defines a particular allele, and
wherein when the guide strand of the double stranded oligonucleotide or composition is contacted with a cell comprising transcripts of both the target allele and another allele of the same nucleic acid sequence, transcripts of the particular allele are suppressed at a greater level than a level of suppression observed for another allele of the same nucleic acid sequence.

49. A method for allele-specific suppression of a transcript from a nucleic acid sequence for which a plurality of alleles exist within a population, each of which contains a specific nucleotide characteristic sequence element that defines the allele relative to other alleles of the same target nucleic acid sequence, the method comprising steps of:
administering to a subject comprising transcripts of the target nucleic acid sequence with a double stranded oligonucleotide or a composition of any one of the preceding claims,
wherein the guide strand of the double stranded oligonucleotide or composition comprises a targeting-binding sequence that is identical or completely complementary to a target sequence in the nucleic acid sequence, which target sequence comprises a characteristic sequence element that defines a particular allele, and
wherein when the guide strand of the double stranded oligonucleotide or composition is contacted with a cell comprising transcripts of both the target allele and another allele of the same nucleic acid sequence, transcripts of the particular allele are suppressed at a greater level than a level of suppression observed for another allele of the same nucleic acid sequence.

50. The method of any one of claims 46-49, wherein when the oligonucleotide or oligonucleotide of the composition is contacted with a cell comprising transcripts of both the target allele and another allele of the same nucleic acid sequence, it shows suppression of transcripts of the particular allele at a level that is:
a) greater than when the composition is absent;
b) greater than a level of suppression observed for another allele of the same nucleic acid sequence; or
c) both greater than when the composition is absent, and greater than a level of suppression observed for another allele of the same nucleic acid sequence.

52. The method of claim 50 wherein the cell is an immune cell, a blood cell, a cardiac cell, a lung cell, an optic cell, a muscle cell, a liver cell, a kidney cell, a brain cell, a cell of the central nervous system, or a cell of the peripheral nervous system.

53. The method of any one of claims 46-52, wherein suppression of transcripts of the particular allele is at a level that is both greater than when the composition is absent, and greater than a level of suppression observed for another allele of the same nucleic acid sequence.

The application's sequence listing, which the Patent Office published only in electronic form, follows.

SEQUENCE LISTING (1018 sequences)

SEQ ID NO: 1 - RNA, 23 nt, synthetic construct
  misc_feature 1..23: note = Synthetic: WV-46497
  misc_feature 1..23: note = Synthetic: SSR-0104701
  modified_base 1: mod_base = um
  modified_base 1..2: mod_base = OTHER; note R-N-(1,3-dimethylimidazolidin-2-ylidene)phosphoramidate
  modified_base 2: mod_base = OTHER; note = 2-fluororibose uracil
  modified_base 2..3: mod_base = OTHER; note = S-phosphorothioate
  modified_base 3: mod_base = OTHER; note = 2-O-methylribose adenine
  modified_base 4: mod_base = um
  modified_base 5: mod_base = OTHER; note = 2-O-methylribose adenine
  modified_base 6: mod_base = OTHER; note = 2-fluororibose guanine
  modified_base 7: mod_base = OTHER; note = 2-O-methylribose adenine
  modified_base 8: mod_base = gm
  modified_base 9: mod_base = cm
  modified_base 10: mod_base = OTHER; note = 2-O-methylribose adenine
  modified_base 11: mod_base = OTHER; note = 2-O-methylribose adenine
  modified_base 12: mod_base = gm
  modified_base 13: mod_base = OTHER; note = 2-O-methylribose adenine
  modified_base 14: mod_base = OTHER; note = 2-fluororibose adenine
  modified_base 15: mod_base = cm
  modified_base 16: mod_base = OTHER; note = 2-fluororibose adenine
  modified_base 17: mod_base = cm
  modified_base 18: mod_base = um
  modified_base 19: mod_base = gm
  modified_base 20: mod_base = um
  modified_base 21: mod_base = um
  modified_base 21..22: mod_base = OTHER; note = S-phosphorothioate
  modified_base 22: mod_base = um
  modified_base 22..23: mod_base = OTHER; note = S-phosphorothioate
  modified_base 23: mod_base = um
  source 1..23: mol_type = other RNA
ttatagagcaagaacactgtttt

SEQ ID NO: 2 - RNA, 23 nt, synthetic construct
  source 1..23: mol_type = other RNA
ttatagagcaagaacactgtttt

SEQ ID NO: 3 - RNA, 23 nt, synthetic construct
  misc_feature 1..23: note = Synthetic: WV-46498
  misc_feature 1..23: note = Synthetic: SSR-0104417
  modified_base 1: mod_base = um
  modified_base 1..2: mod_base = OTHER; note = R-phosphorothioate
  modified_base 2: mod_base = OTHER; note = 2-fluororibose uracil
  modified_base 2..3: mod_base = OTHER; note R-N-(1,3-dimethylimidazolidin-2-ylidene)phosphoramidate
  modified_base 3: mod_base = OTHER; note = 2-O-methylribose adenine
  modified_base 4: mod_base = um
  modified_base 5: mod_base = OTHER; note = 2-O-methylribose adenine
  modified_base 6: mod_base = OTHER; note = 2-fluororibose guanine
  modified_base 7: mod_base = OTHER; note = 2-O-methylribose adenine
  modified_base 8: mod_base = gm
  modified_base 9: mod_base = cm
  modified_base 10: mod_base = OTHER; note = 2-O-methylribose adenine
  modified_base 11: mod_base = OTHER; note = 2-O-methylribose adenine
  modified_base 12: mod_base = gm
  modified_base 13: mod_base = OTHER; note = 2-O-methylribose adenine
  modified_base 14: mod_base = OTHER; note = 2-fluororibose adenine
  modified_base 15: mod_base = cm
  modified_base 16: mod_base = OTHER; note = 2-fluororibose adenine
  modified_base 17: mod_base = cm
  modified_base 18: mod_base = um
  modified_base 19: mod_base = gm
  modified_base 20: mod_base = um
  modified_base 21: mod_base = um
  modified_base 21..22: mod_base = OTHER; note = S-phosphorothioate
  modified_base 22: mod_base = um
  modified_base 22..23: mod_base = OTHER; note = S-phosphorothioate
  modified_base 23: mod_base = um
  source 1..23: mol_type = other RNA
ttatagagcaagaacactgtttt

SEQ ID NO: 4 - RNA, 23 nt, synthetic construct
  misc_feature 1..23: note = Synthetic: WV-46499
  misc_feature 1..23: note = Synthetic: SSR-0104269
  modified_base 1: mod_base = um
  modified_base 1..2: mod_base = OTHER; note = R-phosphorothioate
  modified_base 2: mod_base = OTHER; note = 2-fluororibose uracil
  modified_base 2..3: mod_base = OTHER; note = S-phosphorothioate
  modified_base 3: mod_base = OTHER; note = 2-O-methylribose adenine
  modified_base 3..4: mod_base = OTHER; note R-N-(1,3-dimethylimidazolidin-2-ylidene)phosphoramidate
  modified_base 4: mod_base = um
  modified_base 5: mod_base = OTHER; note = 2-O-methylribose adenine
  modified_base 6: mod_base = OTHER; note = 2-fluororibose guanine
  modified_base 7: mod_base = OTHER; note = 2-O-methylribose adenine
  modified_base 8: mod_base = gm
  modified_base 9: mod_base = cm
  modified_base 10: mod_base = OTHER; note = 2-O-methylribose adenine
  modified_base 11: mod_base = OTHER; note = 2-O-methylribose adenine
  modified_base 12: mod_base = gm
  modified_base 13: mod_base = OTHER; note = 2-O-methylribose adenine
  modified_base 14: mod_base = OTHER; note = 2-fluororibose adenine
  modified_base 15: mod_base = cm
  modified_base 16: mod_base = OTHER; note = 2-fluororibose adenine
  modified_base 17: mod_base = cm
  modified_base 18: mod_base = um
  modified_base 19: mod_base = gm
  modified_base 20: mod_base = um
  modified_base 21: mod_base = um
  modified_base 21..22: mod_base = OTHER; note = S-phosphorothioate
  modified_base 22: mod_base = um
  modified_base 22..23: mod_base = OTHER; note = S-phosphorothioate
  modified_base 23: mod_base = um
  source 1..23: mol_type = other RNA
ttatagagcaagaacactgtttt

SEQ ID NO: 5 - RNA, 23 nt, synthetic construct
  misc_feature 1..23: note = Synthetic: WV-46500
  misc_feature 1..23: note = Synthetic: SSR-0104342
  modified_base 1: mod_base = um
  modified_base 1..2: mod_base = OTHER; note = R-phosphorothioate
  modified_base 2: mod_base = OTHER; note = 2-fluororibose uracil
  modified_base 2..3: mod_base = OTHER; note = S-phosphorothioate
  modified_base 3: mod_base = OTHER; note = 2-O-methylribose adenine
  modified_base 4: mod_base = um
  modified_base 4..5: mod_base = OTHER; note R-N-(1,3-dimethylimidazolidin-2-ylidene)phosphoramidate
  modified_base 5: mod_base = OTHER; note = 2-O-methylribose adenine
  modified_base 6: mod_base = OTHER; note = 2-fluororibose guanine
  modified_base 7: mod_base = OTHER; note = 2-O-methylribose adenine
  modified_base 8: mod_base = gm
  modified_base 9: mod_base = cm
  modified_base 10: mod_base = OTHER; note = 2-O-methylribose adenine
  modified_base 11: mod_base = OTHER; note = 2-O-methylribose adenine
  modified_base 12: mod_base = gm
  modified_base 13: mod_base = OTHER; note = 2-O-methylribose adenine
  modified_base 14: mod_base = OTHER; note = 2-fluororibose adenine
  modified_base 15: mod_base = cm
  modified_base 16: mod_base = OTHER; note = 2-fluororibose adenine
  modified_base 17: mod_base = cm
  modified_base 18: mod_base = um
  modified_base 19: mod_base = gm
  modified_base 20: mod_base = um
  modified_base 21: mod_base = um
  modified_base 21..22: mod_base = OTHER; note = S-phosphorothioate
  modified_base 22: mod_base = um
  modified_base 22..23: mod_base = OTHER; note = S-phosphorothioate
  modified_base 23: mod_base = um
  source 1..23: mol_type = other RNA
ttatagagcaagaacactgtttt

SEQ ID NO: 6 - RNA, 23 nt, synthetic construct
  misc_feature 1..23: note = Synthetic: WV-46501
  misc_feature 1..23: note = Synthetic: SSR-0104345
  modified_base 1: mod_base = um
  modified_base 1..2: mod_base = OTHER; note = R-phosphorothioate
  modified_base 2: mod_base = OTHER; note = 2-fluororibose uracil
  modified_base 2..3: mod_base = OTHER; note = S-phosphorothioate
  modified_base 3: mod_base = OTHER; note = 2-O-methylribose adenine
  modified_base 4: mod_base = um
  modified_base 5: mod_base = OTHER; note = 2-O-methylribose adenine
  modified_base 5..6: mod_base = OTHER; note R-N-(1,3-dimethylimidazolidin-2-ylidene)phosphoramidate
  modified_base 6: mod_base = OTHER; note = 2-fluororibose guanine
  modified_base 7: mod_base = OTHER; note = 2-O-methylribose adenine
  modified_base 8: mod_base = gm
  modified_base 9: mod_base = cm
  modified_base 10: mod_base = OTHER; note = 2-O-methylribose adenine
  modified_base 11: mod_base = OTHER; note = 2-O-methylribose adenine
  modified_base 12: mod_base = gm
  modified_base 13: mod_base = OTHER; note = 2-O-methylribose adenine
  modified_base 14: mod_base = OTHER; note = 2-fluororibose adenine
  modified_base 15: mod_base = cm
  modified_base 16: mod_base = OTHER; note = 2-fluororibose adenine
  modified_base 17: mod_base = cm
  modified_base 18: mod_base = um
  modified_base 19: mod_base = gm
  modified_base 20: mod_base = um
  modified_base 21: mod_base = um
  modified_base 21..22: mod_base = OTHER; note = S-phosphorothioate
  modified_base 22: mod_base = um
  modified_base 22..23: mod_base = OTHER; note = S-phosphorothioate
  modified_base 23: mod_base = um
  source 1..23: mol_type = other RNA
ttatagagcaagaacactgtttt

SEQ ID NO: 7 - RNA, 23 nt, synthetic construct
  misc_feature 1..23: note = Synthetic: WV-46502
  misc_feature 1..23: note = Synthetic: SSR-0104348
  modified_base 1: mod_base = um
  modified_base 1..2: mod_base = OTHER; note = R-phosphorothioate
  modified_base 2: mod_base = OTHER; note = 2-fluororibose uracil
  modified_base 2..3: mod_base = OTHER; note = S-phosphorothioate
  modified_base 3: mod_base = OTHER; note = 2-O-methylribose adenine
  modified_base 4: mod_base = um
  modified_base 5: mod_base = OTHER; note = 2-O-methylribose adenine
  modified_base 6: mod_base = OTHER; note = 2-fluororibose guanine
  modified_base 6..7: mod_base = OTHER; note R-N-(1,3-dimethylimidazolidin-2-ylidene)phosphoramidate
  modified_base 7: mod_base = OTHER; note = 2-O-methylribose adenine
  modified_base 8: mod_base = gm
  modified_base 9: mod_base = cm
  modified_base 10: mod_base = OTHER; note = 2-O-methylribose adenine
  modified_base 11: mod_base = OTHER; note = 2-O-methylribose adenine
  modified_base 12: mod_base = gm
  modified_base 13: mod_base = OTHER; note = 2-O-methylribose adenine
  modified_base 14: mod_base = OTHER; note = 2-fluororibose adenine
  modified_base 15: mod_base = cm
  modified_base 16: mod_base = OTHER; note = 2-fluororibose adenine
  modified_base 17: mod_base = cm
  modified_base 18: mod_base = um
  modified_base 19: mod_base = gm
  modified_base 20: mod_base = um
  modified_base 21: mod_base = um
  modified_base 21..22: mod_base = OTHER; note = S-phosphorothioate
  modified_base 22: mod_base = um
  modified_base 22..23: mod_base = OTHER; note = S-phosphorothioate
  modified_base 23: mod_base = um
  source 1..23: mol_type = other RNA
ttatagagcaagaacactgtttt

SEQ ID NO: 8 - RNA, 23 nt, synthetic construct
  misc_feature 1..23: note = Synthetic: WV-46503
  misc_feature 1..23: note = Synthetic: SSR-0104352
  modified_base 1: mod_base = um
  modified_base 1..2: mod_base = OTHER; note = R-phosphorothioate
  modified_base 2: mod_base = OTHER; note = 2-fluororibose uracil
  modified_base 2..3: mod_base = OTHER; note = S-phosphorothioate
  modified_base 3: mod_base = OTHER; note = 2-O-methylribose adenine
  modified_base 4: mod_base = um
  modified_base 5: mod_base = OTHER; note = 2-O-methylribose adenine
  modified_base 6: mod_base = OTHER; note = 2-fluororibose guanine
  modified_base 7: mod_base = OTHER; note = 2-O-methylribose adenine
  modified_base 7..8: mod_base = OTHER; note R-N-(1,3-dimethylimidazolidin-2-ylidene)phosphoramidate
  modified_base 8: mod_base = gm
  modified_base 9: mod_base = cm
  modified_base 10: mod_base = OTHER; note = 2-O-methylribose adenine
  modified_base 11: mod_base = OTHER; note = 2-O-methylribose adenine
  modified_base 12: mod_base = gm
  modified_base 13: mod_base = OTHER; note = 2-O-methylribose adenine
  modified_base 14: mod_base = OTHER; note = 2-fluororibose adenine
  modified_base 15: mod_base = cm
  modified_base 16: mod_base = OTHER; note = 2-fluororibose adenine
  modified_base 17: mod_base = cm
  modified_base 18: mod_base = um
  modified_base 19: mod_base = gm
  modified_base 20: mod_base = um
  modified_base 21: mod_base = um
  modified_base 21..22: mod_base = OTHER; note = S-phosphorothioate
  modified_base 22: mod_base = um
  modified_base 22..23: mod_base = OTHER; note = S-phosphorothioate
  modified_base 23: mod_base = um
  source 1..23: mol_type = other RNA
ttatagagcaagaacactgtttt

SEQ ID NO: 9 - RNA, 23 nt, synthetic construct
  misc_feature 1..23: note = Synthetic: WV-46504
  misc_feature 1..23: note = Synthetic: SSR-0104357
  modified_base 1: mod_base = um
  modified_base 1..2: mod_base = OTHER; note = R-phosphorothioate
  modified_base 2: mod_base = OTHER; note = 2-fluororibose uracil
  modified_base 2..3: mod_base = OTHER; note = S-phosphorothioate
  modified_base 3: mod_base = OTHER; note = 2-O-methylribose adenine
  modified_base 4: mod_base = um
  modified_base 5: mod_base = OTHER; note = 2-O-methylribose adenine
  modified_base 6: mod_base = OTHER; note = 2-fluororibose guanine
  modified_base 7: mod_base = OTHER; note = 2-O-methylribose adenine
  modified_base 8: mod_base = gm
  modified_base 8..9: mod_base = OTHER; note R-N-(1,3-dimethylimidazolidin-2-ylidene)phosphoramidate
  modified_base 9: mod_base = cm
  modified_base 10: mod_base = OTHER; note = 2-O-methylribose adenine
  modified_base 11: mod_base = OTHER; note = 2-O-methylribose adenine
  modified_base 12: mod_base = gm
  modified_base 13: mod_base = OTHER; note = 2-O-methylribose adenine
  modified_base 14: mod_base = OTHER; note = 2-fluororibose adenine
  modified_base 15: mod_base = cm
  modified_base 16: mod_base = OTHER; note = 2-fluororibose adenine
  modified_base 17: mod_base = cm
  modified_base 18: mod_base = um
  modified_base 19: mod_base = gm
  modified_base 20: mod_base = um
  modified_base 21: mod_base = um
  modified_base 21..22: mod_base = OTHER; note = S-phosphorothioate
  modified_base 22: mod_base = um
  modified_base 22..23: mod_base = OTHER; note = S-phosphorothioate
  modified_base 23: mod_base = um
  source 1..23: mol_type = other RNA
ttatagagcaagaacactgtttt

SEQ ID NO: 10 - RNA, 23 nt, synthetic construct
  misc_feature 1..23: note = Synthetic: WV-46505
  misc_feature 1..23: note = Synthetic: SSR-0104361
  modified_base 1: mod_base = um
  modified_base 1..2: mod_base = OTHER; note = R-phosphorothioate
  modified_base 2: mod_base = OTHER; note = 2-fluororibose uracil
  modified_base 2..3: mod_base = OTHER; note = S-phosphorothioate
  modified_base 3: mod_base = OTHER; note = 2-O-methylribose adenine
  modified_base 4: mod_base = um
  modified_base 5: mod_base = OTHER; note = 2-O-methylribose adenine
  modified_base 6: mod_base = OTHER; note = 2-fluororibose guanine
  modified_base 7: mod_base = OTHER; note = 2-O-methylribose adenine
  modified_base 8: mod_base = gm
  modified_base 9: mod_base = cm
  modified_base 9..10: mod_base = OTHER; note R-N-(1,3-dimethylimidazolidin-2-ylidene)phosphoramidate
  modified_base 10: mod_base = OTHER; note = 2-O-methylribose adenine
  modified_base 11: mod_base = OTHER; note = 2-O-methylribose adenine
  modified_base 12: mod_base = gm
  modified_base 13: mod_base = OTHER; note = 2-O-methylribose adenine
  modified_base 14: mod_base = OTHER; note = 2-fluororibose adenine
  modified_base 15: mod_base = cm
  modified_base 16: mod_base = OTHER; note = 2-fluororibose adenine
  modified_base 17: mod_base = cm
  modified_base 18: mod_base = um
  modified_base 19: mod_base = gm
  modified_base 20: mod_base = um
  modified_base 21: mod_base = um
  modified_base 21..22: mod_base = OTHER; note = S-phosphorothioate
  modified_base 22: mod_base = um
  modified_base 22..23: mod_base = OTHER; note = S-phosphorothioate
  modified_base 23: mod_base = um
  source 1..23: mol_type = other RNA
ttatagagcaagaacactgtttt

SEQ ID NO: 11 - RNA, 23 nt, synthetic construct
  misc_feature 1..23: note = Synthetic: WV-46506
  misc_feature 1..23: note = Synthetic: SSR-0104366
  modified_base 1: mod_base = um
  modified_base 1..2: mod_base = OTHER; note = R-phosphorothioate
  modified_base 2: mod_base = OTHER; note = 2-fluororibose uracil
  modified_base 2..3: mod_base = OTHER; note = S-phosphorothioate
  modified_base 3: mod_base = OTHER; note = 2-O-methylribose adenine
  modified_base 4: mod_base = um
  modified_base 5: mod_base = OTHER; note = 2-O-methylribose adenine
  modified_base 6: mod_base = OTHER; note = 2-fluororibose guanine
  modified_base 7: mod_base = OTHER; note = 2-O-methylribose adenine
  modified_base 8: mod_base = gm
  modified_base 9: mod_base = cm
  modified_base 10: mod_base = OTHER; note = 2-O-methylribose adenine
  modified_base 10..11: mod_base = OTHER; note R-N-(1,3-dimethylimidazolidin-2-ylidene)phosphoramidate
  modified_base 11: mod_base = OTHER; note = 2-O-methylribose adenine
  modified_base 12: mod_base = gm
  modified_base 13: mod_base = OTHER; note = 2-O-methylribose adenine
  modified_base 14: mod_base = OTHER; note = 2-fluororibose adenine
  modified_base 15: mod_base = cm
  modified_base 16: mod_base = OTHER; note = 2-fluororibose adenine
  modified_base 17: mod_base = cm
  modified_base 18: mod_base = um
  modified_base 19: mod_base = gm
  modified_base 20: mod_base = um
  modified_base 21: mod_base = um
  modified_base 21..22: mod_base = OTHER; note = S-phosphorothioate
  modified_base 22: mod_base = um
  modified_base 22..23: mod_base = OTHER; note = S-phosphorothioate
  modified_base 23: mod_base = um
  source 1..23: mol_type = other RNA
ttatagagcaagaacactgtttt

SEQ ID NO: 12 - RNA, 23 nt, synthetic construct
  misc_feature 1..23: note = Synthetic: WV-46507
  misc_feature 1..23: note = Synthetic: SSR-0104371
  modified_base 1: mod_base = um
  modified_base 1..2: mod_base = OTHER; note = R-phosphorothioate
  modified_base 2: mod_base = OTHER; note = 2-fluororibose uracil
  modified_base 2..3: mod_base = OTHER; note = S-phosphorothioate
  modified_base 3: mod_base = OTHER; note = 2-O-methylribose adenine
  modified_base 4: mod_base = um
  modified_base 5: mod_base = OTHER; note = 2-O-methylribose adenine
  modified_base 6: mod_base = OTHER; note = 2-fluororibose guanine
  modified_base 7: mod_base = OTHER; note = 2-O-methylribose adenine
  modified_base 8: mod_base = gm
  modified_base 9: mod_base = cm
  modified_base 10: mod_base = OTHER; note = 2-O-methylribose adenine
  modified_base 11: mod_base = OTHER; note = 2-O-methylribose adenine
  modified_base 11..12: mod_base = OTHER; note R-N-(1,3-dimethylimidazolidin-2-ylidene)phosphoramidate
  modified_base 12: mod_base = gm
  modified_base 13: mod_base = OTHER; note = 2-O-methylribose adenine
  modified_base 14: mod_base = OTHER; note = 2-fluororibose adenine
  modified_base 15: mod_base = cm
  modified_base 16: mod_base = OTHER; note = 2-fluororibose adenine
  modified_base 17: mod_base = cm
  modified_base 18: mod_base = um
  modified_base 19: mod_base = gm
  modified_base 20: mod_base = um
  modified_base 21: mod_base = um
  modified_base 21..22: mod_base = OTHER; note = S-phosphorothioate
  modified_base 22: mod_base = um
  modified_base 22..23: mod_base = OTHER; note = S-phosphorothioate
  modified_base 23: mod_base = um
  source 1..23: mol_type = other RNA
ttatagagcaagaacactgtttt

SEQ ID NO: 13 - RNA, 23 nt, synthetic construct
  misc_feature 1..23: note = Synthetic: WV-46508
  misc_feature 1..23: note = Synthetic: SSR-0104375
  modified_base 1: mod_base = um
  modified_base 1..2: mod_base = OTHER; note = R-phosphorothioate
  modified_base 2: mod_base = OTHER; note = 2-fluororibose uracil
  modified_base 2..3: mod_base = OTHER; note = S-phosphorothioate
  modified_base 3: mod_base = OTHER; note = 2-O-methylribose adenine
  modified_base 4: mod_base = um
  modified_base 5: mod_base = OTHER; note = 2-O-methylribose adenine
  modified_base 6: mod_base = OTHER; note = 2-fluororibose guanine
  modified_base 7: mod_base = OTHER; note = 2-O-methylribose adenine
  modified_base 8: mod_base = gm
  modified_base 9: mod_base = cm
  modified_base 10: mod_base = OTHER; note = 2-O-methylribose adenine
  modified_base 11: mod_base = OTHER; note = 2-O-methylribose adenine
  modified_base 12: mod_base = gm
  modified_base 12..13: mod_base = OTHER; note R-N-(1,3-dimethylimidazolidin-2-ylidene)phosphoramidate
  modified_base 13: mod_base = OTHER; note = 2-O-methylribose adenine
  modified_base 14: mod_base = OTHER; note = 2-fluororibose adenine
  modified_base 15: mod_base = cm
  modified_base 16: mod_base = OTHER; note = 2-fluororibose adenine
  modified_base 17: mod_base = cm
  modified_base 18: mod_base = um
  modified_base 19: mod_base = gm
  modified_base 20: mod_base = um
  modified_base 21: mod_base = um
  modified_base 21..22: mod_base = OTHER; note = S-phosphorothioate
  modified_base 22: mod_base = um
  modified_base 22..23: mod_base = OTHER; note = S-phosphorothioate
  modified_base 23: mod_base = um
  source 1..23: mol_type = other RNA
ttatagagcaagaacactgtttt

SEQ ID NO: 14 - RNA, 23 nt, synthetic construct
  misc_feature 1..23: note = Synthetic: WV-46509
  misc_feature 1..23: note = Synthetic: SSR-0104378
  modified_base 1: mod_base = um
  modified_base 1..2: mod_base = OTHER; note = R-phosphorothioate
  modified_base 2: mod_base = OTHER; note = 2-fluororibose uracil
  modified_base 2..3: mod_base = OTHER; note = S-phosphorothioate
  modified_base 3: mod_base = OTHER; note = 2-O-methylribose adenine
  modified_base 4: mod_base = um
  modified_base 5: mod_base = OTHER; note = 2-O-methylribose adenine
  modified_base 6: mod_base = OTHER; note = 2-fluororibose guanine
  modified_base 7: mod_base = OTHER; note = 2-O-methylribose adenine
  modified_base 8: mod_base = gm
  modified_base 9: mod_base = cm
  modified_base 10: mod_base = OTHER; note = 2-O-methylribose adenine
  modified_base 11: mod_base = OTHER; note = 2-O-methylribose adenine
  modified_base 12: mod_base = gm
  modified_base 13: mod_base = OTHER; note = 2-O-methylribose adenine
  modified_base 13..14: mod_base = OTHER; note R-N-(1,3-dimethylimidazolidin-2-ylidene)phosphoramidate
  modified_base 14: mod_base = OTHER; note = 2-fluororibose adenine
  modified_base 15: mod_base = cm
  modified_base 16: mod_base = OTHER; note = 2-fluororibose adenine
  modified_base 17: mod_base = cm
  modified_base 18: mod_base = um
  modified_base 19: mod_base = gm
  modified_base 20: mod_base = um
  modified_base 21: mod_base = um
  modified_base 21..22: mod_base = OTHER; note = S-phosphorothioate
  modified_base 22: mod_base = um
  modified_base 22..23: mod_base = OTHER; note = S-phosphorothioate
  modified_base 23: mod_base = um
  source 1..23: mol_type = other RNA
ttatagagcaagaacactgtttt

SEQ ID NO: 15 - RNA, 23 nt, synthetic construct
  misc_feature 1..23: note = Synthetic: WV-46510
  misc_feature 1..23: note = Synthetic: SSR-0104381
  modified_base 1: mod_base = um
  modified_base 1..2: mod_base = OTHER; note = R-phosphorothioate
  modified_base 2: mod_base = OTHER; note = 2-fluororibose uracil
  modified_base 2..3: mod_base = OTHER; note = S-phosphorothioate
  modified_base 3: mod_base = OTHER; note = 2-O-methylribose adenine
  modified_base 4: mod_base = um
  modified_base 5: mod_base = OTHER; note = 2-O-methylribose adenine
  modified_base 6: mod_base = OTHER; note = 2-fluororibose guanine
  modified_base 7: mod_base = OTHER; note = 2-O-methylribose adenine
  modified_base 8: mod_base = gm
  modified_base 9: mod_base = cm
  modified_base 10: mod_base = OTHER; note = 2-O-methylribose adenine
  modified_base 11: mod_base = OTHER; note = 2-O-methylribose adenine
  modified_base 12: mod_base = gm
  modified_base 13: mod_base = OTHER; note = 2-O-methylribose adenine
  modified_base 14: mod_base = OTHER; note = 2-fluororibose adenine
  modified_base 14..15: mod_base = OTHER; note R-N-(1,3-dimethylimidazolidin-2-ylidene)phosphoramidate
  modified_base 15: mod_base = cm
  modified_base 16: mod_base = OTHER; note = 2-fluororibose adenine
  modified_base 17: mod_base = cm
  modified_base 18: mod_base = um
  modified_base 19: mod_base = gm
  modified_base 20: mod_base = um
  modified_base 21: mod_base = um
  modified_base 21..22: mod_base = OTHER; note = S-phosphorothioate
  modified_base 22: mod_base = um
  modified_base 22..23: mod_base = OTHER; note = S-phosphorothioate
  modified_base 23: mod_base = um
  source 1..23: mol_type = other RNA
ttatagagcaagaacactgtttt

SEQ ID NO: 16 - RNA, 23 nt, synthetic construct
  misc_feature 1..23: note = Synthetic: WV-46511
  misc_feature 1..23: note = Synthetic: SSR-0104384
  modified_base 1: mod_base = um
  modified_base 1..2: mod_base = OTHER; note = R-phosphorothioate
  modified_base 2: mod_base = OTHER; note = 2-fluororibose uracil
  modified_base 2..3: mod_base = OTHER; note = S-phosphorothioate
  modified_base 3: mod_base = OTHER; note = 2-O-methylribose adenine
  modified_base 4: mod_base = um
  modified_base 5: mod_base = OTHER; note = 2-O-methylribose adenine
  modified_base 6: mod_base = OTHER; note = 2-fluororibose guanine
  modified_base 7: mod_base = OTHER; note = 2-O-methylribose adenine
  modified_base 8: mod_base = gm
  modified_base 9: mod_base = cm
  modified_base 10: mod_base = OTHER; note = 2-O-methylribose adenine
  modified_base 11: mod_base = OTHER; note = 2-O-methylribose adenine
  modified_base 12: mod_base = gm
  modified_base 13: mod_base = OTHER; note = 2-O-methylribose adenine
  modified_base 14: mod_base = OTHER; note = 2-fluororibose adenine
  modified_base 15: mod_base = cm
  modified_base 15..16: mod_base = OTHER; note R-N-(1,3-dimethylimidazolidin-2-ylidene)phosphoramidate
  modified_base 16: mod_base = OTHER; note = 2-fluororibose adenine
  modified_base 17: mod_base = cm
  modified_base 18: mod_base = um
  modified_base 19: mod_base = gm
  modified_base 20: mod_base = um
  modified_base 21: mod_base = um
  modified_base 21..22: mod_base = OTHER; note = S-phosphorothioate
  modified_base 22: mod_base = um
  modified_base 22..23: mod_base = OTHER; note = S-phosphorothioate
  modified_base 23: mod_base = um
  source 1..23: mol_type = other RNA
ttatagagcaagaacactgtttt

SEQ ID NO: 17 - RNA, 23 nt, synthetic construct
  misc_feature 1..23: note = Synthetic: WV-46512
  misc_feature 1..23: note = Synthetic: SSR-0104387
  modified_base 1: mod_base = um
  modified_base 1..2: mod_base = OTHER; note = R-phosphorothioate
  modified_base 2: mod_base = OTHER; note = 2-fluororibose uracil
  modified_base 2..3: mod_base = OTHER; note = S-phosphorothioate
  modified_base 3: mod_base = OTHER; note = 2-O-methylribose adenine
  modified_base 4: mod_base = um
  modified_base 5: mod_base = OTHER; note = 2-O-methylribose adenine
  modified_base 6: mod_base = OTHER; note = 2-fluororibose guanine
  modified_base 7: mod_base = OTHER; note = 2-O-methylribose adenine
  modified_base 8: mod_base = gm
  modified_base 9: mod_base = cm
  modified_base 10: mod_base = OTHER; note = 2-O-methylribose adenine
  modified_base 11: mod_base = OTHER; note = 2-O-methylribose adenine
  modified_base 12: mod_base = gm
  modified_base 13: mod_base = OTHER; note = 2-O-methylribose adenine
  modified_base 14: mod_base = OTHER; note = 2-fluororibose adenine
  modified_base 15: mod_base = cm
  modified_base 16: mod_base = OTHER; note = 2-fluororibose adenine
  modified_base 16..17: mod_base = OTHER; note R-N-(1,3-dimethylimidazolidin-2-ylidene)phosphoramidate
  modified_base 17: mod_base = cm
  modified_base 18: mod_base = um
  modified_base 19: mod_base = gm
  modified_base 20: mod_base = um
  modified_base 21: mod_base = um
  modified_base 21..22: mod_base = OTHER; note = S-phosphorothioate
  modified_base 22: mod_base = um
  modified_base 22..23: mod_base = OTHER; note = S-phosphorothioate
  modified_base 23: mod_base = um
  source 1..23: mol_type = other RNA
ttatagagcaagaacactgtttt

SEQ ID NO: 18 - RNA, 23 nt, synthetic construct
  misc_feature 1..23: note = Synthetic: WV-46513
  misc_feature 1..23: note = Synthetic: SSR-0104391
  modified_base 1: mod_base = um
  modified_base 1..2: mod_base = OTHER; note = R-phosphorothioate
  modified_base 2: mod_base = OTHER; note = 2-fluororibose uracil
  modified_base 2..3: mod_base = OTHER; note = S-phosphorothioate
  modified_base 3: mod_base = OTHER; note = 2-O-methylribose adenine
  modified_base 4: mod_base = um
  modified_base 5: mod_base = OTHER; note = 2-O-methylribose adenine
  modified_base 6: mod_base = OTHER; note = 2-fluororibose guanine
  modified_base 7: mod_base = OTHER; note = 2-O-methylribose adenine
  modified_base 8: mod_base = gm
  modified_base 9: mod_base = cm
  modified_base 10: mod_base = OTHER; note = 2-O-methylribose adenine
  modified_base 11: mod_base = OTHER; note = 2-O-methylribose adenine
  modified_base 12: mod_base = gm
  modified_base 13: mod_base = OTHER; note = 2-O-methylribose adenine
  modified_base 14: mod_base = OTHER; note = 2-fluororibose adenine
  modified_base 15: mod_base = cm
  modified_base 16: mod_base = OTHER; note = 2-fluororibose adenine
  modified_base 17: mod_base = cm
  modified_base 17..18: mod_base = OTHER; note R-N-(1,3-dimethylimidazolidin-2-ylidene)phosphoramidate
  modified_base 18: mod_base = um
  modified_base 19: mod_base = gm
  modified_base 20: mod_base = um
  modified_base 21: mod_base = um
  modified_base 21..22: mod_base = OTHER; note = S-phosphorothioate
  modified_base 22: mod_base = um
  modified_base 22..23: mod_base = OTHER; note = S-phosphorothioate
  modified_base 23: mod_base = um
  source 1..23: mol_type = other RNA
ttatagagcaagaacactgtttt

SEQ ID NO: 19 - RNA, 23 nt, synthetic construct
  misc_feature 1..23: note = Synthetic: WV-46514
  misc_feature 1..23: note = Synthetic: SSR-0104395
  modified_base 1: mod_base = um
  modified_base 1..2: mod_base = OTHER; note = R-phosphorothioate
  modified_base 2: mod_base = OTHER; note = 2-fluororibose uracil
  modified_base 2..3: mod_base = OTHER; note = S-phosphorothioate
  modified_base 3: mod_base = OTHER; note = 2-O-methylribose adenine
  modified_base 4: mod_base = um
  modified_base 5: mod_base = OTHER; note = 2-O-methylribose adenine
  modified_base 6: mod_base = OTHER; note = 2-fluororibose guanine
  modified_base 7: mod_base = OTHER; note = 2-O-methylribose adenine
  modified_base 8: mod_base = gm
  modified_base 9: mod_base = cm
  modified_base 10: mod_base = OTHER; note = 2-O-methylribose adenine
  modified_base 11: mod_base = OTHER; note = 2-O-methylribose adenine
  modified_base 12: mod_base = gm
  modified_base 13: mod_base = OTHER; note = 2-O-methylribose adenine
  modified_base 14: mod_base = OTHER; note = 2-fluororibose adenine
  modified_base 15: mod_base = cm
  modified_base 16: mod_base = OTHER; note = 2-fluororibose adenine
  modified_base 17: mod_base = cm
  modified_base 18: mod_base = um
  modified_base 18..19: mod_base = OTHER; note R-N-(1,3-dimethylimidazolidin-2-ylidene)phosphoramidate
  modified_base 19: mod_base = gm
  modified_base 20: mod_base = um
  modified_base 21: mod_base = um
  modified_base 21..22: mod_base = OTHER; note = S-phosphorothioate
  modified_base 22: mod_base = um
  modified_base 22..23: mod_base = OTHER; note = S-phosphorothioate
  modified_base 23: mod_base = um
  source 1..23: mol_type = other RNA
ttatagagcaagaacactgtttt

SEQ ID NO: 20 - RNA, 23 nt, synthetic construct
  misc_feature 1..23: note = Synthetic: WV-46515
  misc_feature 1..23: note = Synthetic: SSR-0104399
  modified_base 1: mod_base = um
  modified_base 1..2: mod_base = OTHER; note = R-phosphorothioate
  modified_base 2: mod_base = OTHER; note = 2-fluororibose uracil
  modified_base 2..3: mod_base = OTHER; note = S-phosphorothioate
  modified_base 3: mod_base = OTHER; note = 2-O-methylribose adenine
  modified_base 4: mod_base = um
  modified_base 5: mod_base = OTHER; note = 2-O-methylribose adenine
  modified_base 6: mod_base = OTHER; note = 2-fluororibose guanine
  modified_base 7: mod_base = OTHER; note = 2-O-methylribose adenine
  modified_base 8: mod_base = gm
  modified_base 9: mod_base = cm
  modified_base 10: mod_base = OTHER; note = 2-O-methylribose adenine
  modified_base 11: mod_base = OTHER; note = 2-O-methylribose adenine
  modified_base 12: mod_base = gm
  modified_base 13: mod_base = OTHER; note = 2-O-methylribose adenine
  modified_base 14: mod_base = OTHER; note = 2-fluororibose adenine
  modified_base 15: mod_base = cm
  modified_base 16: mod_base = OTHER; note = 2-fluororibose adenine
  modified_base 17: mod_base = cm
  modified_base 18: mod_base = um
  modified_base 19: mod_base = gm
  modified_base 19..20: mod_base = OTHER; note R-N-(1,3-dimethylimidazolidin-2-ylidene)phosphoramidate
  modified_base 20: mod_base = um
  modified_base 21: mod_base = um
  modified_base 21..22: mod_base = OTHER; note = S-phosphorothioate
  modified_base 22: mod_base = um
  modified_base 22..23: mod_base = OTHER; note = S-phosphorothioate
  modified_base 23: mod_base = um
  source 1..23: mol_type = other RNA
ttatagagcaagaacactgtttt

SEQ ID NO: 21 - RNA, 23 nt, synthetic construct
  misc_feature 1..23: note = Synthetic: WV-46516
  misc_feature 1..23: note = Synthetic: SSR-0104403
  modified_base 1: mod_base = um
  modified_base 1..2: mod_base = OTHER; note = R-phosphorothioate
  modified_base 2: mod_base = OTHER; note = 2-fluororibose uracil
  modified_base 2..3: mod_base = OTHER; note = S-phosphorothioate
  modified_base 3: mod_base = OTHER; note = 2-O-methylribose adenine
  modified_base 4: mod_base = um
  modified_base 5: mod_base = OTHER; note = 2-O-methylribose adenine
  modified_base 6: mod_base = OTHER; note = 2-fluororibose guanine
  modified_base 7: mod_base = OTHER; note = 2-O-methylribose adenine
  modified_base 8: mod_base = gm
  modified_base 9: mod_base = cm
  modified_base 10: mod_base = OTHER; note = 2-O-methylribose adenine
  modified_base 11: mod_base = OTHER; note = 2-O-methylribose adenine
  modified_base 12: mod_base = gm
  modified_base 13: mod_base = OTHER; note = 2-O-methylribose adenine
  modified_base 14: mod_base = OTHER; note = 2-fluororibose adenine
  modified_base 15: mod_base = cm
  modified_base 16: mod_base = OTHER; note = 2-fluororibose adenine
  modified_base 17: mod_base = cm
  modified_base 18: mod_base = um
  modified_base 19: mod_base = gm
  modified_base 20: mod_base = um
  modified_base 20..21: mod_base = OTHER; note R-N-(1,3-dimethylimidazolidin-2-ylidene)phosphoramidate
  modified_base 21: mod_base = um
  modified_base 21..22: mod_base = OTHER; note = S-phosphorothioate
  modified_base 22: mod_base = um
  modified_base 22..23: mod_base = OTHER; note = S-phosphorothioate
  modified_base 23: mod_base = um
  source 1..23: mol_type = other RNA
ttatagagcaagaacactgtttt

SEQ ID NO: 22 - RNA, 23 nt, synthetic construct
  misc_feature 1..23: note = Synthetic: WV-46517
  misc_feature 1..23: note = Synthetic: SSR-0104412
  modified_base 1: mod_base = um
  modified_base 1..2: mod_base = OTHER; note = R-phosphorothioate
  modified_base 2: mod_base = OTHER; note = 2-fluororibose uracil
  modified_base 2..3: mod_base = OTHER; note = S-phosphorothioate
  modified_base 3: mod_base = OTHER; note = 2-O-methylribose adenine
  modified_base 4: mod_base = um
  modified_base 5: mod_base = OTHER; note = 2-O-methylribose adenine
  modified_base 6: mod_base = OTHER; note = 2-fluororibose guanine
  modified_base 7: mod_base = OTHER; note = 2-O-methylribose adenine
  modified_base 8: mod_base = gm
  modified_base 9: mod_base = cm
  modified_base 10: mod_base = OTHER; note = 2-O-methylribose adenine
  modified_base 11: mod_base = OTHER; note = 2-O-methylribose adenine
  modified_base 12: mod_base = gm
  modified_base 13: mod_base = OTHER; note = 2-O-methylribose adenine
  modified_base 14: mod_base = OTHER; note = 2-fluororibose adenine
  modified_base 15: mod_base = cm
  modified_base 16: mod_base = OTHER; note = 2-fluororibose adenine
  modified_base 17: mod_base = cm
  modified_base 18: mod_base = um
  modified_base 19: mod_base = gm
  modified_base 20: mod_base = um
  modified_base 21: mod_base = um
  modified_base 21..22: mod_base = OTHER; note R-N-(1,3-dimethylimidazolidin-2-ylidene)phosphoramidate
  modified_base 22: mod_base = um
  modified_base 22..23: mod_base = OTHER; note = S-phosphorothioate
  modified_base 23: mod_base = um
  source 1..23: mol_type = other RNA
ttatagagcaagaacactgtttt

SEQ ID NO: 23 - RNA, 23 nt, synthetic construct
  misc_feature 1..23: note = Synthetic: WV-46518
  misc_feature 1..23: note = Synthetic: SSR-0104408
  modified_base 1: mod_base = um
  modified_base 1..2: mod_base = OTHER; note = R-phosphorothioate
  modified_base 2: mod_base = OTHER; note = 2-fluororibose uracil
  modified_base 2..3: mod_base = OTHER; note = S-phosphorothioate
  modified_base 3: mod_base = OTHER; note = 2-O-methylribose adenine
  modified_base 4: mod_base = um
  modified_base 5: mod_base = OTHER; note = 2-O-methylribose adenine
  modified_base 6: mod_base = OTHER; note = 2-fluororibose guanine
  modified_base 7: mod_base = OTHER; note = 2-O-methylribose adenine
  modified_base 8: mod_base = gm
  modified_base 9: mod_base = cm
  modified_base 10: mod_base = OTHER; note = 2-O-methylribose adenine
  modified_base 11: mod_base = OTHER; note = 2-O-methylribose adenine
  modified_base 12: mod_base = gm
  modified_base 13: mod_base = OTHER; note = 2-O-methylribose adenine
  modified_base 14: mod_base = OTHER; note = 2-fluororibose adenine
  modified_base 15: mod_base = cm
  modified_base 16: mod_base = OTHER; note = 2-fluororibose adenine
  modified_base 17: mod_base = cm
  modified_base 18: mod_base = um
  modified_base 19: mod_base = gm
  modified_base 20: mod_base = um
  modified_base 21: mod_base = um
  modified_base 21..22: mod_base = OTHER; note = S-phosphorothioate
  modified_base 22: mod_base = um
  modified_base 22..23: mod_base = OTHER; note R-N-(1,3-dimethylimidazolidin-2-ylidene)phosphoramidate
  modified_base 23: mod_base = um
  source 1..23: mol_type = other RNA
ttatagagcaagaacactgtttt

SEQ ID NO: 24 - RNA, 23 nt, synthetic construct
  misc_feature 1..23: note = Synthetic: WV-46519
  misc_feature 1..23: note = Synthetic: SSR-0104706
  modified_base 1: mod_base = um
  modified_base 1..2: mod_base = OTHER; note S-N-(1,3-dimethylimidazolidin-2-ylidene)phosphoramidate
  modified_base 2: mod_base = OTHER; note = 2-fluororibose uracil
  modified_base 2..3: mod_base = OTHER; note = S-phosphorothioate
  modified_base 3: mod_base = OTHER; note = 2-O-methylribose adenine
  modified_base 4: mod_base = um
  modified_base 5: mod_base = OTHER; note = 2-O-methylribose adenine
  modified_base 6: mod_base = OTHER; note = 2-fluororibose guanine
  modified_base 7: mod_base = OTHER; note = 2-O-methylribose adenine
  modified_base 8: mod_base = gm
  modified_base 9: mod_base = cm
  modified_base 10: mod_base = OTHER; note = 2-O-methylribose adenine
  modified_base 11: mod_base = OTHER; note = 2-O-methylribose adenine
  modified_base 12: mod_base = gm
  modified_base 13: mod_base = OTHER; note = 2-O-methylribose adenine
  modified_base 14: mod_base = OTHER; note = 2-fluororibose adenine
  modified_base 15: mod_base = cm
  modified_base 16: mod_base = OTHER; note = 2-fluororibose adenine
  modified_base 17: mod_base = cm
  modified_base 18: mod_base = um
  modified_base 19: mod_base = gm
  modified_base 20: mod_base = um
  modified_base 21: mod_base = um
  modified_base 21..22: mod_base = OTHER; note = S-phosphorothioate
  modified_base 22: mod_base = um
  modified_base 22..23: mod_base = OTHER; note = S-phosphorothioate
  modified_base 23: mod_base = um
  source 1..23: mol_type = other RNA
ttatagagcaagaacactgtttt

SEQ ID NO: 25 - RNA, 23 nt, synthetic construct
  misc_feature 1..23: note = Synthetic: WV-46520
  misc_feature 1..23: note = Synthetic: SSR-0104420
  modified_base 1: mod_base = um
  modified_base 1..2: mod_base = OTHER; note = R-phosphorothioate
  modified_base 2: mod_base = OTHER; note = 2-fluororibose uracil
  modified_base 2..3: mod_base = OTHER; note S-N-(1,3-dimethylimidazolidin-2-ylidene)phosphoramidate
  modified_base 3: mod_base = OTHER; note = 2-O-methylribose adenine
  modified_base 4: mod_base = um
  modified_base 5: mod_base = OTHER; note = 2-O-methylribose adenine
  modified_base 6: mod_base = OTHER; note = 2-fluororibose guanine
  modified_base 7: mod_base = OTHER; note = 2-O-methylribose adenine
  modified_base 8: mod_base = gm
  modified_base 9: mod_base = cm
  modified_base 10: mod_base = OTHER; note = 2-O-methylribose adenine
  modified_base 11: mod_base = OTHER; note = 2-O-methylribose adenine
  modified_base 12: mod_base = gm
  modified_base 13: mod_base = OTHER; note = 2-O-methylribose adenine
  modified_base 14: mod_base = OTHER; note = 2-fluororibose adenine
  modified_base 15: mod_base = cm
  modified_base 16: mod_base = OTHER; note = 2-fluororibose adenine
  modified_base 17: mod_base = cm
  modified_base 18: mod_base = um
  modified_base 19: mod_base = gm
  modified_base 20: mod_base = um
  modified_base 21: mod_base = um
  modified_base 21..22: mod_base = OTHER; note = S-phosphorothioate
  modified_base 22: mod_base = um
  modified_base 22..23: mod_base = OTHER; note = S-phosphorothioate
  modified_base 23: mod_base = um
  source 1..23: mol_type = other RNA
ttatagagcaagaacactgtttt

SEQ ID NO: 26 - RNA, 23 nt, synthetic construct
  misc_feature 1..23: note = Synthetic: WV-45148
  misc_feature 1..23: note = Synthetic: SSR-0104293
  modified_base 1: mod_base = um
  modified_base 1..2: mod_base = OTHER; note = R-phosphorothioate
  modified_base 2: mod_base = OTHER; note = 2-fluororibose uracil
  modified_base 2..3: mod_base = OTHER; note = S-phosphorothioate
  modified_base 3: mod_base = OTHER; note = 2-O-methylribose adenine
  modified_base 3..4: mod_base = OTHER; note S-N-(1,3-dimethylimidazolidin-2-ylidene)phosphoramidate
  modified_base 4: mod_base = um
  modified_base 5: mod_base = OTHER; note = 2-O-methylribose adenine
  modified_base 6: mod_base = OTHER; note = 2-fluororibose guanine
  modified_base 7: mod_base = OTHER; note = 2-O-methylribose adenine
  modified_base 8: mod_base = gm
  modified_base 9: mod_base = cm
  modified_base 10: mod_base = OTHER; note = 2-O-methylribose adenine
  modified_base 11: mod_base = OTHER; note = 2-O-methylribose adenine
  modified_base 12: mod_base = gm
  modified_base 13: mod_base = OTHER; note = 2-O-methylribose adenine
  modified_base 14: mod_base = OTHER; note = 2-fluororibose adenine
  modified_base 15: mod_base = cm
  modified_base 16: mod_base = OTHER; note = 2-fluororibose adenine
  modified_base 17: mod_base = cm
  modified_base 18: mod_base = um
  modified_base 19: mod_base = gm
  modified_base 20: mod_base = um
  modified_base 21: mod_base = um
  modified_base 21..22: mod_base = OTHER; note = S-phosphorothioate
  modified_base 22: mod_base = um
  modified_base 22..23: mod_base = OTHER; note = S-phosphorothioate
  modified_base 23: mod_base = um
  source 1..23: mol_type = other RNA
ttatagagcaagaacactgtttt

SEQ ID NO: 27 - RNA, 23 nt, synthetic construct
  misc_feature 1..23: note = Synthetic: WV-46521
  misc_feature 1..23: note = Synthetic: SSR-0104344
  modified_base 1: mod_base = um
  modified_base 1..2: mod_base = OTHER; note = R-phosphorothioate
  modified_base 2: mod_base = OTHER; note = 2-fluororibose uracil
  modified_base 2..3: mod_base = OTHER; note = S-phosphorothioate
  modified_base 3: mod_base = OTHER; note = 2-O-methylribose adenine
  modified_base 4: mod_base = um
  modified_base 4..5: mod_base = OTHER; note S-N-(1,3-dimethylimidazolidin-2-ylidene)phosphoramidate
  modified_base 5: mod_base = OTHER; note = 2-O-methylribose adenine
  modified_base 6: mod_base = OTHER; note = 2-fluororibose guanine
  modified_base 7: mod_base = OTHER; note = 2-O-methylribose adenine
  modified_base 8: mod_base = gm
  modified_base 9: mod_base = cm
  modified_base 10: mod_base = OTHER; note = 2-O-methylribose adenine
  modified_base 11: mod_base = OTHER; note = 2-O-methylribose adenine
  modified_base 12: mod_base = gm
  modified_base 13: mod_base = OTHER; note = 2-O-methylribose adenine
  modified_base 14: mod_base = OTHER; note = 2-fluororibose adenine
  modified_base 15: mod_base = cm
  modified_base 16: mod_base = OTHER; note = 2-fluororibose adenine
  modified_base 17: mod_base = cm
  modified_base 18: mod_base = um
  modified_base 19: mod_base = gm
  modified_base 20: mod_base = um
  modified_base 21: mod_base = um
  modified_base 21..22: mod_base = OTHER; note = S-phosphorothioate
  modified_base 22: mod_base = um
  modified_base 22..23: mod_base = OTHER; note = S-phosphorothioate
  modified_base 23: mod_base = um
  source 1..23: mol_type = other RNA
ttatagagcaagaacactgtttt

SEQ ID NO: 28 - RNA, 23 nt, synthetic construct
  misc_feature 1..23: note = Synthetic: WV-46522
  misc_feature 1..23: note = Synthetic: SSR-0104346
  modified_base 1: mod_base = um
  modified_base 1..2: mod_base = OTHER; note = R-phosphorothioate
  modified_base 2: mod_base = OTHER; note = 2-fluororibose uracil
  modified_base 2..3: mod_base = OTHER; note = S-phosphorothioate
  modified_base 3: mod_base = OTHER; note = 2-O-methylribose adenine
  modified_base 4: mod_base = um
  modified_base 5: mod_base = OTHER; note = 2-O-methylribose adenine
  modified_base 5..6: mod_base = OTHER; note S-N-(1,3-dimethylimidazolidin-2-ylidene)phosphoramidate
  modified_base 6: mod_base = OTHER; note = 2-fluororibose guanine
  modified_base 7: mod_base = OTHER; note = 2-O-methylribose adenine
  modified_base 8: mod_base = gm
  modified_base 9: mod_base = cm
  modified_base 10: mod_base = OTHER; note = 2-O-methylribose adenine
  modified_base 11: mod_base = OTHER; note = 2-O-methylribose adenine
  modified_base 12: mod_base = gm
  modified_base 13: mod_base = OTHER; note = 2-O-methylribose adenine
  modified_base 14: mod_base = OTHER; note = 2-fluororibose adenine
  modified_base 15: mod_base = cm
  modified_base 16: mod_base = OTHER; note = 2-fluororibose adenine
  modified_base 17: mod_base = cm
  modified_base 18: mod_base = um
  modified_base 19: mod_base = gm
  modified_base 20: mod_base = um
  modified_base 21: mod_base = um
  modified_base 21..22: mod_base = OTHER; note = S-phosphorothioate
  modified_base 22: mod_base = um
  modified_base 22..23: mod_base = OTHER; note = S-phosphorothioate
  modified_base 23: mod_base = um
  source 1..23: mol_type = other RNA
ttatagagcaagaacactgtttt

SEQ ID NO: 29 - RNA, 23 nt, synthetic construct
  misc_feature 1..23: note = Synthetic: WV-46523
  misc_feature 1..23: note = Synthetic: SSR-0104350
  modified_base 1: mod_base = um
  modified_base 1..2: mod_base = OTHER; note = R-phosphorothioate
  modified_base 2: mod_base = OTHER; note = 2-fluororibose uracil
  modified_base 2..3: mod_base = OTHER; note = S-phosphorothioate
  modified_base 3: mod_base = OTHER; note = 2-O-methylribose adenine
  modified_base 4: mod_base = um
  modified_base 5: mod_base = OTHER; note = 2-O-methylribose adenine
  modified_base 6: mod_base = OTHER; note = 2-fluororibose guanine
  modified_base 6..7: mod_base = OTHER; note S-N-(1,3-dimethylimidazolidin-2-ylidene)phosphoramidate
  modified_base 7: mod_base = OTHER; note = 2-O-methylribose adenine
  modified_base 8: mod_base = gm
  modified_base 9: mod_base = cm
  modified_base 10: mod_base = OTHER; note = 2-O-methylribose adenine
  modified_base 11: mod_base = OTHER; note = 2-O-methylribose adenine
  modified_base 12: mod_base = gm
  modified_base 13: mod_base = OTHER; note = 2-O-methylribose adenine
  modified_base 14: mod_base = OTHER; note = 2-fluororibose adenine
  modified_base 15: mod_base = cm
  modified_base 16: mod_base = OTHER; note = 2-fluororibose adenine
  modified_base 17: mod_base = cm
  modified_base 18: mod_base = um
  modified_base 19: mod_base = gm
  modified_base 20: mod_base = um
  modified_base 21: mod_base = um
  modified_base 21..22: mod_base = OTHER; note = S-phosphorothioate
  modified_base 22: mod_base = um
  modified_base 22..23: mod_base = OTHER; note = S-phosphorothioate
  modified_base 23: mod_base = um
  source 1..23: mol_type = other RNA
ttatagagcaagaacactgtttt

SEQ ID NO: 30 - RNA, 23 nt, synthetic construct
  misc_feature 1..23: note = Synthetic: WV-46524
  misc_feature 1..23: note = Synthetic: SSR-0104354
  modified_base 1: mod_base = um
  modified_base 1..2: mod_base = OTHER; note = R-phosphorothioate
  modified_base 2: mod_base = OTHER; note = 2-fluororibose uracil
  modified_base 2..3: mod_base = OTHER; note = S-phosphorothioate
  modified_base 3: mod_base = OTHER; note = 2-O-methylribose adenine
  modified_base 4: mod_base = um
  modified_base 5: mod_base = OTHER; note = 2-O-methylribose adenine
  modified_base 6: mod_base = OTHER; note = 2-fluororibose guanine
  modified_base 7: mod_base = OTHER; note = 2-O-methylribose adenine
  modified_base 7..8: mod_base = OTHER; note S-N-(1,3-dimethylimidazolidin-2-ylidene)phosphoramidate
  modified_base 8: mod_base = gm
  modified_base 9: mod_base = cm
  modified_base 10: mod_base = OTHER; note = 2-O-methylribose adenine
  modified_base 11: mod_base = OTHER; note = 2-O-methylribose adenine
  modified_base 12: mod_base = gm
  modified_base 13: mod_base = OTHER; note = 2-O-methylribose adenine
  modified_base 14: mod_base = OTHER; note = 2-fluororibose adenine
  modified_base 15: mod_base = cm
  modified_base 16: mod_base = OTHER; note = 2-fluororibose adenine
  modified_base 17: mod_base = cm
  modified_base 18: mod_base = um
  modified_base 19: mod_base = gm
  modified_base 20: mod_base = um
  modified_base 21: mod_base = um
  modified_base 21..22: mod_base = OTHER; note = S-phosphorothioate
  modified_base 22: mod_base = um
  modified_base 22..23: mod_base = OTHER; note = S-phosphorothioate
  modified_base 23: mod_base = um
  source 1..23: mol_type = other RNA
ttatagagcaagaacactgtttt

SEQ ID NO: 31 - RNA, 23 nt, synthetic construct
  misc_feature 1..23: note = Synthetic: WV-46525
  misc_feature 1..23: note = Synthetic: SSR-0104359
  modified_base 1: mod_base = um
  modified_base 1..2: mod_base = OTHER; note = R-phosphorothioate
  modified_base 2: mod_base = OTHER; note = 2-fluororibose uracil
  modified_base 2..3: mod_base = OTHER; note = S-phosphorothioate
  modified_base 3: mod_base = OTHER; note = 2-O-methylribose adenine
  modified_base 4: mod_base = um
  modified_base 5: mod_base = OTHER; note = 2-O-methylribose adenine
  modified_base 6: mod_base = OTHER; note = 2-fluororibose guanine
  modified_base 7: mod_base = OTHER; note = 2-O-methylribose adenine
  modified_base 8: mod_base = gm
  modified_base 8..9: mod_base = OTHER; note S-N-(1,3-dimethylimidazolidin-2-ylidene)phosphoramidate
  modified_base 9: mod_base = cm
  modified_base 10: mod_base = OTHER; note = 2-O-methylribose adenine
  modified_base 11: mod_base = OTHER; note = 2-O-methylribose adenine
  modified_base 12: mod_base = gm
  modified_base 13: mod_base = OTHER; note = 2-O-methylribose adenine
  modified_base 14: mod_base = OTHER; note = 2-fluororibose adenine
  modified_base 15: mod_base = cm
  modified_base 16: mod_base = OTHER; note = 2-fluororibose adenine
  modified_base 17: mod_base = cm
  modified_base 18: mod_base = um
  modified_base 19: mod_base = gm
  modified_base 20: mod_base = um
  modified_base 21: mod_base = um
  modified_base 21..22: mod_base = OTHER; note = S-phosphorothioate
  modified_base 22: mod_base = um
  modified_base 22..23: mod_base = OTHER; note = S-phosphorothioate
  modified_base 23: mod_base = um
  source 1..23: mol_type = other RNA
ttatagagcaagaacactgtttt

SEQ ID NO: 32 - RNA, 23 nt, synthetic construct
  misc_feature 1..23: note = Synthetic: WV-46526
  misc_feature 1..23: note = Synthetic: SSR-0104363
  modified_base 1: mod_base = um
  modified_base 1..2: mod_base = OTHER; note = R-phosphorothioate
  modified_base 2: mod_base = OTHER; note = 2-fluororibose uracil
  modified_base 2..3: mod_base = OTHER; note = S-phosphorothioate
  modified_base 3: mod_base = OTHER; note = 2-O-methylribose adenine
  modified_base 4: mod_base = um
  modified_base 5: mod_base = OTHER; note = 2-O-methylribose adenine
  modified_base 6: mod_base = OTHER; note = 2-fluororibose guanine
  modified_base 7: mod_base = OTHER; note = 2-O-methylribose adenine
  modified_base 8: mod_base = gm
  modified_base 9: mod_base = cm
  modified_base 9..10: mod_base = OTHER; note S-N-(1,3-dimethylimidazolidin-2-ylidene)phosphoramidate
  modified_base 10: mod_base = OTHER; note = 2-O-methylribose adenine
  modified_base 11: mod_base = OTHER; note = 2-O-methylribose adenine
  modified_base 12: mod_base = gm
  modified_base 13: mod_base = OTHER; note = 2-O-methylribose adenine
  modified_base 14: mod_base = OTHER; note = 2-fluororibose adenine
  modified_base 15: mod_base = cm
  modified_base 16: mod_base = OTHER; note = 2-fluororibose adenine
  modified_base 17: mod_base = cm
  modified_base 18: mod_base = um
  modified_base 19: mod_base = gm
  modified_base 20: mod_base = um
  modified_base 21: mod_base = um
  modified_base 21..22: mod_base = OTHER; note = S-phosphorothioate
  modified_base 22: mod_base = um
  modified_base 22..23: mod_base = OTHER; note = S-phosphorothioate
  modified_base 23: mod_base = um
  source 1..23: mol_type = other RNA
ttatagagcaagaacactgtttt

SEQ ID NO: 33 - RNA, 23 nt, synthetic construct
  misc_feature 1..23: note = Synthetic: WV-45147
  misc_feature 1..23: note = Synthetic: SSR-0104369
  modified_base 1: mod_base = um
  modified_base 1..2: mod_base = OTHER; note = R-phosphorothioate
  modified_base 2: mod_base = OTHER; note = 2-fluororibose uracil
  modified_base 2..3: mod_base = OTHER; note = S-phosphorothioate
  modified_base 3: mod_base = OTHER; note = 2-O-methylribose adenine
  modified_base 4: mod_base = um
  modified_base 5: mod_base = OTHER; note = 2-O-methylribose adenine
  modified_base 6: mod_base = OTHER; note = 2-fluororibose guanine
  modified_base 7: mod_base = OTHER; note = 2-O-methylribose adenine
  modified_base 8: mod_base = gm
  modified_base 9: mod_base = cm
  modified_base 10: mod_base = OTHER; note = 2-O-methylribose adenine
  modified_base 10..11: mod_base = OTHER; note S-N-(1,3-dimethylimidazolidin-2-ylidene)phosphoramidate
  modified_base 11: mod_base = OTHER; note = 2-O-methylribose adenine
  modified_base 12: mod_base = gm
  modified_base 13: mod_base = OTHER; note = 2-O-methylribose adenine
  modified_base 14: mod_base = OTHER; note = 2-fluororibose adenine
  modified_base 15: mod_base = cm
  modified_base 16: mod_base = OTHER; note = 2-fluororibose adenine
  modified_base 17: mod_base = cm
  modified_base 18: mod_base = um
  modified_base 19: mod_base = gm
  modified_base 20: mod_base = um
  modified_base 21: mod_base = um
  modified_base 21..22: mod_base = OTHER; note = S-phosphorothioate
  modified_base 22: mod_base = um
  modified_base 22..23: mod_base = OTHER; note = S-phosphorothioate
  modified_base 23: mod_base = um
  source 1..23: mol_type = other RNA
ttatagagcaagaacactgtttt

SEQ ID NO: 34 - RNA, 23 nt, synthetic construct
  misc_feature 1..23: note = Synthetic: WV-46527
  misc_feature 1..23: note = Synthetic: SSR-0104373
  modified_base 1: mod_base = um
  modified_base 1..2: mod_base = OTHER; note = R-phosphorothioate
  modified_base 2: mod_base = OTHER; note = 2-fluororibose uracil
  modified_base 2..3: mod_base = OTHER; note = S-phosphorothioate
  modified_base 3: mod_base = OTHER; note = 2-O-methylribose adenine
  modified_base 4: mod_base = um
  modified_base 5: mod_base = OTHER; note = 2-O-methylribose adenine
  modified_base 6: mod_base = OTHER; note = 2-fluororibose guanine
  modified_base 7: mod_base = OTHER; note = 2-O-methylribose adenine
  modified_base 8: mod_base = gm
  modified_base 9: mod_base = cm
  modified_base 10: mod_base = OTHER; note = 2-O-methylribose adenine
  modified_base 11: mod_base = OTHER; note = 2-O-methylribose adenine
  modified_base 11..12: mod_base = OTHER; note S-N-(1,3-dimethylimidazolidin-2-ylidene)phosphoramidate
  modified_base 12: mod_base = gm
  modified_base 13: mod_base = OTHER; note = 2-O-methylribose adenine
  modified_base 14: mod_base = OTHER; note = 2-fluororibose adenine
  modified_base 15: mod_base = cm
  modified_base 16: mod_base = OTHER; note = 2-fluororibose adenine
  modified_base 17: mod_base = cm
  modified_base 18: mod_base = um
  modified_base 19: mod_base = gm
  modified_base 20: mod_base = um
  modified_base 21: mod_base = um
  modified_base 21..22: mod_base = OTHER; note = S-phosphorothioate
  modified_base 22: mod_base = um
  modified_base 22..23: mod_base = OTHER; note = S-phosphorothioate
  modified_base 23: mod_base = um
  source 1..23: mol_type = other RNA
ttatagagcaagaacactgtttt

SEQ ID NO: 35 - RNA, 23 nt, synthetic construct
  misc_feature 1..23: note = Synthetic: WV-46528
  misc_feature 1..23: note = Synthetic: SSR-0104377
  modified_base 1: mod_base = um
  modified_base 1..2: mod_base = OTHER; note = R-phosphorothioate
  modified_base 2: mod_base = OTHER; note = 2-fluororibose uracil
  modified_base 2..3: mod_base = OTHER; note = S-phosphorothioate
  modified_base 3: mod_base = OTHER; note = 2-O-methylribose adenine
  modified_base 4: mod_base = um
  modified_base 5: mod_base = OTHER; note = 2-O-methylribose adenine
  modified_base 6: mod_base = OTHER; note = 2-fluororibose guanine
  modified_base 7: mod_base = OTHER; note = 2-O-methylribose adenine
  modified_base 8: mod_base = gm
  modified_base 9: mod_base = cm
  modified_base 10: mod_base = OTHER; note = 2-O-methylribose adenine
  modified_base 11: mod_base = OTHER; note = 2-O-methylribose adenine
  modified_base 12: mod_base = gm
  modified_base 12..13: mod_base = OTHER; note S-N-(1,3-dimethylimidazolidin-2-ylidene)phosphoramidate
  modified_base 13: mod_base = OTHER; note = 2-O-methylribose adenine
  modified_base 14: mod_base = OTHER; note = 2-fluororibose adenine
  modified_base 15: mod_base = cm
  modified_base 16: mod_base = OTHER; note = 2-fluororibose adenine
  modified_base 17: mod_base = cm
  modified_base 18: mod_base = um
  modified_base 19: mod_base = gm
  modified_base 20: mod_base = um
  modified_base 21: mod_base = um
  modified_base 21..22: mod_base = OTHER; note = S-phosphorothioate
  modified_base 22: mod_base = um
  modified_base 22..23: mod_base = OTHER; note = S-phosphorothioate
  modified_base 23: mod_base = um
  source 1..23: mol_type = other RNA
ttatagagcaagaacactgtttt

SEQ ID NO: 36 - RNA, 23 nt, synthetic construct
  misc_feature 1..23: note = Synthetic: WV-46529
  misc_feature 1..23: note = Synthetic: SSR-0104379
  modified_base 1: mod_base = um
  modified_base 1..2: mod_base = OTHER; note = R-phosphorothioate
  modified_base 2: mod_base = OTHER; note = 2-fluororibose uracil
  modified_base 2..3: mod_base = OTHER; note = S-phosphorothioate
  modified_base 3: mod_base = OTHER; note = 2-O-methylribose adenine
  modified_base 4: mod_base = um
  modified_base 5: mod_base = OTHER; note = 2-O-methylribose adenine
  modified_base 6: mod_base = OTHER; note = 2-fluororibose guanine
  modified_base 7: mod_base = OTHER; note = 2-O-methylribose adenine
  modified_base 8: mod_base = gm
  modified_base 9: mod_base = cm
  modified_base 10: mod_base = OTHER; note = 2-O-methylribose adenine
  modified_base 11: mod_base = OTHER; note = 2-O-methylribose adenine
  modified_base 12: mod_base = gm
  modified_base 13: mod_base = OTHER; note = 2-O-methylribose adenine
  modified_base 13..14: mod_base = OTHER; note S-N-(1,3-dimethylimidazolidin-2-ylidene)phosphoramidate
  modified_base 14: mod_base = OTHER; note = 2-fluororibose adenine
  modified_base 15: mod_base = cm
  modified_base 16: mod_base = OTHER; note = 2-fluororibose adenine
  modified_base 17: mod_base = cm
  modified_base 18: mod_base = um
  modified_base 19: mod_base = gm
  modified_base 20: mod_base = um
  modified_base 21: mod_base = um
  modified_base 21..22: mod_base = OTHER; note = S-phosphorothioate
  modified_base 22: mod_base = um
  modified_base 22..23: mod_base = OTHER; note = S-phosphorothioate
  modified_base 23: mod_base = um
  source 1..23: mol_type = other RNA
ttatagagcaagaacactgtttt

SEQ ID NO: 37 - RNA, 23 nt, synthetic construct
  misc_feature 1..23: note = Synthetic: WV-46530
  misc_feature 1..23: note = Synthetic: SSR-0104383
  modified_base 1: mod_base = um
  modified_base 1..2: mod_base = OTHER; note = R-phosphorothioate
  modified_base 2: mod_base = OTHER; note = 2-fluororibose uracil
  modified_base 2..3: mod_base = OTHER; note = S-phosphorothioate
  modified_base 3: mod_base = OTHER; note = 2-O-methylribose adenine
  modified_base 4: mod_base = um
  modified_base 5: mod_base = OTHER; note = 2-O-methylribose adenine
  modified_base 6: mod_base = OTHER; note = 2-fluororibose guanine
  modified_base 7: mod_base = OTHER; note = 2-O-methylribose adenine
  modified_base 8: mod_base = gm
  modified_base 9: mod_base = cm
  modified_base 10: mod_base = OTHER; note = 2-O-methylribose adenine
  modified_base 11: mod_base = OTHER; note = 2-O-methylribose adenine
  modified_base 12: mod_base = gm
  modified_base 13: mod_base = OTHER; note = 2-O-methylribose adenine
  modified_base 14: mod_base = OTHER; note = 2-fluororibose adenine
  modified_base 14..15: mod_base = OTHER; note S-N-(1,3-dimethylimidazolidin-2-ylidene)phosphoramidate
  modified_base 15: mod_base = cm
  modified_base 16: mod_base = OTHER; note = 2-fluororibose adenine
  modified_base 17: mod_base = cm
  modified_base 18: mod_base = um
  modified_base 19: mod_base = gm
  modified_base 20: mod_base = um
  modified_base 21: mod_base = um
  modified_base 21..22: mod_base = OTHER; note = S-phosphorothioate
  modified_base 22: mod_base = um
  modified_base 22..23: mod_base = OTHER; note = S-phosphorothioate
  modified_base 23: mod_base = um
  source 1..23: mol_type = other RNA
ttatagagcaagaacactgtttt

SEQ ID NO: 38 - RNA, 23 nt, synthetic construct
  misc_feature 1..23: note = Synthetic: WV-46531
  misc_feature 1..23: note = Synthetic: SSR-0104385
  modified_base 1: mod_base = um
  modified_base 1..2: mod_base = OTHER; note = R-phosphorothioate
  modified_base 2: mod_base = OTHER; note = 2-fluororibose uracil
  modified_base 2..3: mod_base = OTHER; note = S-phosphorothioate
  modified_base 3: mod_base = OTHER; note = 2-O-methylribose adenine
  modified_base 4: mod_base = um
  modified_base 5: mod_base = OTHER; note = 2-O-methylribose adenine
  modified_base 6: mod_base = OTHER; note = 2-fluororibose guanine
  modified_base 7: mod_base = OTHER; note = 2-O-methylribose adenine
  modified_base 8: mod_base = gm
  modified_base 9: mod_base = cm
  modified_base 10: mod_base = OTHER; note = 2-O-methylribose adenine
  modified_base 11: mod_base = OTHER; note = 2-O-methylribose adenine
  modified_base 12: mod_base = gm
  modified_base 13: mod_base = OTHER; note = 2-O-methylribose adenine
  modified_base 14: mod_base = OTHER; note = 2-fluororibose adenine
  modified_base 15: mod_base = cm
  modified_base 15..16: mod_base = OTHER; note S-N-(1,3-dimethylimidazolidin-2-ylidene)phosphoramidate
  modified_base 16: mod_base = OTHER; note = 2-fluororibose adenine
  modified_base 17: mod_base = cm
  modified_base 18: mod_base = um
  modified_base 19: mod_base = gm
  modified_base 20: mod_base = um
  modified_base 21: mod_base = um
  modified_base 21..22: mod_base = OTHER; note = S-phosphorothioate
  modified_base 22: mod_base = um
  modified_base 22..23: mod_base = OTHER; note = S-phosphorothioate
  modified_base 23: mod_base = um
  source 1..23: mol_type = other RNA
ttatagagcaagaacactgtttt

SEQ ID NO: 39 - RNA, 23 nt, synthetic construct
  misc_feature 1..23: note = Synthetic: WV-46532
  misc_feature 1..23: note = Synthetic: SSR-0104389
  modified_base 1: mod_base = um
  modified_base 1..2: mod_base = OTHER; note = R-phosphorothioate
  modified_base 2: mod_base = OTHER; note = 2-fluororibose uracil
  modified_base 2..3: mod_base = OTHER; note = S-phosphorothioate
  modified_base 3: mod_base = OTHER; note = 2-O-methylribose adenine
  modified_base 4: mod_base = um
  modified_base 5: mod_base = OTHER; note = 2-O-methylribose adenine
  modified_base 6: mod_base = OTHER; note = 2-fluororibose guanine
  modified_base 7: mod_base = OTHER; note = 2-O-methylribose adenine
  modified_base 8: mod_base = gm
  modified_base 9: mod_base = cm
  modified_base 10: mod_base = OTHER; note = 2-O-methylribose adenine
  modified_base 11: mod_base = OTHER; note = 2-O-methylribose adenine
  modified_base 12: mod_base = gm
  modified_base 13: mod_base = OTHER; note = 2-O-methylribose adenine
  modified_base 14: mod_base = OTHER; note = 2-fluororibose adenine
  modified_base 15: mod_base = cm
  modified_base 16: mod_base = OTHER; note = 2-fluororibose adenine
  modified_base 16..17: mod_base = OTHER; note S-N-(1,3-dimethylimidazolidin-2-ylidene)phosphoramidate
  modified_base 17: mod_base = cm
  modified_base 18: mod_base = um
  modified_base 19: mod_base = gm
  modified_base 20: mod_base = um
  modified_base 21: mod_base = um
  modified_base 21..22: mod_base = OTHER; note = S-phosphorothioate
  modified_base 22: mod_base = um
  modified_base 22..23: mod_base = OTHER; note = S-phosphorothioate
  modified_base 23: mod_base = um
  source 1..23: mol_type = other RNA
ttatagagcaagaacactgtttt

SEQ ID NO: 40 - RNA, 23 nt, synthetic construct
  misc_feature 1..23: note = Synthetic: WV-46533
  misc_feature 1..23: note = Synthetic: SSR-0104393
  modified_base 1: mod_base = um
  modified_base 1..2: mod_base = OTHER; note = R-phosphorothioate
  modified_base 2: mod_base = OTHER; note = 2-fluororibose uracil
  modified_base 2..3: mod_base = OTHER; note = S-phosphorothioate
  modified_base 3: mod_base = OTHER; note = 2-O-methylribose adenine
  modified_base 4: mod_base = um
  modified_base 5: mod_base = OTHER; note = 2-O-methylribose adenine
  modified_base 6: mod_base = OTHER; note = 2-fluororibose guanine
  modified_base 7: mod_base = OTHER; note = 2-O-methylribose adenine
  modified_base 8: mod_base = gm
  modified_base 9: mod_base = cm
  modified_base 10: mod_base = OTHER; note = 2-O-methylribose adenine
  modified_base 11: mod_base = OTHER; note = 2-O-methylribose adenine
  modified_base 12: mod_base = gm
  modified_base 13: mod_base = OTHER; note = 2-O-methylribose adenine
  modified_base 14: mod_base = OTHER; note = 2-fluororibose adenine
  modified_base 15: mod_base = cm
  modified_base 16: mod_base = OTHER; note = 2-fluororibose adenine
  modified_base 17: mod_base = cm
  modified_base 17..18: mod_base = OTHER; note S-N-(1,3-dimethylimidazolidin-2-ylidene)phosphoramidate
  modified_base 18: mod_base = um
  modified_base 19: mod_base = gm
  modified_base 20: mod_base = um
  modified_base 21: mod_base = um
  modified_base 21..22: mod_base = OTHER; note = S-phosphorothioate
  modified_base 22: mod_base = um
  modified_base 22..23: mod_base = OTHER; note = S-phosphorothioate
  modified_base 23: mod_base = um
  source 1..23: mol_type = other RNA
ttatagagcaagaacactgtttt

SEQ ID NO: 41 - RNA, 23 nt, synthetic construct
  misc_feature 1..23: note = Synthetic: WV-46534
  misc_feature 1..23: note = Synthetic: SSR-0104397
  modified_base 1: mod_base = um
  modified_base 1..2: mod_base = OTHER; note = R-phosphorothioate
  modified_base 2: mod_base = OTHER; note = 2-fluororibose uracil
  modified_base 2..3: mod_base = OTHER; note = S-phosphorothioate
  modified_base 3: mod_base = OTHER; note = 2-O-methylribose adenine
  modified_base 4: mod_base = um
  modified_base 5: mod_base = OTHER; note = 2-O-methylribose adenine
  modified_base 6: mod_base = OTHER; note = 2-fluororibose guanine
  modified_base 7: mod_base = OTHER; note = 2-O-methylribose adenine
  modified_base 8: mod_base = gm
  modified_base 9: mod_base = cm
  modified_base 10: mod_base = OTHER; note = 2-O-methylribose adenine
  modified_base 11: mod_base = OTHER; note = 2-O-methylribose adenine
  modified_base 12: mod_base = gm
  modified_base 13: mod_base = OTHER; note = 2-O-methylribose adenine
  modified_base 14: mod_base = OTHER; note = 2-fluororibose adenine
  modified_base 15: mod_base = cm
  modified_base 16: mod_base = OTHER; note = 2-fluororibose adenine
  modified_base 17: mod_base = cm
  modified_base 18: mod_base = um
  modified_base 18..19: mod_base = OTHER; note S-N-(1,3-dimethylimidazolidin-2-ylidene)phosphoramidate
  modified_base 19: mod_base = gm
  modified_base 20: mod_base = um
  modified_base 21: mod_base = um
  modified_base 21..22: mod_base = OTHER; note = S-phosphorothioate
  modified_base 22: mod_base = um
  modified_base 22..23: mod_base = OTHER; note = S-phosphorothioate
  modified_base 23: mod_base = um
  source 1..23: mol_type = other RNA
ttatagagcaagaacactgtttt

SEQ ID NO: 42 - RNA, 23 nt, synthetic construct
  misc_feature 1..23: note = Synthetic: WV-45146
  misc_feature 1..23: note = Synthetic: SSR-0104401
  modified_base 1: mod_base = um
  modified_base 1..2: mod_base = OTHER; note = R-phosphorothioate
  modified_base 2: mod_base = OTHER; note = 2-fluororibose uracil
  modified_base 2..3: mod_base = OTHER; note = S-phosphorothioate
  modified_base 3: mod_base = OTHER; note = 2-O-methylribose adenine
  modified_base 4: mod_base = um
  modified_base 5: mod_base = OTHER; note = 2-O-methylribose adenine
  modified_base 6: mod_base = OTHER; note = 2-fluororibose guanine
  modified_base 7: mod_base = OTHER; note = 2-O-methylribose adenine
  modified_base 8: mod_base = gm
  modified_base 9: mod_base = cm
  modified_base 10: mod_base = OTHER; note = 2-O-methylribose adenine
  modified_base 11: mod_base = OTHER; note = 2-O-methylribose adenine
  modified_base 12: mod_base = gm
  modified_base 13: mod_base = OTHER; note = 2-O-methylribose adenine
  modified_base 14: mod_base = OTHER; note = 2-fluororibose adenine
  modified_base 15: mod_base = cm
  modified_base 16: mod_base = OTHER; note = 2-fluororibose adenine
  modified_base 17: mod_base = cm
  modified_base 18: mod_base = um
  modified_base 19: mod_base = gm
  modified_base 19..20: mod_base = OTHER; note S-N-(1,3-dimethylimidazolidin-2-ylidene)phosphoramidate
  modified_base 20: mod_base = um
  modified_base 21: mod_base = um
  modified_base 21..22: mod_base = OTHER; note = S-phosphorothioate
  modified_base 22: mod_base = um
  modified_base 22..23: mod_base = OTHER; note = S-phosphorothioate
  modified_base 23: mod_base = um
  source 1..23: mol_type = other RNA
ttatagagcaagaacactgtttt

SEQ ID NO: 43 - RNA, 23 nt, synthetic construct
  misc_feature 1..23: note = Synthetic: WV-46535
  misc_feature 1..23: note = Synthetic: SSR-0104405
  modified_base 1: mod_base = um
  modified_base 1..2: mod_base = OTHER; note = R-phosphorothioate
  modified_base 2: mod_base = OTHER; note = 2-fluororibose uracil
  modified_base 2..3: mod_base = OTHER; note = S-phosphorothioate
  modified_base 3: mod_base = OTHER; note = 2-O-methylribose adenine
  modified_base 4: mod_base = um
  modified_base 5: mod_base = OTHER; note = 2-O-methylribose adenine
  modified_base 6: mod_base = OTHER; note = 2-fluororibose guanine
  modified_base 7: mod_base = OTHER; note = 2-O-methylribose adenine
  modified_base 8: mod_base = gm
  modified_base 9: mod_base = cm
  modified_base 10: mod_base = OTHER; note = 2-O-methylribose adenine
  modified_base 11: mod_base = OTHER; note = 2-O-methylribose adenine
  modified_base 12: mod_base = gm
  modified_base 13: mod_base = OTHER; note = 2-O-methylribose adenine
  modified_base 14: mod_base = OTHER; note = 2-fluororibose adenine
  modified_base 15: mod_base = cm
  modified_base 16: mod_base = OTHER; note = 2-fluororibose adenine
  modified_base 17: mod_base = cm
  modified_base 18: mod_base = um
  modified_base 19: mod_base = gm
  modified_base 20: mod_base = um
  modified_base 20..21: mod_base = OTHER; note S-N-(1,3-dimethylimidazolidin-2-ylidene)phosphoramidate
  modified_base 21: mod_base = um
  modified_base 21..22: mod_base = OTHER; note = S-phosphorothioate
  modified_base 22: mod_base = um
  modified_base 22..23: mod_base = OTHER; note = S-phosphorothioate
  modified_base 23: mod_base = um
  source 1..23: mol_type = other RNA
ttatagagcaagaacactgtttt

SEQ ID NO: 44 - RNA, 23 nt, synthetic construct
  misc_feature 1..23: note = Synthetic: WV-46536
  misc_feature 1..23: note = Synthetic: SSR-0104414
  modified_base 1: mod_base = um
  modified_base 1..2: mod_base = OTHER; note = R-phosphorothioate
  modified_base 2: mod_base = OTHER; note = 2-fluororibose uracil
  modified_base 2..3: mod_base = OTHER; note = S-phosphorothioate
  modified_base 3: mod_base = OTHER; note = 2-O-methylribose adenine
  modified_base 4: mod_base = um
  modified_base 5: mod_base = OTHER; note = 2-O-methylribose adenine
  modified_base 6: mod_base = OTHER; note = 2-fluororibose guanine
  modified_base 7: mod_base = OTHER; note = 2-O-methylribose adenine
  modified_base 8: mod_base = gm
  modified_base 9: mod_base = cm
  modified_base 10: mod_base = OTHER; note = 2-O-methylribose adenine
  modified_base 11: mod_base = OTHER; note = 2-O-methylribose adenine
  modified_base 12: mod_base = gm
  modified_base 13: mod_base = OTHER; note = 2-O-methylribose adenine
  modified_base 14: mod_base = OTHER; note = 2-fluororibose adenine
  modified_base 15: mod_base = cm
  modified_base 16: mod_base = OTHER; note = 2-fluororibose adenine
  modified_base 17: mod_base = cm
  modified_base 18: mod_base = um
  modified_base 19: mod_base = gm
  modified_base 20: mod_base = um
  modified_base 21: mod_base = um
  modified_base 21..22: mod_base = OTHER; note S-N-(1,3-dimethylimidazolidin-2-ylidene)phosphoramidate
  modified_base 22: mod_base = um
  modified_base 22..23: mod_base = OTHER; note = S-phosphorothioate
  modified_base 23: mod_base = um
  source 1..23: mol_type = other RNA
ttatagagcaagaacactgtttt

SEQ ID NO: 45 - RNA, 23 nt, synthetic construct
  misc_feature 1..23: note = Synthetic: WV-46537
  misc_feature 1..23: note = Synthetic: SSR-0104410
  modified_base 1: mod_base = um
  modified_base 1..2: mod_base = OTHER; note = R-phosphorothioate
  modified_base 2: mod_base = OTHER; note = 2-fluororibose uracil
  modified_base 2..3: mod_base = OTHER; note = S-phosphorothioate
  modified_base 3: mod_base = OTHER; note = 2-O-methylribose adenine
  modified_base 4: mod_base = um
  modified_base 5: mod_base = OTHER; note = 2-O-methylribose adenine
  modified_base 6: mod_base = OTHER; note = 2-fluororibose guanine
  modified_base 7: mod_base = OTHER; note = 2-O-methylribose adenine
  modified_base 8: mod_base = gm
  modified_base 9: mod_base = cm
  modified_base 10: mod_base = OTHER; note = 2-O-methylribose adenine
  modified_base 11: mod_base = OTHER; note = 2-O-methylribose adenine
  modified_base 12: mod_base = gm
  modified_base 13: mod_base = OTHER; note = 2-O-methylribose adenine
  modified_base 14: mod_base = OTHER; note = 2-fluororibose adenine
  modified_base 15: mod_base = cm
  modified_base 16: mod_base = OTHER; note = 2-fluororibose adenine
  modified_base 17: mod_base = cm
  modified_base 18: mod_base = um
  modified_base 19: mod_base = gm
  modified_base 20: mod_base = um
  modified_base 21: mod_base = um
  modified_base 21..22: mod_base = OTHER; note = S-phosphorothioate
  modified_base 22: mod_base = um
  modified_base 22..23: mod_base = OTHER; note S-N-(1,3-dimethylimidazolidin-2-ylidene)phosphoramidate
  modified_base 23: mod_base = um
  source 1..23: mol_type = other RNA
ttatagagcaagaacactgtttt

SEQ ID NO: 46 - RNA, 23 nt, synthetic construct
  misc_feature 1..23: note = Synthetic: WV-46538
  misc_feature 1..23: note = Synthetic: SSR-0104699
  modified_base 1: mod_base = um
  modified_base 1..2: mod_base = OTHER; note R-N-(1,3-dimethylimidazolidin-2-ylidene)phosphoramidate
  modified_base 2: mod_base = OTHER; note = 2-fluororibose uracil
  modified_base 2..3: mod_base = OTHER; note = R-phosphorothioate
  modified_base 3: mod_base = OTHER; note = 2-O-methylribose adenine
  modified_base 4: mod_base = um
  modified_base 5: mod_base = OTHER; note = 2-O-methylribose adenine
  modified_base 6: mod_base = OTHER; note = 2-fluororibose guanine
  modified_base 7: mod_base = OTHER; note = 2-O-methylribose adenine
  modified_base 8: mod_base = gm
  modified_base 9: mod_base = cm
  modified_base 10: mod_base = OTHER; note = 2-O-methylribose adenine
  modified_base 11: mod_base = OTHER; note = 2-O-methylribose adenine
  modified_base 12: mod_base = gm
  modified_base 13: mod_base = OTHER; note = 2-O-methylribose adenine
  modified_base 14: mod_base = OTHER; note = 2-fluororibose adenine
  modified_base 15: mod_base = cm
  modified_base 16: mod_base = OTHER; note = 2-fluororibose adenine
  modified_base 17: mod_base = cm
  modified_base 18: mod_base = um
  modified_base 19: mod_base = gm
  modified_base 20: mod_base = um
  modified_base 21: mod_base = um
  modified_base 21..22: mod_base = OTHER; note = S-phosphorothioate
  modified_base 22: mod_base = um
  modified_base 22..23: mod_base = OTHER; note = S-phosphorothioate
  modified_base 23: mod_base = um
  source 1..23: mol_type = other RNA
ttatagagcaagaacactgtttt

SEQ ID NO: 47 - RNA, 23 nt, synthetic construct
  misc_feature 1..23: note = Synthetic: WV-46539
  misc_feature 1..23: note = Synthetic: SSR-0104650
  modified_base 1: mod_base = um
  modified_base 1..2: mod_base = OTHER; note = S-phosphorothioate
  modified_base 2: mod_base = OTHER; note = 2-fluororibose uracil
  modified_base 2..3: mod_base = OTHER; note R-N-(1,3-dimethylimidazolidin-2-ylidene)phosphoramidate
  modified_base 3: mod_base = OTHER; note = 2-O-methylribose adenine
  modified_base 4: mod_base = um
  modified_base 5: mod_base = OTHER; note = 2-O-methylribose adenine
  modified_base 6: mod_base = OTHER; note = 2-fluororibose guanine
  modified_base 7: mod_base = OTHER; note = 2-O-methylribose adenine
  modified_base 8: mod_base = gm
  modified_base 9: mod_base = cm
  modified_base 10: mod_base = OTHER; note = 2-O-methylribose adenine
  modified_base 11: mod_base = OTHER; note = 2-O-methylribose adenine
  modified_base 12: mod_base = gm
  modified_base 13: mod_base = OTHER; note = 2-O-methylribose adenine
  modified_base 14: mod_base = OTHER; note = 2-fluororibose adenine
  modified_base 15: mod_base = cm
  modified_base 16: mod_base = OTHER; note = 2-fluororibose adenine
  modified_base 17: mod_base = cm
  modified_base 18: mod_base = um
  modified_base 19: mod_base = gm
  modified_base 20: mod_base = um
  modified_base 21: mod_base = um
  modified_base 21..22: mod_base = OTHER; note = S-phosphorothioate
  modified_base 22: mod_base = um
  modified_base 22..23: mod_base = OTHER; note = S-phosphorothioate
  modified_base 23: mod_base = um
  source 1..23: mol_type = other RNA
ttatagagcaagaacactgtttt

SEQ ID NO: 48 - RNA, 23 nt, synthetic construct
  misc_feature 1..23: note = Synthetic: WV-46540
  misc_feature 1..23: note = Synthetic: SSR-0104452
  modified_base 1: mod_base = um
  modified_base 1..2: mod_base = OTHER; note = S-phosphorothioate
  modified_base 2: mod_base = OTHER; note = 2-fluororibose uracil
  modified_base 2..3: mod_base = OTHER; note = R-phosphorothioate
  modified_base 3: mod_base = OTHER; note = 2-O-methylribose adenine
  modified_base 3..4: mod_base = OTHER; note R-N-(1,3-dimethylimidazolidin-2-ylidene)phosphoramidate
  modified_base 4: mod_base = um
  modified_base 5: mod_base = OTHER; note = 2-O-methylribose adenine
  modified_base 6: mod_base = OTHER; note = 2-fluororibose guanine
  modified_base 7: mod_base = OTHER; note = 2-O-methylribose adenine
  modified_base 8: mod_base = gm
  modified_base 9: mod_base = cm
  modified_base 10: mod_base = OTHER; note = 2-O-methylribose adenine
  modified_base 11: mod_base = OTHER; note = 2-O-methylribose adenine
  modified_base 12: mod_base = gm
  modified_base 13: mod_base = OTHER; note = 2-O-methylribose adenine
  modified_base 14: mod_base = OTHER; note = 2-fluororibose adenine
  modified_base 15: mod_base = cm
  modified_base 16: mod_base = OTHER; note = 2-fluororibose adenine
  modified_base 17: mod_base = cm
  modified_base 18: mod_base = um
  modified_base 19: mod_base = gm
  modified_base 20: mod_base = um
  modified_base 21: mod_base = um
  modified_base 21..22: mod_base = OTHER; note = S-phosphorothioate
  modified_base 22: mod_base = um
  modified_base 22..23: mod_base = OTHER; note = S-phosphorothioate
  modified_base 23: mod_base = um
  source 1..23: mol_type = other RNA
ttatagagcaagaacactgtttt

SEQ ID NO: 49 - RNA, 23 nt, synthetic construct
  misc_feature 1..23: note = Synthetic: WV-46541
  misc_feature 1..23: note = Synthetic: SSR-0104556
  modified_base 1: mod_base = um
  modified_base 1..2: mod_base = OTHER; note = S-phosphorothioate
  modified_base 2: mod_base = OTHER; note = 2-fluororibose uracil
  modified_base 2..3: mod_base = OTHER; note = R-phosphorothioate
  modified_base 3: mod_base = OTHER; note = 2-O-methylribose adenine
  modified_base 4: mod_base = um
  modified_base 4..5: mod_base = OTHER; note R-N-(1,3-dimethylimidazolidin-2-ylidene)phosphoramidate
  modified_base 5: mod_base = OTHER; note = 2-O-methylribose adenine
  modified_base 6: mod_base = OTHER; note = 2-fluororibose guanine
  modified_base 7: mod_base = OTHER; note = 2-O-methylribose adenine
  modified_base 8: mod_base = gm
  modified_base 9: mod_base = cm
  modified_base 10: mod_base = OTHER; note = 2-O-methylribose adenine
  modified_base 11: mod_base = OTHER; note = 2-O-methylribose adenine
  modified_base 12: mod_base = gm
  modified_base 13: mod_base = OTHER; note = 2-O-methylribose adenine
  modified_base 14: mod_base = OTHER; note = 2-fluororibose adenine
  modified_base 15: mod_base = cm
  modified_base 16: mod_base = OTHER; note = 2-fluororibose adenine
  modified_base 17: mod_base = cm
  modified_base 18: mod_base = um
  modified_base 19: mod_base = gm
  modified_base 20: mod_base = um
  modified_base 21: mod_base = um
  modified_base 21..22: mod_base = OTHER; note = S-phosphorothioate
  modified_base 22: mod_base = um
  modified_base 22..23: mod_base = OTHER; note = S-phosphorothioate
  modified_base 23: mod_base = um
  source 1..23: mol_type = other RNA
ttatagagcaagaacactgtttt

SEQ ID NO: 50 - RNA, 23 nt, synthetic construct
  misc_feature 1..23: note = Synthetic: WV-46542
  misc_feature 1..23: note = Synthetic: SSR-0104559
  modified_base 1: mod_base = um
  modified_base 1..2: mod_base = OTHER; note = S-phosphorothioate
  modified_base 2: mod_base = OTHER; note = 2-fluororibose uracil
  modified_base 2..3: mod_base = OTHER; note = R-phosphorothioate
  modified_base 3: mod_base = OTHER; note = 2-O-methylribose adenine
  modified_base 4: mod_base = um
  modified_base 5: mod_base = OTHER; note = 2-O-methylribose adenine
  modified_base 5..6: mod_base = OTHER; note R-N-(1,3-dimethylimidazolidin-2-ylidene)phosphoramidate
  modified_base 6: mod_base = OTHER; note = 2-fluororibose guanine
  modified_base 7: mod_base = OTHER; note = 2-O-methylribose adenine
  modified_base 8: mod_base = gm
  modified_base 9: mod_base = cm
  modified_base 10: mod_base = OTHER; note = 2-O-methylribose adenine
  modified_base 11: mod_base = OTHER; note = 2-O-methylribose adenine
  modified_base 12: mod_base = gm
  modified_base 13: mod_base = OTHER; note = 2-O-methylribose adenine
  modified_base 14: mod_base = OTHER; note = 2-fluororibose adenine
  modified_base 15: mod_base = cm
  modified_base 16: mod_base = OTHER; note = 2-fluororibose adenine
  modified_base 17: mod_base = cm
  modified_base 18: mod_base = um
  modified_base 19: mod_base = gm
  modified_base 20: mod_base = um
  modified_base 21: mod_base = um
  modified_base 21..22: mod_base = OTHER; note = S-phosphorothioate
  modified_base 22: mod_base = um
  modified_base 22..23: mod_base = OTHER; note = S-phosphorothioate
  modified_base 23: mod_base = um
  source 1..23: mol_type = other RNA
ttatagagcaagaacactgtttt

SEQ ID NO: 51 - RNA, 23 nt, synthetic construct
  misc_feature 1..23: note = Synthetic: WV-46543
  misc_feature 1..23: note = Synthetic: SSR-0104562
  modified_base 1: mod_base = um
  modified_base 1..2: mod_base = OTHER; note = S-phosphorothioate
  modified_base 2: mod_base = OTHER; note = 2-fluororibose uracil
  modified_base 2..3: mod_base = OTHER; note = R-phosphorothioate
  modified_base 3: mod_base = OTHER; note = 2-O-methylribose adenine
  modified_base 4: mod_base = um
  modified_base 5: mod_base = OTHER; note = 2-O-methylribose adenine
  modified_base 6: mod_base = OTHER; note = 2-fluororibose guanine
  modified_base 6..7: mod_base = OTHER; note R-N-(1,3-dimethylimidazolidin-2-ylidene)phosphoramidate
  modified_base 7: mod_base = OTHER; note = 2-O-methylribose adenine
  modified_base 8: mod_base = gm
  modified_base 9: mod_base = cm
  modified_base 10: mod_base = OTHER; note = 2-O-methylribose adenine
  modified_base 11: mod_base = OTHER; note = 2-O-methylribose adenine
  modified_base 12: mod_base = gm
  modified_base 13: mod_base = OTHER; note = 2-O-methylribose adenine
  modified_base 14: mod_base = OTHER; note = 2-fluororibose adenine
  modified_base 15: mod_base = cm
  modified_base 16: mod_base = OTHER; note = 2-fluororibose adenine
  modified_base 17: mod_base = cm
  modified_base 18: mod_base = um
  modified_base 19: mod_base = gm
  modified_base 20: mod_base = um
  modified_base 21: mod_base = um
  modified_base 21..22: mod_base = OTHER; note = S-phosphorothioate
  modified_base 22: mod_base = um
  modified_base 22..23: mod_base = OTHER; note = S-phosphorothioate
  modified_base 23: mod_base = um
  source 1..23: mol_type = other RNA
ttatagagcaagaacactgtttt

SEQ ID NO: 52 - RNA, 23 nt, synthetic construct
  misc_feature 1..23: note = Synthetic: WV-46544
  misc_feature 1..23: note = Synthetic: SSR-0104566
  modified_base 1: mod_base = um
  modified_base 1..2: mod_base = OTHER; note = S-phosphorothioate
  modified_base 2: mod_base = OTHER; note = 2-fluororibose uracil
  modified_base 2..3: mod_base = OTHER; note = R-phosphorothioate
  modified_base 3: mod_base = OTHER; note = 2-O-methylribose adenine
  modified_base 4: mod_base = um
  modified_base 5: mod_base = OTHER; note = 2-O-methylribose adenine
  modified_base 6: mod_base = OTHER; note = 2-fluororibose guanine
  modified_base 7: mod_base = OTHER; note = 2-O-methylribose adenine
  modified_base 7..8: mod_base = OTHER; note R-N-(1,3-dimethylimidazolidin-2-ylidene)phosphoramidate
  modified_base 8: mod_base = gm
  modified_base 9: mod_base = cm
  modified_base 10: mod_base = OTHER; note = 2-O-methylribose adenine
  modified_base 11: mod_base = OTHER; note = 2-O-methylribose adenine
  modified_base 12: mod_base = gm
  modified_base 13: mod_base = OTHER; note = 2-O-methylribose adenine
  modified_base 14: mod_base = OTHER; note = 2-fluororibose adenine
  modified_base 15: mod_base = cm
  modified_base 16: mod_base = OTHER; note = 2-fluororibose adenine
  modified_base 17: mod_base = cm
  modified_base 18: mod_base = um
  modified_base 19: mod_base = gm
  modified_base 20: mod_base = um
  modified_base 21: mod_base = um
  modified_base 21..22: mod_base = OTHER; note = S-phosphorothioate
  modified_base 22: mod_base = um
  modified_base 22..23: mod_base = OTHER; note = S-phosphorothioate
  modified_base 23: mod_base = um
  source 1..23: mol_type = other RNA
ttatagagcaagaacactgtttt

SEQ ID NO: 53 - RNA, 23 nt, synthetic construct
  misc_feature 1..23: note = Synthetic: WV-46545
  misc_feature 1..23: note = Synthetic: SSR-0104571
  modified_base 1: mod_base = um
  modified_base 1..2: mod_base = OTHER; note = S-phosphorothioate
  modified_base 2: mod_base = OTHER; note = 2-fluororibose uracil
  modified_base 2..3: mod_base = OTHER; note = R-phosphorothioate
  modified_base 3: mod_base = OTHER; note = 2-O-methylribose adenine
  modified_base 4: mod_base = um
  modified_base 5: mod_base = OTHER; note = 2-O-methylribose adenine
  modified_base 6: mod_base = OTHER; note = 2-fluororibose guanine
  modified_base 7: mod_base = OTHER; note = 2-O-methylribose adenine
  modified_base 8: mod_base = gm
  modified_base 8..9: mod_base = OTHER; note R-N-(1,3-dimethylimidazolidin-2-ylidene)phosphoramidate
  modified_base 9: mod_base = cm
  modified_base 10: mod_base = OTHER; note = 2-O-methylribose adenine
  modified_base 11: mod_base = OTHER; note = 2-O-methylribose adenine
  modified_base 12: mod_base = gm
  modified_base 13: mod_base = OTHER; note = 2-O-methylribose adenine
  modified_base 14: mod_base = OTHER; note = 2-fluororibose adenine
  modified_base 15: mod_base = cm
  modified_base 16: mod_base = OTHER; note = 2-fluororibose adenine
  modified_base 17: mod_base = cm
  modified_base 18: mod_base = um
  modified_base 19: mod_base = gm
  modified_base 20: mod_base = um
  modified_base 21: mod_base = um
  modified_base 21..22: mod_base = OTHER; note = S-phosphorothioate
  modified_base 22: mod_base = um
  modified_base 22..23: mod_base = OTHER; note = S-phosphorothioate
  modified_base 23: mod_base = um
  source 1..23: mol_type = other RNA
ttatagagcaagaacactgtttt

SEQ ID NO: 54 - RNA, 23 nt, synthetic construct
  misc_feature 1..23: note = Synthetic: WV-46546
  misc_feature 1..23: note = Synthetic: SSR-0104575
  modified_base 1: mod_base = um
  modified_base 1..2: mod_base = OTHER; note = S-phosphorothioate
  modified_base 2: mod_base = OTHER; note = 2-fluororibose uracil
  modified_base 2..3: mod_base = OTHER; note = R-phosphorothioate
  modified_base 3: mod_base = OTHER; note = 2-O-methylribose adenine
  modified_base 4: mod_base = um
  modified_base 5: mod_base = OTHER; note = 2-O-methylribose adenine
  modified_base 6: mod_base = OTHER; note = 2-fluororibose guanine
  modified_base 7: mod_base = OTHER; note = 2-O-methylribose adenine
  modified_base 8: mod_base = gm
  modified_base 9: mod_base = cm
  modified_base 9..10: mod_base = OTHER; note R-N-(1,3-dimethylimidazolidin-2-ylidene)phosphoramidate
  modified_base 10: mod_base = OTHER; note = 2-O-methylribose adenine
  modified_base 11: mod_base = OTHER; note = 2-O-methylribose adenine
  modified_base 12: mod_base = gm
  modified_base 13: mod_base = OTHER; note = 2-O-methylribose adenine
  modified_base 14: mod_base = OTHER; note = 2-fluororibose adenine
  modified_base 15: mod_base = cm
  modified_base 16: mod_base = OTHER; note = 2-fluororibose adenine
  modified_base 17: mod_base = cm
  modified_base 18: mod_base = um
  modified_base 19: mod_base = gm
  modified_base 20: mod_base = um
  modified_base 21: mod_base = um
  modified_base 21..22: mod_base = OTHER; note = S-phosphorothioate
  modified_base 22: mod_base = um
  modified_base 22..23: mod_base = OTHER; note = S-phosphorothioate
  modified_base 23: mod_base = um
  source 1..23: mol_type = other RNA
ttatagagcaagaacactgtttt

SEQ ID NO: 55 - RNA, 23 nt, synthetic construct
  misc_feature 1..23: note = Synthetic: WV-46547
  misc_feature 1..23: note = Synthetic: SSR-0104580
  modified_base 1: mod_base = um
  modified_base 1..2: mod_base = OTHER; note = S-phosphorothioate
  modified_base 2: mod_base = OTHER; note = 2-fluororibose uracil
  modified_base 2..3: mod_base = OTHER; note = R-phosphorothioate
  modified_base 3: mod_base = OTHER; note = 2-O-methylribose adenine
  modified_base 4: mod_base = um
  modified_base 5: mod_base = OTHER; note = 2-O-methylribose adenine
  modified_base 6: mod_base = OTHER; note = 2-fluororibose guanine
  modified_base 7: mod_base = OTHER; note = 2-O-methylribose adenine
  modified_base 8: mod_base = gm
  modified_base 9: mod_base = cm
  modified_base 10: mod_base = OTHER; note = 2-O-methylribose adenine
  modified_base 10..11: mod_base = OTHER; note R-N-(1,3-dimethylimidazolidin-2-ylidene)phosphoramidate
  modified_base 11: mod_base = OTHER; note = 2-O-methylribose adenine
  modified_base 12: mod_base = gm
  modified_base 13: mod_base = OTHER; note = 2-O-methylribose adenine
  modified_base 14: mod_base = OTHER; note = 2-fluororibose adenine
  modified_base 15: mod_base = cm
  modified_base 16: mod_base = OTHER; note = 2-fluororibose adenine
  modified_base 17: mod_base = cm
  modified_base 18: mod_base = um
  modified_base 19: mod_base = gm
  modified_base 20: mod_base = um
  modified_base 21: mod_base = um
  modified_base 21..22: mod_base = OTHER; note = S-phosphorothioate
  modified_base 22: mod_base = um
  modified_base 22..23: mod_base = OTHER; note = S-phosphorothioate
  modified_base 23: mod_base = um
  source 1..23: mol_type = other RNA
ttatagagcaagaacactgtttt

SEQ ID NO: 56 - RNA, 23 nt, synthetic construct
  misc_feature 1..23: note = Synthetic: WV-46548
  misc_feature 1..23: note = Synthetic: SSR-0104587
  modified_base 1: mod_base = um
  modified_base 1..2: mod_base = OTHER; note = S-phosphorothioate
  modified_base 2: mod_base = OTHER; note = 2-fluororibose uracil
  modified_base 2..3: mod_base = OTHER; note = R-phosphorothioate
  modified_base 3: mod_base = OTHER; note = 2-O-methylribose adenine
  modified_base 4: mod_base = um
  modified_base 5: mod_base = OTHER; note = 2-O-methylribose adenine
  modified_base 6: mod_base = OTHER; note = 2-fluororibose guanine
  modified_base 7: mod_base = OTHER; note = 2-O-methylribose adenine
  modified_base 8: mod_base = gm
  modified_base 9: mod_base = cm
  modified_base 10: mod_base = OTHER; note = 2-O-methylribose adenine
  modified_base 11: mod_base = OTHER; note = 2-O-methylribose adenine
  modified_base 11..12: mod_base = OTHER; note R-N-(1,3-dimethylimidazolidin-2-ylidene)phosphoramidate
  modified_base 12: mod_base = gm
  modified_base 13: mod_base = OTHER; note = 2-O-methylribose adenine
  modified_base 14: mod_base = OTHER; note = 2-fluororibose adenine
  modified_base 15: mod_base = cm
  modified_base 16: mod_base = OTHER; note = 2-fluororibose adenine
  modified_base 17: mod_base = cm
  modified_base 18: mod_base = um
  modified_base 19: mod_base = gm
  modified_base 20: mod_base = um
  modified_base 21: mod_base = um
  modified_base 21..22: mod_base = OTHER; note = S-phosphorothioate
  modified_base 22: mod_base = um
  modified_base 22..23: mod_base = OTHER; note = S-phosphorothioate
  modified_base 23: mod_base = um
  source 1..23: mol_type = other RNA
ttatagagcaagaacactgtttt

SEQ ID NO: 57 - RNA, 23 nt, synthetic construct
  misc_feature 1..23: note = Synthetic: WV-46549
  misc_feature 1..23: note = Synthetic: SSR-0104591
  modified_base 1: mod_base = um
  modified_base 1..2: mod_base = OTHER; note = S-phosphorothioate
  modified_base 2: mod_base = OTHER; note = 2-fluororibose uracil
  modified_base 2..3: mod_base = OTHER; note = R-phosphorothioate
  modified_base 3: mod_base = OTHER; note = 2-O-methylribose adenine
  modified_base 4: mod_base = um
  modified_base 5: mod_base = OTHER; note = 2-O-methylribose adenine
  modified_base 6: mod_base = OTHER; note = 2-fluororibose guanine
  modified_base 7: mod_base = OTHER; note = 2-O-methylribose adenine
  modified_base 8: mod_base = gm
  modified_base 9: mod_base = cm
  modified_base 10: mod_base = OTHER; note = 2-O-methylribose adenine
  modified_base 11: mod_base = OTHER; note = 2-O-methylribose adenine
  modified_base 12: mod_base = gm
  modified_base 12..13: mod_base = OTHER; note R-N-(1,3-dimethylimidazolidin-2-ylidene)phosphoramidate
  modified_base 13: mod_base = OTHER; note = 2-O-methylribose adenine
  modified_base 14: mod_base = OTHER; note = 2-fluororibose adenine
  modified_base 15: mod_base = cm
  modified_base 16: mod_base = OTHER; note = 2-fluororibose adenine
  modified_base 17: mod_base = cm
  modified_base 18: mod_base = um
  modified_base 19: mod_base = gm
  modified_base 20: mod_base = um
  modified_base 21: mod_base = um
  modified_base 21..22: mod_base = OTHER; note = S-phosphorothioate
  modified_base 22: mod_base = um
  modified_base 22..23: mod_base = OTHER; note = S-phosphorothioate
  modified_base 23: mod_base = um
  source 1..23: mol_type = other RNA
ttatagagcaagaacactgtttt

SEQ ID NO: 58 - RNA, 23 nt, synthetic construct
  misc_feature 1..23: note = Synthetic: WV-46550
  misc_feature 1..23: note = Synthetic: SSR-0104594
  modified_base 1: mod_base = um
  modified_base 1..2: mod_base = OTHER; note = S-phosphorothioate
  modified_base 2: mod_base = OTHER; note = 2-fluororibose uracil
  modified_base 2..3: mod_base = OTHER; note = R-phosphorothioate
  modified_base 3: mod_base = OTHER; note = 2-O-methylribose adenine
  modified_base 4: mod_base = um
  modified_base 5: mod_base = OTHER; note = 2-O-methylribose adenine
  modified_base 6: mod_base = OTHER; note = 2-fluororibose guanine
  modified_base 7: mod_base = OTHER; note = 2-O-methylribose adenine
  modified_base 8: mod_base = gm
  modified_base 9: mod_base = cm
  modified_base 10: mod_base = OTHER; note = 2-O-methylribose adenine
  modified_base 11: mod_base = OTHER; note = 2-O-methylribose adenine
  modified_base 12: mod_base = gm
  modified_base 13: mod_base = OTHER; note = 2-O-methylribose adenine
  modified_base 13..14: mod_base = OTHER; note R-N-(1,3-dimethylimidazolidin-2-ylidene)phosphoramidate
  modified_base 14: mod_base = OTHER; note = 2-fluororibose adenine
  modified_base 15: mod_base = cm
  modified_base 16: mod_base = OTHER; note = 2-fluororibose adenine
  modified_base 17: mod_base = cm
  modified_base 18: mod_base = um
  modified_base 19: mod_base = gm
  modified_base 20: mod_base = um
  modified_base 21: mod_base = um
  modified_base 21..22: mod_base = OTHER; note = S-phosphorothioate
  modified_base 22: mod_base = um
  modified_base 22..23: mod_base = OTHER; note = S-phosphorothioate
  modified_base 23: mod_base = um
  source 1..23: mol_type = other RNA
ttatagagcaagaacactgtttt

SEQ ID NO: 59 - RNA, 23 nt, synthetic construct
  misc_feature 1..23: note = Synthetic: WV-46551
  misc_feature 1..23: note = Synthetic: SSR-0104597
  modified_base 1: mod_base = um
  modified_base 1..2: mod_base = OTHER; note = S-phosphorothioate
  modified_base 2: mod_base = OTHER; note = 2-fluororibose uracil
  modified_base 2..3: mod_base = OTHER; note = R-phosphorothioate
  modified_base 3: mod_base = OTHER; note = 2-O-methylribose adenine
  modified_base 4: mod_base = um
  modified_base 5: mod_base = OTHER; note = 2-O-methylribose adenine
  modified_base 6: mod_base = OTHER; note = 2-fluororibose guanine
  modified_base 7: mod_base = OTHER; note = 2-O-methylribose adenine
  modified_base 8: mod_base = gm
  modified_base 9: mod_base = cm
  modified_base 10: mod_base = OTHER; note = 2-O-methylribose adenine
  modified_base 11: mod_base = OTHER; note = 2-O-methylribose adenine
  modified_base 12: mod_base = gm
  modified_base 13: mod_base = OTHER; note = 2-O-methylribose adenine
  modified_base 14: mod_base = OTHER; note = 2-fluororibose adenine
  modified_base 14..15: mod_base = OTHER; note R-N-(1,3-dimethylimidazolidin-2-ylidene)phosphoramidate
  modified_base 15: mod_base = cm
  modified_base 16: mod_base = OTHER; note = 2-fluororibose adenine
  modified_base 17: mod_base = cm
  modified_base 18: mod_base = um
  modified_base 19: mod_base = gm
  modified_base 20: mod_base = um
  modified_base 21: mod_base = um
  modified_base 21..22: mod_base = OTHER; note = S-phosphorothioate
  modified_base 22: mod_base = um
  modified_base 22..23: mod_base = OTHER; note = S-phosphorothioate
  modified_base 23: mod_base = um
  source 1..23: mol_type = other RNA
ttatagagcaagaacactgtttt

SEQ ID NO: 60 - RNA, 23 nt, synthetic construct
  misc_feature 1..23: note = Synthetic: WV-46552
  misc_feature 1..23: note = Synthetic: SSR-0104600
  modified_base 1: mod_base = um
  modified_base 1..2: mod_base = OTHER; note = S-phosphorothioate
  modified_base 2: mod_base = OTHER; note = 2-fluororibose uracil
  modified_base 2..3: mod_base = OTHER; note = R-phosphorothioate
  modified_base 3: mod_base = OTHER; note = 2-O-methylribose adenine
  modified_base 4: mod_base = um
  modified_base 5: mod_base = OTHER; note = 2-O-methylribose adenine
  modified_base 6: mod_base = OTHER; note = 2-fluororibose guanine
  modified_base 7: mod_base = OTHER; note = 2-O-methylribose adenine
  modified_base 8: mod_base = gm
  modified_base 9: mod_base = cm
  modified_base 10: mod_base = OTHER; note = 2-O-methylribose adenine
  modified_base 11: mod_base = OTHER; note = 2-O-methylribose adenine
  modified_base 12: mod_base = gm
  modified_base 13: mod_base = OTHER; note = 2-O-methylribose adenine
  modified_base 14: mod_base = OTHER; note = 2-fluororibose adenine
  modified_base 15: mod_base = cm
  modified_base 15..16: mod_base = OTHER; note R-N-(1,3-dimethylimidazolidin-2-ylidene)phosphoramidate
  modified_base 16: mod_base = OTHER; note = 2-fluororibose adenine
  modified_base 17: mod_base = cm
  modified_base 18: mod_base = um
  modified_base 19: mod_base = gm
  modified_base 20: mod_base = um
  modified_base 21: mod_base = um
  modified_base 21..22: mod_base = OTHER; note = S-phosphorothioate
  modified_base 22: mod_base = um
  modified_base 22..23: mod_base = OTHER; note = S-phosphorothioate
  modified_base 23: mod_base = um
  source 1..23: mol_type = other RNA
ttatagagcaagaacactgtttt

SEQ ID NO: 61 - RNA, 23 nt, synthetic construct
  misc_feature 1..23: note = Synthetic: WV-46553
  misc_feature 1..23: note = Synthetic: SSR-0104603
  modified_base 1: mod_base = um
  modified_base 1..2: mod_base = OTHER; note = S-phosphorothioate
  modified_base 2: mod_base = OTHER; note = 2-fluororibose uracil
  modified_base 2..3: mod_base = OTHER; note = R-phosphorothioate
  modified_base 3: mod_base = OTHER; note = 2-O-methylribose adenine
  modified_base 4: mod_base = um
  modified_base 5: mod_base = OTHER; note = 2-O-methylribose adenine
  modified_base 6: mod_base = OTHER; note = 2-fluororibose guanine
  modified_base 7: mod_base = OTHER; note = 2-O-methylribose adenine
  modified_base 8: mod_base = gm
  modified_base 9: mod_base = cm
  modified_base 10: mod_base = OTHER; note = 2-O-methylribose adenine
  modified_base 11: mod_base = OTHER; note = 2-O-methylribose adenine
  modified_base 12: mod_base = gm
  modified_base 13: mod_base = OTHER; note = 2-O-methylribose adenine
  modified_base 14: mod_base = OTHER; note = 2-fluororibose adenine
  modified_base 15: mod_base = cm
  modified_base 16: mod_base = OTHER; note = 2-fluororibose adenine
  modified_base 16..17: mod_base = OTHER; note R-N-(1,3-dimethylimidazolidin-2-ylidene)phosphoramidate
  modified_base 17: mod_base = cm
  modified_base 18: mod_base = um
  modified_base 19: mod_base = gm
  modified_base 20: mod_base = um
  modified_base 21: mod_base = um
  modified_base 21..22: mod_base = OTHER; note = S-phosphorothioate
  modified_base 22: mod_base = um
  modified_base 22..23: mod_base = OTHER; note = S-phosphorothioate
  modified_base 23: mod_base = um
  source 1..23: mol_type = other RNA
ttatagagcaagaacactgtttt

SEQ ID NO: 62 - RNA, 23 nt, synthetic construct
  misc_feature 1..23: note = Synthetic: WV-46554
  misc_feature 1..23: note = Synthetic: SSR-0104607
  modified_base 1: mod_base = um
  modified_base 1..2: mod_base = OTHER; note = S-phosphorothioate
  modified_base 2: mod_base = OTHER; note = 2-fluororibose uracil
  modified_base 2..3: mod_base = OTHER; note = R-phosphorothioate
  modified_base 3: mod_base = OTHER; note = 2-O-methylribose adenine
  modified_base 4: mod_base = um
  modified_base 5: mod_base = OTHER; note = 2-O-methylribose adenine
  modified_base 6: mod_base = OTHER; note = 2-fluororibose guanine
  modified_base 7: mod_base = OTHER; note = 2-O-methylribose adenine
  modified_base 8: mod_base = gm
  modified_base 9: mod_base = cm
  modified_base 10: mod_base = OTHER; note = 2-O-methylribose adenine
  modified_base 11: mod_base = OTHER; note = 2-O-methylribose adenine
  modified_base 12: mod_base = gm
  modified_base 13: mod_base = OTHER; note = 2-O-methylribose adenine
  modified_base 14: mod_base = OTHER; note = 2-fluororibose adenine
  modified_base 15: mod_base = cm
  modified_base 16: mod_base = OTHER; note = 2-fluororibose adenine
  modified_base 17: mod_base = cm
  modified_base 17..18: mod_base = OTHER; note R-N-(1,3-dimethylimidazolidin-2-ylidene)phosphoramidate
  modified_base 18: mod_base = um
  modified_base 19: mod_base = gm
  modified_base 20: mod_base = um
  modified_base 21: mod_base = um
  modified_base 21..22: mod_base = OTHER; note = S-phosphorothioate
  modified_base 22: mod_base = um
  modified_base 22..23: mod_base = OTHER; note = S-phosphorothioate
  modified_base 23: mod_base = um
  source 1..23: mol_type = other RNA
ttatagagcaagaacactgtttt

SEQ ID NO: 63 - RNA, 23 nt, synthetic construct
  misc_feature 1..23: note = Synthetic: WV-46555
  misc_feature 1..23: note = Synthetic: SSR-0104611
  modified_base 1: mod_base = um
  modified_base 1..2: mod_base = OTHER; note = S-phosphorothioate
  modified_base 2: mod_base = OTHER; note = 2-fluororibose uracil
  modified_base 2..3: mod_base = OTHER; note = R-phosphorothioate
  modified_base 3: mod_base = OTHER; note = 2-O-methylribose adenine
  modified_base 4: mod_base = um
  modified_base 5: mod_base = OTHER; note = 2-O-methylribose adenine
  modified_base 6: mod_base = OTHER; note = 2-fluororibose guanine
  modified_base 7: mod_base = OTHER; note = 2-O-methylribose adenine
  modified_base 8: mod_base = gm
  modified_base 9: mod_base = cm
  modified_base 10: mod_base = OTHER; note = 2-O-methylribose adenine
  modified_base 11: mod_base = OTHER; note = 2-O-methylribose adenine
  modified_base 12: mod_base = gm
  modified_base 13: mod_base = OTHER; note = 2-O-methylribose adenine
  modified_base 14: mod_base = OTHER; note = 2-fluororibose adenine
  modified_base 15: mod_base = cm
  modified_base 16: mod_base = OTHER; note = 2-fluororibose adenine
  modified_base 17: mod_base = cm
  modified_base 18: mod_base = um
  modified_base 18..19: mod_base = OTHER; note R-N-(1,3-dimethylimidazolidin-2-ylidene)phosphoramidate
  modified_base 19: mod_base = gm
  modified_base 20: mod_base = um
  modified_base 21: mod_base = um
  modified_base 21..22: mod_base = OTHER; note = S-phosphorothioate
  modified_base 22: mod_base = um
  modified_base 22..23: mod_base = OTHER; note = S-phosphorothioate
  modified_base 23: mod_base = um
  source 1..23: mol_type = other RNA
ttatagagcaagaacactgtttt

SEQ ID NO: 64 - RNA, 23 nt, synthetic construct
  misc_feature 1..23: note = Synthetic: WV-46556
  misc_feature 1..23: note = Synthetic: SSR-0104615
  modified_base 1: mod_base = um
  modified_base 1..2: mod_base = OTHER; note = S-phosphorothioate
  modified_base 2: mod_base = OTHER; note = 2-fluororibose uracil
  modified_base 2..3: mod_base = OTHER; note = R-phosphorothioate
  modified_base 3: mod_base = OTHER; note = 2-O-methylribose adenine
  modified_base 4: mod_base = um
  modified_base 5: mod_base = OTHER; note = 2-O-methylribose adenine
  modified_base 6: mod_base = OTHER; note = 2-fluororibose guanine
  modified_base 7: mod_base = OTHER; note = 2-O-methylribose adenine
  modified_base 8: mod_base = gm
  modified_base 9: mod_base = cm
  modified_base 10: mod_base = OTHER; note = 2-O-methylribose adenine
  modified_base 11: mod_base = OTHER; note = 2-O-methylribose adenine
  modified_base 12: mod_base = gm
  modified_base 13: mod_base = OTHER; note = 2-O-methylribose adenine
  modified_base 14: mod_base = OTHER; note = 2-fluororibose adenine
  modified_base 15: mod_base = cm
  modified_base 16: mod_base = OTHER; note = 2-fluororibose adenine
  modified_base 17: mod_base = cm
  modified_base 18: mod_base = um
  modified_base 19: mod_base = gm
  modified_base 19..20: mod_base = OTHER; note R-N-(1,3-dimethylimidazolidin-2-ylidene)phosphoramidate
  modified_base 20: mod_base = um
  modified_base 21: mod_base = um
  modified_base 21..22: mod_base = OTHER; note = S-phosphorothioate
  modified_base 22: mod_base = um
  modified_base 22..23: mod_base = OTHER; note = S-phosphorothioate
  modified_base 23: mod_base = um
  source 1..23: mol_type = other RNA
ttatagagcaagaacactgtttt

SEQ ID NO: 65 - RNA, 23 nt, synthetic construct
  misc_feature 1..23: note = Synthetic: WV-46557
  misc_feature 1..23: note = Synthetic: SSR-0104619
  modified_base 1: mod_base = um
  modified_base 1..2: mod_base = OTHER; note = S-phosphorothioate
  modified_base 2: mod_base = OTHER; note = 2-fluororibose uracil
  modified_base 2..3: mod_base = OTHER; note = R-phosphorothioate
  modified_base 3: mod_base = OTHER; note = 2-O-methylribose adenine
  modified_base 4: mod_base = um
  modified_base 5: mod_base = OTHER; note = 2-O-methylribose adenine
  modified_base 6: mod_base = OTHER; note = 2-fluororibose guanine
  modified_base 7: mod_base = OTHER; note = 2-O-methylribose adenine
  modified_base 8: mod_base = gm
  modified_base 9: mod_base = cm
  modified_base 10: mod_base = OTHER; note = 2-O-methylribose adenine
  modified_base 11: mod_base = OTHER; note = 2-O-methylribose adenine
  modified_base 12: mod_base = gm
  modified_base 13: mod_base = OTHER; note = 2-O-methylribose adenine
  modified_base 14: mod_base = OTHER; note = 2-fluororibose adenine
  modified_base 15: mod_base = cm
  modified_base 16: mod_base = OTHER; note = 2-fluororibose adenine
  modified_base 17: mod_base = cm
  modified_base 18: mod_base = um
  modified_base 19: mod_base = gm
  modified_base 20: mod_base = um
  modified_base 20..21: mod_base = OTHER; note R-N-(1,3-dimethylimidazolidin-2-ylidene)phosphoramidate
  modified_base 21: mod_base = um
  modified_base 21..22: mod_base = OTHER; note = S-phosphorothioate
  modified_base 22: mod_base = um
  modified_base 22..23: mod_base = OTHER; note = S-phosphorothioate
  modified_base 23: mod_base = um
  source 1..23: mol_type = other RNA
ttatagagcaagaacactgtttt

SEQ ID NO: 66 - RNA, 23 nt, synthetic construct
  misc_feature 1..23: note = Synthetic: WV-46558
  misc_feature 1..23: note = Synthetic: SSR-0104628
  modified_base 1: mod_base = um
  modified_base 1..2: mod_base = OTHER; note = S-phosphorothioate
  modified_base 2: mod_base = OTHER; note = 2-fluororibose uracil
  modified_base 2..3: mod_base = OTHER; note = R-phosphorothioate
  modified_base 3: mod_base = OTHER; note = 2-O-methylribose adenine
  modified_base 4: mod_base = um
  modified_base 5: mod_base = OTHER; note = 2-O-methylribose adenine
  modified_base 6: mod_base = OTHER; note = 2-fluororibose guanine
  modified_base 7: mod_base = OTHER; note = 2-O-methylribose adenine
  modified_base 8: mod_base = gm
  modified_base 9: mod_base = cm
  modified_base 10: mod_base = OTHER; note = 2-O-methylribose adenine
  modified_base 11: mod_base = OTHER; note = 2-O-methylribose adenine
  modified_base 12: mod_base = gm
  modified_base 13: mod_base = OTHER; note = 2-O-methylribose adenine
  modified_base 14: mod_base = OTHER; note = 2-fluororibose adenine
  modified_base 15: mod_base = cm
  modified_base 16: mod_base = OTHER; note = 2-fluororibose adenine
  modified_base 17: mod_base = cm
  modified_base 18: mod_base = um
  modified_base 19: mod_base = gm
  modified_base 20: mod_base = um
  modified_base 21: mod_base = um
  modified_base 21..22: mod_base = OTHER; note R-N-(1,3-dimethylimidazolidin-2-ylidene)phosphoramidate
  modified_base 22: mod_base = um
  modified_base 22..23: mod_base = OTHER; note = S-phosphorothioate
  modified_base 23: mod_base = um
  source 1..23: mol_type = other RNA
ttatagagcaagaacactgtttt

SEQ ID NO: 67 - RNA, 23 nt, synthetic construct
  misc_feature 1..23: note = Synthetic: WV-46559
  misc_feature 1..23: note = Synthetic: SSR-0104624
  modified_base 1: mod_base = um
  modified_base 1..2: mod_base = OTHER; note = S-phosphorothioate
  modified_base 2: mod_base = OTHER; note = 2-fluororibose uracil
  modified_base 2..3: mod_base = OTHER; note = R-phosphorothioate
  modified_base 3: mod_base = OTHER; note = 2-O-methylribose adenine
  modified_base 4: mod_base = um
  modified_base 5: mod_base = OTHER; note = 2-O-methylribose adenine
  modified_base 6: mod_base = OTHER; note = 2-fluororibose guanine
  modified_base 7: mod_base = OTHER; note = 2-O-methylribose adenine
  modified_base 8: mod_base = gm
  modified_base 9: mod_base = cm
  modified_base 10: mod_base = OTHER; note = 2-O-methylribose adenine
  modified_base 11: mod_base = OTHER; note = 2-O-methylribose adenine
  modified_base 12: mod_base = gm
  modified_base 13: mod_base = OTHER; note = 2-O-methylribose adenine
  modified_base 14: mod_base = OTHER; note = 2-fluororibose adenine
  modified_base 15: mod_base = cm
  modified_base 16: mod_base = OTHER; note = 2-fluororibose adenine
  modified_base 17: mod_base = cm
  modified_base 18: mod_base = um
  modified_base 19: mod_base = gm
  modified_base 20: mod_base = um
  modified_base 21: mod_base = um
  modified_base 21..22: mod_base = OTHER; note = S-phosphorothioate
  modified_base 22: mod_base = um
  modified_base 22..23: mod_base = OTHER; note R-N-(1,3-dimethylimidazolidin-2-ylidene)phosphoramidate
  modified_base 23: mod_base = um
  source 1..23: mol_type = other RNA
ttatagagcaagaacactgtttt

SEQ ID NO: 68 - RNA, 23 nt, synthetic construct
  misc_feature 1..23: note = Synthetic: WV-46560
  misc_feature 1..23: note = Synthetic: SSR-0104704
  modified_base 1: mod_base = um
  modified_base 1..2: mod_base = OTHER; note S-N-(1,3-dimethylimidazolidin-2-ylidene)phosphoramidate
  modified_base 2: mod_base = OTHER; note = 2-fluororibose uracil
  modified_base 2..3: mod_base = OTHER; note = R-phosphorothioate
  modified_base 3: mod_base = OTHER; note = 2-O-methylribose adenine
  modified_base 4: mod_base = um
  modified_base 5: mod_base = OTHER; note = 2-O-methylribose adenine
  modified_base 6: mod_base = OTHER; note = 2-fluororibose guanine
  modified_base 7: mod_base = OTHER; note = 2-O-methylribose adenine
  modified_base 8: mod_base = gm
  modified_base 9: mod_base = cm
  modified_base 10: mod_base = OTHER; note = 2-O-methylribose adenine
  modified_base 11: mod_base = OTHER; note = 2-O-methylribose adenine
  modified_base 12: mod_base = gm
  modified_base 13: mod_base = OTHER; note = 2-O-methylribose adenine
  modified_base 14: mod_base = OTHER; note = 2-fluororibose adenine
  modified_base 15: mod_base = cm
  modified_base 16: mod_base = OTHER; note = 2-fluororibose adenine
  modified_base 17: mod_base = cm
  modified_base 18: mod_base = um
  modified_base 19: mod_base = gm
  modified_base 20: mod_base = um
  modified_base 21: mod_base = um
  modified_base 21..22: mod_base = OTHER; note = S-phosphorothioate
  modified_base 22: mod_base = um
  modified_base 22..23: mod_base = OTHER; note = S-phosphorothioate
  modified_base 23: mod_base = um
  source 1..23: mol_type = other RNA
ttatagagcaagaacactgtttt

SEQ ID NO: 69 - RNA, 23 nt, synthetic construct
  misc_feature 1..23: note = Synthetic: WV-46561
  misc_feature 1..23: note = Synthetic: SSR-0104653
  modified_base 1: mod_base = um
  modified_base 1..2: mod_base = OTHER; note = S-phosphorothioate
  modified_base 2: mod_base = OTHER; note = 2-fluororibose uracil
  modified_base 2..3: mod_base = OTHER; note S-N-(1,3-dimethylimidazolidin-2-ylidene)phosphoramidate
  modified_base 3: mod_base = OTHER; note = 2-O-methylribose adenine
  modified_base 4: mod_base = um
  modified_base 5: mod_base = OTHER; note = 2-O-methylribose adenine
  modified_base 6: mod_base = OTHER; note = 2-fluororibose guanine
  modified_base 7: mod_base = OTHER; note = 2-O-methylribose adenine
  modified_base 8: mod_base = gm
  modified_base 9: mod_base = cm
  modified_base 10: mod_base = OTHER; note = 2-O-methylribose adenine
  modified_base 11: mod_base = OTHER; note = 2-O-methylribose adenine
  modified_base 12: mod_base = gm
  modified_base 13: mod_base = OTHER; note = 2-O-methylribose adenine
  modified_base 14: mod_base = OTHER; note = 2-fluororibose adenine
  modified_base 15: mod_base = cm
  modified_base 16: mod_base = OTHER; note = 2-fluororibose adenine
  modified_base 17: mod_base = cm
  modified_base 18: mod_base = um
  modified_base 19: mod_base = gm
  modified_base 20: mod_base = um
  modified_base 21: mod_base = um
  modified_base 21..22: mod_base = OTHER; note = S-phosphorothioate
  modified_base 22: mod_base = um
  modified_base 22..23: mod_base = OTHER; note = S-phosphorothioate
  modified_base 23: mod_base = um
  source 1..23: mol_type = other RNA
ttatagagcaagaacactgtttt

SEQ ID NO: 70 - RNA, 23 nt, synthetic construct
  misc_feature 1..23: note = Synthetic: WV-44453
  misc_feature 1..23: note = Synthetic: SSR-0104489
  modified_base 1: mod_base = um
  modified_base 1..2: mod_base = OTHER; note = S-phosphorothioate
  modified_base 2: mod_base = OTHER; note = 2-fluororibose uracil
  modified_base 2..3: mod_base = OTHER; note = R-phosphorothioate
  modified_base 3: mod_base = OTHER; note = 2-O-methylribose adenine
  modified_base 3..4: mod_base = OTHER; note S-N-(1,3-dimethylimidazolidin-2-ylidene)phosphoramidate
  modified_base 4: mod_base = um
  modified_base 5: mod_base = OTHER; note = 2-O-methylribose adenine
  modified_base 6: mod_base = OTHER; note = 2-fluororibose guanine
  modified_base 7: mod_base = OTHER; note = 2-O-methylribose adenine
  modified_base 8: mod_base = gm
  modified_base 9: mod_base = cm
  modified_base 10: mod_base = OTHER; note = 2-O-methylribose adenine
  modified_base 11: mod_base = OTHER; note = 2-O-methylribose adenine
  modified_base 12: mod_base = gm
  modified_base 13: mod_base = OTHER; note = 2-O-methylribose adenine
  modified_base 14: mod_base = OTHER; note = 2-fluororibose adenine
  modified_base 15: mod_base = cm
  modified_base 16: mod_base = OTHER; note = 2-fluororibose adenine
  modified_base 17: mod_base = cm
  modified_base 18: mod_base = um
  modified_base 19: mod_base = gm
  modified_base 20: mod_base = um
  modified_base 21: mod_base = um
  modified_base 21..22: mod_base = OTHER; note = S-phosphorothioate
  modified_base 22: mod_base = um
  modified_base 22..23: mod_base = OTHER; note = S-phosphorothioate
  modified_base 23: mod_base = um
  source 1..23: mol_type = other RNA
ttatagagcaagaacactgtttt

SEQ ID NO: 71 - RNA, 23 nt, synthetic construct
  misc_feature 1..23: note = Synthetic: WV-46562
  misc_feature 1..23: note = Synthetic: SSR-0104558
  modified_base 1: mod_base = um
  modified_base 1..2: mod_base = OTHER; note = S-phosphorothioate
  modified_base 2: mod_base = OTHER; note = 2-fluororibose uracil
  modified_base 2..3: mod_base = OTHER; note = R-phosphorothioate
  modified_base 3: mod_base = OTHER; note = 2-O-methylribose adenine
  modified_base 4: mod_base = um
  modified_base 4..5: mod_base = OTHER; note S-N-(1,3-dimethylimidazolidin-2-ylidene)phosphoramidate
  modified_base 5: mod_base = OTHER; note = 2-O-methylribose adenine
  modified_base 6: mod_base = OTHER; note = 2-fluororibose guanine
  modified_base 7: mod_base = OTHER; note = 2-O-methylribose adenine
  modified_base 8: mod_base = gm
  modified_base 9: mod_base = cm
  modified_base 10: mod_base = OTHER; note = 2-O-methylribose adenine
  modified_base 11: mod_base = OTHER; note = 2-O-methylribose adenine
  modified_base 12: mod_base = gm
  modified_base 13: mod_base = OTHER; note = 2-O-methylribose adenine
  modified_base 14: mod_base = OTHER; note = 2-fluororibose adenine
  modified_base 15: mod_base = cm
  modified_base 16: mod_base = OTHER; note = 2-fluororibose adenine
  modified_base 17: mod_base = cm
  modified_base 18: mod_base = um
  modified_base 19: mod_base = gm
  modified_base 20: mod_base = um
  modified_base 21: mod_base = um
  modified_base 21..22: mod_base = OTHER; note = S-phosphorothioate
  modified_base 22: mod_base = um
  modified_base 22..23: mod_base = OTHER; note = S-phosphorothioate
  modified_base 23: mod_base = um
  source 1..23: mol_type = other RNA
ttatagagcaagaacactgtttt

SEQ ID NO: 72 - RNA, 23 nt, synthetic construct
  misc_feature 1..23: note = Synthetic: WV-46563
  misc_feature 1..23: note = Synthetic: SSR-0104560
  modified_base 1: mod_base = um
  modified_base 1..2: mod_base = OTHER; note = S-phosphorothioate
  modified_base 2: mod_base = OTHER; note = 2-fluororibose uracil
  modified_base 2..3: mod_base = OTHER; note = R-phosphorothioate
  modified_base 3: mod_base = OTHER; note = 2-O-methylribose adenine
  modified_base 4: mod_base = um
  modified_base 5: mod_base = OTHER; note = 2-O-methylribose adenine
  modified_base 5..6: mod_base = OTHER; note S-N-(1,3-dimethylimidazolidin-2-ylidene)phosphoramidate
  modified_base 6: mod_base = OTHER; note = 2-fluororibose guanine
  modified_base 7: mod_base = OTHER; note = 2-O-methylribose adenine
  modified_base 8: mod_base = gm
  modified_base 9: mod_base = cm
  modified_base 10: mod_base = OTHER; note = 2-O-methylribose adenine
  modified_base 11: mod_base = OTHER; note = 2-O-methylribose adenine
  modified_base 12: mod_base = gm
  modified_base 13: mod_base = OTHER; note = 2-O-methylribose adenine
  modified_base 14: mod_base = OTHER; note = 2-fluororibose adenine
  modified_base 15: mod_base = cm
  modified_base 16: mod_base = OTHER; note = 2-fluororibose adenine
  modified_base 17: mod_base = cm
  modified_base 18: mod_base = um
  modified_base 19: mod_base = gm
  modified_base 20: mod_base = um
  modified_base 21: mod_base = um
  modified_base 21..22: mod_base = OTHER; note = S-phosphorothioate
  modified_base 22: mod_base = um
  modified_base 22..23: mod_base = OTHER; note = S-phosphorothioate
  modified_base 23: mod_base = um
  source 1..23: mol_type = other RNA
ttatagagcaagaacactgtttt

SEQ ID NO: 73 - RNA, 23 nt, synthetic construct
  misc_feature 1..23: note = Synthetic: WV-46564
  misc_feature 1..23: note = Synthetic: SSR-0104564
  modified_base 1: mod_base = um
  modified_base 1..2: mod_base = OTHER; note = S-phosphorothioate
  modified_base 2: mod_base = OTHER; note = 2-fluororibose uracil
  modified_base 2..3: mod_base = OTHER; note = R-phosphorothioate
  modified_base 3: mod_base = OTHER; note = 2-O-methylribose adenine
  modified_base 4: mod_base = um
  modified_base 5: mod_base = OTHER; note = 2-O-methylribose adenine
  modified_base 6: mod_base = OTHER; note = 2-fluororibose guanine
  modified_base 6..7: mod_base = OTHER; note S-N-(1,3-dimethylimidazolidin-2-ylidene)phosphoramidate
  modified_base 7: mod_base = OTHER; note = 2-O-methylribose adenine
  modified_base 8: mod_base = gm
  modified_base 9: mod_base = cm
  modified_base 10: mod_base = OTHER; note = 2-O-methylribose adenine
  modified_base 11: mod_base = OTHER; note = 2-O-methylribose adenine
  modified_base 12: mod_base = gm
  modified_base 13: mod_base = OTHER; note = 2-O-methylribose adenine
  modified_base 14: mod_base = OTHER; note = 2-fluororibose adenine
  modified_base 15: mod_base = cm
  modified_base 16: mod_base = OTHER; note = 2-fluororibose adenine
  modified_base 17: mod_base = cm
  modified_base 18: mod_base = um
  modified_base 19: mod_base = gm
  modified_base 20: mod_base = um
  modified_base 21: mod_base = um
  modified_base 21..22: mod_base = OTHER; note = S-phosphorothioate
  modified_base 22: mod_base = um
  modified_base 22..23: mod_base = OTHER; note = S-phosphorothioate
  modified_base 23: mod_base = um
  source 1..23: mol_type = other RNA
ttatagagcaagaacactgtttt

SEQ ID NO: 74 - RNA, 23 nt, synthetic construct
  misc_feature 1..23: note = Synthetic: WV-46565
  misc_feature 1..23: note = Synthetic: SSR-0104568
  modified_base 1: mod_base = um
  modified_base 1..2: mod_base = OTHER; note = S-phosphorothioate
  modified_base 2: mod_base = OTHER; note = 2-fluororibose uracil
  modified_base 2..3: mod_base = OTHER; note = R-phosphorothioate
  modified_base 3: mod_base = OTHER; note = 2-O-methylribose adenine
  modified_base 4: mod_base = um
  modified_base 5: mod_base = OTHER; note = 2-O-methylribose adenine
  modified_base 6: mod_base = OTHER; note = 2-fluororibose guanine
  modified_base 7: mod_base = OTHER; note = 2-O-methylribose adenine
  modified_base 7..8: mod_base = OTHER; note S-N-(1,3-dimethylimidazolidin-2-ylidene)phosphoramidate
  modified_base 8: mod_base = gm
  modified_base 9: mod_base = cm
  modified_base 10: mod_base = OTHER; note = 2-O-methylribose adenine
  modified_base 11: mod_base = OTHER; note = 2-O-methylribose adenine
  modified_base 12: mod_base = gm
  modified_base 13: mod_base = OTHER; note = 2-O-methylribose adenine
  modified_base 14: mod_base = OTHER; note = 2-fluororibose adenine
  modified_base 15: mod_base = cm
  modified_base 16: mod_base = OTHER; note = 2-fluororibose adenine
  modified_base 17: mod_base = cm
  modified_base 18: mod_base = um
  modified_base 19: mod_base = gm
  modified_base 20: mod_base = um
  modified_base 21: mod_base = um
  modified_base 21..22: mod_base = OTHER; note = S-phosphorothioate
  modified_base 22: mod_base = um
  modified_base 22..23: mod_base = OTHER; note = S-phosphorothioate
  modified_base 23: mod_base = um
  source 1..23: mol_type = other RNA
ttatagagcaagaacactgtttt

SEQ ID NO: 75 - RNA, 23 nt, synthetic construct
  misc_feature 1..23: note = Synthetic: WV-46566
  misc_feature 1..23: note = Synthetic: SSR-0104573
  modified_base 1: mod_base = um
  modified_base 1..2: mod_base = OTHER; note = S-phosphorothioate
  modified_base 2: mod_base = OTHER; note = 2-fluororibose uracil
  modified_base 2..3: mod_base = OTHER; note = R-phosphorothioate
  modified_base 3: mod_base = OTHER; note = 2-O-methylribose adenine
  modified_base 4: mod_base = um
  modified_base 5: mod_base = OTHER; note = 2-O-methylribose adenine
  modified_base 6: mod_base = OTHER; note = 2-fluororibose guanine
  modified_base 7: mod_base = OTHER; note = 2-O-methylribose adenine
  modified_base 8: mod_base = gm
  modified_base 8..9: mod_base = OTHER; note S-N-(1,3-dimethylimidazolidin-2-ylidene)phosphoramidate
  modified_base 9: mod_base = cm
  modified_base 10: mod_base = OTHER; note = 2-O-methylribose adenine
  modified_base 11: mod_base = OTHER; note = 2-O-methylribose adenine
  modified_base 12: mod_base = gm
  modified_base 13: mod_base = OTHER; note = 2-O-methylribose adenine
  modified_base 14: mod_base = OTHER; note = 2-fluororibose adenine
  modified_base 15: mod_base = cm
  modified_base 16: mod_base = OTHER; note = 2-fluororibose adenine
  modified_base 17: mod_base = cm
  modified_base 18: mod_base = um
  modified_base 19: mod_base = gm
  modified_base 20: mod_base = um
  modified_base 21: mod_base = um
  modified_base 21..22: mod_base = OTHER; note = S-phosphorothioate
  modified_base 22: mod_base = um
  modified_base 22..23: mod_base = OTHER; note = S-phosphorothioate
  modified_base 23: mod_base = um
  source 1..23: mol_type = other RNA
ttatagagcaagaacactgtttt

SEQ ID NO: 76 - RNA, 23 nt, synthetic construct
  misc_feature 1..23: note = Synthetic: WV-46567
  misc_feature 1..23: note = Synthetic: SSR-0104577
  modified_base 1: mod_base = um
  modified_base 1..2: mod_base = OTHER; note = S-phosphorothioate
  modified_base 2: mod_base = OTHER; note = 2-fluororibose uracil
  modified_base 2..3: mod_base = OTHER; note = R-phosphorothioate
  modified_base 3: mod_base = OTHER; note = 2-O-methylribose adenine
  modified_base 4: mod_base = um
  modified_base 5: mod_base = OTHER; note = 2-O-methylribose adenine
  modified_base 6: mod_base = OTHER; note = 2-fluororibose guanine
  modified_base 7: mod_base = OTHER; note = 2-O-methylribose adenine
  modified_base 8: mod_base = gm
  modified_base 9: mod_base = cm
  modified_base 9..10: mod_base = OTHER; note S-N-(1,3-dimethylimidazolidin-2-ylidene)phosphoramidate
  modified_base 10: mod_base = OTHER; note = 2-O-methylribose adenine
  modified_base 11: mod_base = OTHER; note = 2-O-methylribose adenine
  modified_base 12: mod_base = gm
  modified_base 13: mod_base = OTHER; note = 2-O-methylribose adenine
  modified_base 14: mod_base = OTHER; note = 2-fluororibose adenine
  modified_base 15: mod_base = cm
  modified_base 16: mod_base = OTHER; note = 2-fluororibose adenine
  modified_base 17: mod_base = cm
  modified_base 18: mod_base = um
  modified_base 19: mod_base = gm
  modified_base 20: mod_base = um
  modified_base 21: mod_base = um
  modified_base 21..22: mod_base = OTHER; note = S-phosphorothioate
  modified_base 22: mod_base = um
  modified_base 22..23: mod_base = OTHER; note = S-phosphorothioate
  modified_base 23: mod_base = um
  source 1..23: mol_type = other RNA
ttatagagcaagaacactgtttt

SEQ ID NO: 77 - RNA, 23 nt, synthetic construct
  misc_feature 1..23: note = Synthetic: WV-44452
  misc_feature 1..23: note = Synthetic: SSR-0104583
  modified_base 1: mod_base = um
  modified_base 1..2: mod_base = OTHER; note = S-phosphorothioate
  modified_base 2: mod_base = OTHER; note = 2-fluororibose uracil
  modified_base 2..3: mod_base = OTHER; note = R-phosphorothioate
  modified_base 3: mod_base = OTHER; note = 2-O-methylribose adenine
  modified_base 4: mod_base = um
  modified_base 5: mod_base = OTHER; note = 2-O-methylribose adenine
  modified_base 6: mod_base = OTHER; note = 2-fluororibose guanine
  modified_base 7: mod_base = OTHER; note = 2-O-methylribose adenine
  modified_base 8: mod_base = gm
  modified_base 9: mod_base = cm
  modified_base 10: mod_base = OTHER; note = 2-O-methylribose adenine
  modified_base 10..11: mod_base = OTHER; note S-N-(1,3-dimethylimidazolidin-2-ylidene)phosphoramidate
  modified_base 11: mod_base = OTHER; note = 2-O-methylribose adenine
  modified_base 12: mod_base = gm
  modified_base 13: mod_base = OTHER; note = 2-O-methylribose adenine
  modified_base 14: mod_base = OTHER; note = 2-fluororibose adenine
  modified_base 15: mod_base = cm
  modified_base 16: mod_base = OTHER; note = 2-fluororibose adenine
  modified_base 17: mod_base = cm
  modified_base 18: mod_base = um
  modified_base 19: mod_base = gm
  modified_base 20: mod_base = um
  modified_base 21: mod_base = um
  modified_base 21..22: mod_base = OTHER; note = S-phosphorothioate
  modified_base 22: mod_base = um
  modified_base 22..23: mod_base = OTHER; note = S-phosphorothioate
  modified_base 23: mod_base = um
  source 1..23: mol_type = other RNA
ttatagagcaagaacactgtttt

SEQ ID NO: 78 - RNA, 23 nt, synthetic construct
  misc_feature 1..23: note = Synthetic: WV-46568
  misc_feature 1..23: note = Synthetic: SSR-0104589
  modified_base 1: mod_base = um
  modified_base 1..2: mod_base = OTHER; note = S-phosphorothioate
  modified_base 2: mod_base = OTHER; note = 2-fluororibose uracil
  modified_base 2..3: mod_base = OTHER; note = R-phosphorothioate
  modified_base 3: mod_base = OTHER; note = 2-O-methylribose adenine
  modified_base 4: mod_base = um
  modified_base 5: mod_base = OTHER; note = 2-O-methylribose adenine
  modified_base 6: mod_base = OTHER; note = 2-fluororibose guanine
  modified_base 7: mod_base = OTHER; note = 2-O-methylribose adenine
  modified_base 8: mod_base = gm
  modified_base 9: mod_base = cm
  modified_base 10: mod_base = OTHER; note = 2-O-methylribose adenine
  modified_base 11: mod_base = OTHER; note = 2-O-methylribose adenine
  modified_base 11..12: mod_base = OTHER; note S-N-(1,3-dimethylimidazolidin-2-ylidene)phosphoramidate
  modified_base 12: mod_base = gm
  modified_base 13: mod_base = OTHER; note = 2-O-methylribose adenine
  modified_base 14: mod_base = OTHER; note = 2-fluororibose adenine
  modified_base 15: mod_base = cm
  modified_base 16: mod_base = OTHER; note = 2-fluororibose adenine
  modified_base 17: mod_base = cm
  modified_base 18: mod_base = um
  modified_base 19: mod_base = gm
  modified_base 20: mod_base = um
  modified_base 21: mod_base = um
  modified_base 21..22: mod_base = OTHER; note = S-phosphorothioate
  modified_base 22: mod_base = um
  modified_base 22..23: mod_base = OTHER; note = S-phosphorothioate
  modified_base 23: mod_base = um
  source 1..23: mol_type = other RNA
ttatagagcaagaacactgtttt

SEQ ID NO: 79 - RNA, 23 nt, synthetic construct
  misc_feature 1..23: note = Synthetic: WV-46569
  misc_feature 1..23: note = Synthetic: SSR-0104593
  modified_base 1: mod_base = um
  modified_base 1..2: mod_base = OTHER; note = S-phosphorothioate
  modified_base 2: mod_base = OTHER; note = 2-fluororibose uracil
  modified_base 2..3: mod_base = OTHER; note = R-phosphorothioate
  modified_base 3: mod_base = OTHER; note = 2-O-methylribose adenine
  modified_base 4: mod_base = um
  modified_base 5: mod_base = OTHER; note = 2-O-methylribose adenine
  modified_base 6: mod_base = OTHER; note = 2-fluororibose guanine
  modified_base 7: mod_base = OTHER; note = 2-O-methylribose adenine
  modified_base 8: mod_base = gm
  modified_base 9: mod_base = cm
  modified_base 10: mod_base = OTHER; note = 2-O-methylribose adenine
  modified_base 11: mod_base = OTHER; note = 2-O-methylribose adenine
  modified_base 12: mod_base = gm
  modified_base 12..13: mod_base = OTHER; note S-N-(1,3-dimethylimidazolidin-2-ylidene)phosphoramidate
  modified_base 13: mod_base = OTHER; note = 2-O-methylribose adenine
  modified_base 14: mod_base = OTHER; note = 2-fluororibose adenine
  modified_base 15: mod_base = cm
  modified_base 16: mod_base = OTHER; note = 2-fluororibose adenine
  modified_base 17: mod_base = cm
  modified_base 18: mod_base = um
  modified_base 19: mod_base = gm
  modified_base 20: mod_base = um
  modified_base 21: mod_base = um
  modified_base 21..22: mod_base = OTHER; note = S-phosphorothioate
  modified_base 22: mod_base = um
  modified_base 22..23: mod_base = OTHER; note = S-phosphorothioate
  modified_base 23: mod_base = um
  source 1..23: mol_type = other RNA
ttatagagcaagaacactgtttt

SEQ ID NO: 80 - RNA, 23 nt, synthetic construct
  misc_feature 1..23: note = Synthetic: WV-46570
  misc_feature 1..23: note = Synthetic: SSR-0104595
  modified_base 1: mod_base = um
  modified_base 1..2: mod_base = OTHER; note = S-phosphorothioate
  modified_base 2: mod_base = OTHER; note = 2-fluororibose uracil
  modified_base 2..3: mod_base = OTHER; note = R-phosphorothioate
  modified_base 3: mod_base = OTHER; note = 2-O-methylribose adenine
  modified_base 4: mod_base = um
  modified_base 5: mod_base = OTHER; note = 2-O-methylribose adenine
  modified_base 6: mod_base = OTHER; note = 2-fluororibose guanine
  modified_base 7: mod_base = OTHER; note = 2-O-methylribose adenine
  modified_base 8: mod_base = gm
  modified_base 9: mod_base = cm
  modified_base 10: mod_base = OTHER; note = 2-O-methylribose adenine
  modified_base 11: mod_base = OTHER; note = 2-O-methylribose adenine
  modified_base 12: mod_base = gm
  modified_base 13: mod_base = OTHER; note = 2-O-methylribose adenine
  modified_base 13..14: mod_base = OTHER; note S-N-(1,3-dimethylimidazolidin-2-ylidene)phosphoramidate
  modified_base 14: mod_base = OTHER; note = 2-fluororibose adenine
  modified_base 15: mod_base = cm
  modified_base 16: mod_base = OTHER; note = 2-fluororibose adenine
  modified_base 17: mod_base = cm
  modified_base 18: mod_base = um
  modified_base 19: mod_base = gm
  modified_base 20: mod_base = um
  modified_base 21: mod_base = um
  modified_base 21..22: mod_base = OTHER; note = S-phosphorothioate
  modified_base 22: mod_base = um
  modified_base 22..23: mod_base = OTHER; note = S-phosphorothioate
  modified_base 23: mod_base = um
  source 1..23: mol_type = other RNA
ttatagagcaagaacactgtttt

SEQ ID NO: 81 - RNA, 23 nt, synthetic construct
  misc_feature 1..23: note = Synthetic: WV-46571
  misc_feature 1..23: note = Synthetic: SSR-0104599
  modified_base 1: mod_base = um
  modified_base 1..2: mod_base = OTHER; note = S-phosphorothioate
  modified_base 2: mod_base = OTHER; note = 2-fluororibose uracil
  modified_base 2..3: mod_base = OTHER; note = R-phosphorothioate
  modified_base 3: mod_base = OTHER; note = 2-O-methylribose adenine
  modified_base 4: mod_base = um
  modified_base 5: mod_base = OTHER; note = 2-O-methylribose adenine
  modified_base 6: mod_base = OTHER; note = 2-fluororibose guanine
  modified_base 7: mod_base = OTHER; note = 2-O-methylribose adenine
  modified_base 8: mod_base = gm
  modified_base 9: mod_base = cm
  modified_base 10: mod_base = OTHER; note = 2-O-methylribose adenine
  modified_base 11: mod_base = OTHER; note = 2-O-methylribose adenine
  modified_base 12: mod_base = gm
  modified_base 13: mod_base = OTHER; note = 2-O-methylribose adenine
  modified_base 14: mod_base = OTHER; note = 2-fluororibose adenine
  modified_base 14..15: mod_base = OTHER; note S-N-(1,3-dimethylimidazolidin-2-ylidene)phosphoramidate
  modified_base 15: mod_base = cm
  modified_base 16: mod_base = OTHER; note = 2-fluororibose adenine
  modified_base 17: mod_base = cm
  modified_base 18: mod_base = um
  modified_base 19: mod_base = gm
  modified_base 20: mod_base = um
  modified_base 21: mod_base = um
  modified_base 21..22: mod_base = OTHER; note = S-phosphorothioate
  modified_base 22: mod_base = um
  modified_base 22..23: mod_base = OTHER; note = S-phosphorothioate
  modified_base 23: mod_base = um
  source 1..23: mol_type = other RNA
ttatagagcaagaacactgtttt

SEQ ID NO: 82 - RNA, 23 nt, synthetic construct
  misc_feature 1..23: note = Synthetic: WV-46572
  misc_feature 1..23: note = Synthetic: SSR-0104601
  modified_base 1: mod_base = um
  modified_base 1..2: mod_base = OTHER; note = S-phosphorothioate
  modified_base 2: mod_base = OTHER; note = 2-fluororibose uracil
  modified_base 2..3: mod_base = OTHER; note = R-phosphorothioate
  modified_base 3: mod_base = OTHER; note = 2-O-methylribose adenine
  modified_base 4: mod_base = um
  modified_base 5: mod_base = OTHER; note = 2-O-methylribose adenine
  modified_base 6: mod_base = OTHER; note = 2-fluororibose guanine
  modified_base 7: mod_base = OTHER; note = 2-O-methylribose adenine
  modified_base 8: mod_base = gm
  modified_base 9: mod_base = cm
  modified_base 10: mod_base = OTHER; note = 2-O-methylribose adenine
  modified_base 11: mod_base = OTHER; note = 2-O-methylribose adenine
  modified_base 12: mod_base = gm
  modified_base 13: mod_base = OTHER; note = 2-O-methylribose adenine
  modified_base 14: mod_base = OTHER; note = 2-fluororibose adenine
  modified_base 15: mod_base = cm
  modified_base 15..16: mod_base = OTHER; note S-N-(1,3-dimethylimidazolidin-2-ylidene)phosphoramidate
  modified_base 16: mod_base = OTHER; note = 2-fluororibose adenine
  modified_base 17: mod_base = cm
  modified_base 18: mod_base = um
  modified_base 19: mod_base = gm
  modified_base 20: mod_base = um
  modified_base 21: mod_base = um
  modified_base 21..22: mod_base = OTHER; note = S-phosphorothioate
  modified_base 22: mod_base = um
  modified_base 22..23: mod_base = OTHER; note = S-phosphorothioate
  modified_base 23: mod_base = um
  source 1..23: mol_type = other RNA
ttatagagcaagaacactgtttt

SEQ ID NO: 83 - RNA, 23 nt, synthetic construct
  misc_feature 1..23: note = Synthetic: WV-46573
  misc_feature 1..23: note = Synthetic: SSR-0104605
  modified_base 1: mod_base = um
  modified_base 1..2: mod_base = OTHER; note = S-phosphorothioate
  modified_base 2: mod_base = OTHER; note = 2-fluororibose uracil
  modified_base 2..3: mod_base = OTHER; note = R-phosphorothioate
  modified_base 3: mod_base = OTHER; note = 2-O-methylribose adenine
  modified_base 4: mod_base = um
  modified_base 5: mod_base = OTHER; note = 2-O-methylribose adenine
  modified_base 6: mod_base = OTHER; note = 2-fluororibose guanine
  modified_base 7: mod_base = OTHER; note = 2-O-methylribose adenine
  modified_base 8: mod_base = gm
  modified_base 9: mod_base = cm
  modified_base 10: mod_base = OTHER; note = 2-O-methylribose adenine
  modified_base 11: mod_base = OTHER; note = 2-O-methylribose adenine
  modified_base 12: mod_base = gm
  modified_base 13: mod_base = OTHER; note = 2-O-methylribose adenine
  modified_base 14: mod_base = OTHER; note = 2-fluororibose adenine
  modified_base 15: mod_base = cm
  modified_base 16: mod_base = OTHER; note = 2-fluororibose adenine
  modified_base 16..17: mod_base = OTHER; note S-N-(1,3-dimethylimidazolidin-2-ylidene)phosphoramidate
  modified_base 17: mod_base = cm
  modified_base 18: mod_base = um
  modified_base 19: mod_base = gm
  modified_base 20: mod_base = um
  modified_base 21: mod_base = um
  modified_base 21..22: mod_base = OTHER; note = S-phosphorothioate
  modified_base 22: mod_base = um
  modified_base 22..23: mod_base = OTHER; note = S-phosphorothioate
  modified_base 23: mod_base = um
  source 1..23: mol_type = other RNA
ttatagagcaagaacactgtttt

SEQ ID NO: 84 - RNA, 23 nt, synthetic construct
  misc_feature 1..23: note = Synthetic: WV-46574
  misc_feature 1..23: note = Synthetic: SSR-0104609
  modified_base 1: mod_base = um
  modified_base 1..2: mod_base = OTHER; note = S-phosphorothioate
  modified_base 2: mod_base = OTHER; note = 2-fluororibose uracil
  modified_base 2..3: mod_base = OTHER; note = R-phosphorothioate
  modified_base 3: mod_base = OTHER; note = 2-O-methylribose adenine
  modified_base 4: mod_base = um
  modified_base 5: mod_base = OTHER; note = 2-O-methylribose adenine
  modified_base 6: mod_base = OTHER; note = 2-fluororibose guanine
  modified_base 7: mod_base = OTHER; note = 2-O-methylribose adenine
  modified_base 8: mod_base = gm
  modified_base 9: mod_base = cm
  modified_base 10: mod_base = OTHER; note = 2-O-methylribose adenine
  modified_base 11: mod_base = OTHER; note = 2-O-methylribose adenine
  modified_base 12: mod_base = gm
  modified_base 13: mod_base = OTHER; note = 2-O-methylribose adenine
  modified_base 14: mod_base = OTHER; note = 2-fluororibose adenine
  modified_base 15: mod_base = cm
  modified_base 16: mod_base = OTHER; note = 2-fluororibose adenine
  modified_base 17: mod_base = cm
  modified_base 17..18: mod_base = OTHER; note S-N-(1,3-dimethylimidazolidin-2-ylidene)phosphoramidate
  modified_base 18: mod_base = um
  modified_base 19: mod_base = gm
  modified_base 20: mod_base = um
  modified_base 21: mod_base = um
  modified_base 21..22: mod_base = OTHER; note = S-phosphorothioate
  modified_base 22: mod_base = um
  modified_base 22..23: mod_base = OTHER; note = S-phosphorothioate
  modified_base 23: mod_base = um
  source 1..23: mol_type = other RNA
ttatagagcaagaacactgtttt

SEQ ID NO: 85 - RNA, 23 nt, synthetic construct
  misc_feature 1..23: note = Synthetic: WV-46575
  misc_feature 1..23: note = Synthetic: SSR-0104613
  modified_base 1: mod_base = um
  modified_base 1..2: mod_base = OTHER; note = S-phosphorothioate
  modified_base 2: mod_base = OTHER; note = 2-fluororibose uracil
  modified_base 2..3: mod_base = OTHER; note = R-phosphorothioate
  modified_base 3: mod_base = OTHER; note = 2-O-methylribose adenine
  modified_base 4: mod_base = um
  modified_base 5: mod_base = OTHER; note = 2-O-methylribose adenine
  modified_base 6: mod_base = OTHER; note = 2-fluororibose guanine
  modified_base 7: mod_base = OTHER; note = 2-O-methylribose adenine
  modified_base 8: mod_base = gm
  modified_base 9: mod_base = cm
  modified_base 10: mod_base = OTHER; note = 2-O-methylribose adenine
  modified_base 11: mod_base = OTHER; note = 2-O-methylribose adenine
  modified_base 12: mod_base = gm
  modified_base 13: mod_base = OTHER; note = 2-O-methylribose adenine
  modified_base 14: mod_base = OTHER; note = 2-fluororibose adenine
  modified_base 15: mod_base = cm
  modified_base 16: mod_base = OTHER; note = 2-fluororibose adenine
  modified_base 17: mod_base = cm
  modified_base 18: mod_base = um
  modified_base 18..19: mod_base = OTHER; note S-N-(1,3-dimethylimidazolidin-2-ylidene)phosphoramidate
  modified_base 19: mod_base = gm
  modified_base 20: mod_base = um
  modified_base 21: mod_base = um
  modified_base 21..22: mod_base = OTHER; note = S-phosphorothioate
  modified_base 22: mod_base = um
  modified_base 22..23: mod_base = OTHER; note = S-phosphorothioate
  modified_base 23: mod_base = um
  source 1..23: mol_type = other RNA
ttatagagcaagaacactgtttt

SEQ ID NO: 86 - RNA, 23 nt, synthetic construct
  misc_feature 1..23: note = Synthetic: WV-44451
  misc_feature 1..23: note = Synthetic: SSR-0104617
  modified_base 1: mod_base = um
  modified_base 1..2: mod_base = OTHER; note = S-phosphorothioate
  modified_base 2: mod_base = OTHER; note = 2-fluororibose uracil
  modified_base 2..3: mod_base = OTHER; note = R-phosphorothioate
  modified_base 3: mod_base = OTHER; note = 2-O-methylribose adenine
  modified_base 4: mod_base = um
  modified_base 5: mod_base = OTHER; note = 2-O-methylribose adenine
  modified_base 6: mod_base = OTHER; note = 2-fluororibose guanine
  modified_base 7: mod_base = OTHER; note = 2-O-methylribose adenine
  modified_base 8: mod_base = gm
  modified_base 9: mod_base = cm
  modified_base 10: mod_base = OTHER; note = 2-O-methylribose adenine
  modified_base 11: mod_base = OTHER; note = 2-O-methylribose adenine
  modified_base 12: mod_base = gm
  modified_base 13: mod_base = OTHER; note = 2-O-methylribose adenine
  modified_base 14: mod_base = OTHER; note = 2-fluororibose adenine
  modified_base 15: mod_base = cm
  modified_base 16: mod_base = OTHER; note = 2-fluororibose adenine
  modified_base 17: mod_base = cm
  modified_base 18: mod_base = um
  modified_base 19: mod_base = gm
  modified_base 19..20: mod_base = OTHER; note S-N-(1,3-dimethylimidazolidin-2-ylidene)phosphoramidate
  modified_base 20: mod_base = um
  modified_base 21: mod_base = um
  modified_base 21..22: mod_base = OTHER; note = S-phosphorothioate
  modified_base 22: mod_base = um
  modified_base 22..23: mod_base = OTHER; note = S-phosphorothioate
  modified_base 23: mod_base = um
  source 1..23: mol_type = other RNA
ttatagagcaagaacactgtttt

SEQ ID NO: 87 - RNA, 23 nt, synthetic construct
  misc_feature 1..23: note = Synthetic: WV-46576
  misc_feature 1..23: note = Synthetic: SSR-0104621
  modified_base 1: mod_base = um
  modified_base 1..2: mod_base = OTHER; note = S-phosphorothioate
  modified_base 2: mod_base = OTHER; note = 2-fluororibose uracil
  modified_base 2..3: mod_base = OTHER; note = R-phosphorothioate
  modified_base 3: mod_base = OTHER; note = 2-O-methylribose adenine
  modified_base 4: mod_base = um
  modified_base 5: mod_base = OTHER; note = 2-O-methylribose adenine
  modified_base 6: mod_base = OTHER; note = 2-fluororibose guanine
  modified_base 7: mod_base = OTHER; note = 2-O-methylribose adenine
  modified_base 8: mod_base = gm
  modified_base 9: mod_base = cm
  modified_base 10: mod_base = OTHER; note = 2-O-methylribose adenine
  modified_base 11: mod_base = OTHER; note = 2-O-methylribose adenine
  modified_base 12: mod_base = gm
  modified_base 13: mod_base = OTHER; note = 2-O-methylribose adenine
  modified_base 14: mod_base = OTHER; note = 2-fluororibose adenine
  modified_base 15: mod_base = cm
  modified_base 16: mod_base = OTHER; note = 2-fluororibose adenine
  modified_base 17: mod_base = cm
  modified_base 18: mod_base = um
  modified_base 19: mod_base = gm
  modified_base 20: mod_base = um
  modified_base 20..21: mod_base = OTHER; note S-N-(1,3-dimethylimidazolidin-2-ylidene)phosphoramidate
  modified_base 21: mod_base = um
  modified_base 21..22: mod_base = OTHER; note = S-phosphorothioate
  modified_base 22: mod_base = um
  modified_base 22..23: mod_base = OTHER; note = S-phosphorothioate
  modified_base 23: mod_base = um
  source 1..23: mol_type = other RNA
ttatagagcaagaacactgtttt

SEQ ID NO: 88 - RNA, 23 nt, synthetic construct
  misc_feature 1..23: note = Synthetic: WV-46577
  misc_feature 1..23: note = Synthetic: SSR-0104630
  modified_base 1: mod_base = um
  modified_base 1..2: mod_base = OTHER; note = S-phosphorothioate
  modified_base 2: mod_base = OTHER; note = 2-fluororibose uracil
  modified_base 2..3: mod_base = OTHER; note = R-phosphorothioate
  modified_base 3: mod_base = OTHER; note = 2-O-methylribose adenine
  modified_base 4: mod_base = um
  modified_base 5: mod_base = OTHER; note = 2-O-methylribose adenine
  modified_base 6: mod_base = OTHER; note = 2-fluororibose guanine
  modified_base 7: mod_base = OTHER; note = 2-O-methylribose adenine
  modified_base 8: mod_base = gm
  modified_base 9: mod_base = cm
  modified_base 10: mod_base = OTHER; note = 2-O-methylribose adenine
  modified_base 11: mod_base = OTHER; note = 2-O-methylribose adenine
  modified_base 12: mod_base = gm
  modified_base 13: mod_base = OTHER; note = 2-O-methylribose adenine
  modified_base 14: mod_base = OTHER; note = 2-fluororibose adenine
  modified_base 15: mod_base = cm
  modified_base 16: mod_base = OTHER; note = 2-fluororibose adenine
  modified_base 17: mod_base = cm
  modified_base 18: mod_base = um
  modified_base 19: mod_base = gm
  modified_base 20: mod_base = um
  modified_base 21: mod_base = um
  modified_base 21..22: mod_base = OTHER; note S-N-(1,3-dimethylimidazolidin-2-ylidene)phosphoramidate
  modified_base 22: mod_base = um
  modified_base 22..23: mod_base = OTHER; note = S-phosphorothioate
  modified_base 23: mod_base = um
  source 1..23: mol_type = other RNA
ttatagagcaagaacactgtttt

SEQ ID NO: 89 - RNA, 23 nt, synthetic construct
  misc_feature 1..23: note = Synthetic: WV-44457
  misc_feature 1..23: note = Synthetic: SSR-0104626
  modified_base 1: mod_base = um
  modified_base 1..2: mod_base = OTHER; note = S-phosphorothioate
  modified_base 2: mod_base = OTHER; note = 2-fluororibose uracil
  modified_base 2..3: mod_base = OTHER; note = R-phosphorothioate
  modified_base 3: mod_base = OTHER; note = 2-O-methylribose adenine
  modified_base 4: mod_base = um
  modified_base 5: mod_base = OTHER; note = 2-O-methylribose adenine
  modified_base 6: mod_base = OTHER; note = 2-fluororibose guanine
  modified_base 7: mod_base = OTHER; note = 2-O-methylribose adenine
  modified_base 8: mod_base = gm
  modified_base 9: mod_base = cm
  modified_base 10: mod_base = OTHER; note = 2-O-methylribose adenine
  modified_base 11: mod_base = OTHER; note = 2-O-methylribose adenine
  modified_base 12: mod_base = gm
  modified_base 13: mod_base = OTHER; note = 2-O-methylribose adenine
  modified_base 14: mod_base = OTHER; note = 2-fluororibose adenine
  modified_base 15: mod_base = cm
  modified_base 16: mod_base = OTHER; note = 2-fluororibose adenine
  modified_base 17: mod_base = cm
  modified_base 18: mod_base = um
  modified_base 19: mod_base = gm
  modified_base 20: mod_base = um
  modified_base 21: mod_base = um
  modified_base 21..22: mod_base = OTHER; note = S-phosphorothioate
  modified_base 22: mod_base = um
  modified_base 22..23: mod_base = OTHER; note S-N-(1,3-dimethylimidazolidin-2-ylidene)phosphoramidate
  modified_base 23: mod_base = um
  source 1..23: mol_type = other RNA
ttatagagcaagaacactgtttt

SEQ ID NO: 90 - RNA, 23 nt, synthetic construct
  misc_feature 1..23: note = Synthetic: WV-43774
  misc_feature 1..23: note = Synthetic: SSR-0104406
  modified_base 1: mod_base = um
  modified_base 1..2: mod_base = OTHER; note = R-phosphorothioate
  modified_base 2: mod_base = OTHER; note = 2-fluororibose uracil
  modified_base 2..3: mod_base = OTHER; note = S-phosphorothioate
  modified_base 3: mod_base = OTHER; note = 2-O-methylribose adenine
  modified_base 4: mod_base = um
  modified_base 5: mod_base = OTHER; note = 2-O-methylribose adenine
  modified_base 6: mod_base = OTHER; note = 2-fluororibose guanine
  modified_base 7: mod_base = OTHER; note = 2-O-methylribose adenine
  modified_base 8: mod_base = gm
  modified_base 9: mod_base = cm
  modified_base 10: mod_base = OTHER; note = 2-O-methylribose adenine
  modified_base 11: mod_base = OTHER; note = 2-O-methylribose adenine
  modified_base 12: mod_base = gm
  modified_base 13: mod_base = OTHER; note = 2-O-methylribose adenine
  modified_base 14: mod_base = OTHER; note = 2-fluororibose adenine
  modified_base 15: mod_base = cm
  modified_base 16: mod_base = OTHER; note = 2-fluororibose adenine
  modified_base 17: mod_base = cm
  modified_base 18: mod_base = um
  modified_base 19: mod_base = gm
  modified_base 20: mod_base = um
  modified_base 21: mod_base = um
  modified_base 21..22: mod_base = OTHER; note = S-phosphorothioate
  modified_base 22: mod_base = um
  modified_base 22..23: mod_base = OTHER; note = S-phosphorothioate
  modified_base 23: mod_base = um
  source 1..23: mol_type = other RNA
ttatagagcaagaacactgtttt

SEQ ID NO: 91 - RNA, 23 nt, synthetic construct
  misc_feature 1..23: note = Synthetic: WV-47066
  misc_feature 1..23: note = Synthetic: SSR-0104415
  modified_base 1: mod_base = um
  modified_base 1..2: mod_base = OTHER; note = R-phosphorothioate
  modified_base 2: mod_base = OTHER; note = 2-fluororibose uracil
  modified_base 2..3: mod_base = OTHER; note R-N-(1,3-dimethylimidazolidin-2-ylidene)phosphoramidate
  modified_base 3: mod_base = OTHER; note = 2-fluororibose adenine
  modified_base 4: mod_base = um
  modified_base 5: mod_base = OTHER; note = 2-O-methylribose adenine
  modified_base 6: mod_base = OTHER; note = 2-fluororibose guanine
  modified_base 7: mod_base = OTHER; note = 2-O-methylribose adenine
  modified_base 8: mod_base = gm
  modified_base 9: mod_base = cm
  modified_base 10: mod_base = OTHER; note = 2-O-methylribose adenine
  modified_base 11: mod_base = OTHER; note = 2-O-methylribose adenine
  modified_base 12: mod_base = gm
  modified_base 13: mod_base = OTHER; note = 2-O-methylribose adenine
  modified_base 14: mod_base = OTHER; note = 2-fluororibose adenine
  modified_base 15: mod_base = cm
  modified_base 16: mod_base = OTHER; note = 2-fluororibose adenine
  modified_base 17: mod_base = cm
  modified_base 18: mod_base = um
  modified_base 19: mod_base = gm
  modified_base 20: mod_base = um
  modified_base 21: mod_base = um
  modified_base 21..22: mod_base = OTHER; note = S-phosphorothioate
  modified_base 22: mod_base = um
  modified_base 22..23: mod_base = OTHER; note = S-phosphorothioate
  modified_base 23: mod_base = um
  source 1..23: mol_type = other RNA
ttatagagcaagaacactgtttt

SEQ ID NO: 92 - RNA, 23 nt, synthetic construct
  misc_feature 1..23: note = Synthetic: WV-47067
  misc_feature 1..23: note = Synthetic: SSR-0104268
  modified_base 1: mod_base = um
  modified_base 1..2: mod_base = OTHER; note = R-phosphorothioate
  modified_base 2: mod_base = OTHER; note = 2-fluororibose uracil
  modified_base 2..3: mod_base = OTHER; note = S-phosphorothioate
  modified_base 3: mod_base = OTHER; note = 2-O-methylribose adenine
  modified_base 3..4: mod_base = OTHER; note R-N-(1,3-dimethylimidazolidin-2-ylidene)phosphoramidate
  modified_base 4: mod_base = OTHER; note = 2-fluororibose uracil
  modified_base 5: mod_base = OTHER; note = 2-O-methylribose adenine
  modified_base 6: mod_base = OTHER; note = 2-fluororibose guanine
  modified_base 7: mod_base = OTHER; note = 2-O-methylribose adenine
  modified_base 8: mod_base = gm
  modified_base 9: mod_base = cm
  modified_base 10: mod_base = OTHER; note = 2-O-methylribose adenine
  modified_base 11: mod_base = OTHER; note = 2-O-methylribose adenine
  modified_base 12: mod_base = gm
  modified_base 13: mod_base = OTHER; note = 2-O-methylribose adenine
  modified_base 14: mod_base = OTHER; note = 2-fluororibose adenine
  modified_base 15: mod_base = cm
  modified_base 16: mod_base = OTHER; note = 2-fluororibose adenine
  modified_base 17: mod_base = cm
  modified_base 18: mod_base = um
  modified_base 19: mod_base = gm
  modified_base 20: mod_base = um
  modified_base 21: mod_base = um
  modified_base 21..22: mod_base = OTHER; note = S-phosphorothioate
  modified_base 22: mod_base = um
  modified_base 22..23: mod_base = OTHER; note = S-phosphorothioate
  modified_base 23: mod_base = um
  source 1..23: mol_type = other RNA
ttatagagcaagaacactgtttt

SEQ ID NO: 93 - RNA, 23 nt, synthetic construct
  misc_feature 1..23: note = Synthetic: WV-47068
  misc_feature 1..23: note = Synthetic: SSR-0104341
  modified_base 1: mod_base = um
  modified_base 1..2: mod_base = OTHER; note = R-phosphorothioate
  modified_base 2: mod_base = OTHER; note = 2-fluororibose uracil
  modified_base 2..3: mod_base = OTHER; note = S-phosphorothioate
  modified_base 3: mod_base = OTHER; note = 2-O-methylribose adenine
  modified_base 4: mod_base = um
  modified_base 4..5: mod_base = OTHER; note R-N-(1,3-dimethylimidazolidin-2-ylidene)phosphoramidate
  modified_base 5: mod_base = OTHER; note = 2-fluororibose adenine
  modified_base 6: mod_base = OTHER; note = 2-fluororibose guanine
  modified_base 7: mod_base = OTHER; note = 2-O-methylribose adenine
  modified_base 8: mod_base = gm
  modified_base 9: mod_base = cm
  modified_base 10: mod_base = OTHER; note = 2-O-methylribose adenine
  modified_base 11: mod_base = OTHER; note = 2-O-methylribose adenine
  modified_base 12: mod_base = gm
  modified_base 13: mod_base = OTHER; note = 2-O-methylribose adenine
  modified_base 14: mod_base = OTHER; note = 2-fluororibose adenine
  modified_base 15: mod_base = cm
  modified_base 16: mod_base = OTHER; note = 2-fluororibose adenine
  modified_base 17: mod_base = cm
  modified_base 18: mod_base = um
  modified_base 19: mod_base = gm
  modified_base 20: mod_base = um
  modified_base 21: mod_base = um
  modified_base 21..22: mod_base = OTHER; note = S-phosphorothioate
  modified_base 22: mod_base = um
  modified_base 22..23: mod_base = OTHER; note = S-phosphorothioate
  modified_base 23: mod_base = um
  source 1..23: mol_type = other RNA
ttatagagcaagaacactgtttt

SEQ ID NO: 94 - RNA, 23 nt, synthetic construct
  misc_feature 1..23: note = Synthetic: WV-47069
  misc_feature 1..23: note = Synthetic: SSR-0104347
  modified_base 1: mod_base = um
  modified_base 1..2: mod_base = OTHER; note = R-phosphorothioate
  modified_base 2: mod_base = OTHER; note = 2-fluororibose uracil
  modified_base 2..3: mod_base = OTHER; note = S-phosphorothioate
  modified_base 3: mod_base = OTHER; note = 2-O-methylribose adenine
  modified_base 4: mod_base = um
  modified_base 5: mod_base = OTHER; note = 2-O-methylribose adenine
  modified_base 6: mod_base = OTHER; note = 2-fluororibose guanine
  modified_base 6..7: mod_base = OTHER; note R-N-(1,3-dimethylimidazolidin-2-ylidene)phosphoramidate
  modified_base 7: mod_base = OTHER; note = 2-fluororibose adenine
  modified_base 8: mod_base = gm
  modified_base 9: mod_base = cm
  modified_base 10: mod_base = OTHER; note = 2-O-methylribose adenine
  modified_base 11: mod_base = OTHER; note = 2-O-methylribose adenine
  modified_base 12: mod_base = gm
  modified_base 13: mod_base = OTHER; note = 2-O-methylribose adenine
  modified_base 14: mod_base = OTHER; note = 2-fluororibose adenine
  modified_base 15: mod_base = cm
  modified_base 16: mod_base = OTHER; note = 2-fluororibose adenine
  modified_base 17: mod_base = cm
  modified_base 18: mod_base = um
  modified_base 19: mod_base = gm
  modified_base 20: mod_base = um
  modified_base 21: mod_base = um
  modified_base 21..22: mod_base = OTHER; note = S-phosphorothioate
  modified_base 22: mod_base = um
  modified_base 22..23: mod_base = OTHER; note = S-phosphorothioate
  modified_base 23: mod_base = um
  source 1..23: mol_type = other RNA
ttatagagcaagaacactgtttt

SEQ ID NO: 95 - RNA, 23 nt, synthetic construct
  misc_feature 1..23: note = Synthetic: WV-47070
  misc_feature 1..23: note = Synthetic: SSR-0104351
  modified_base 1: mod_base = um
  modified_base 1..2: mod_base = OTHER; note = R-phosphorothioate
  modified_base 2: mod_base = OTHER; note = 2-fluororibose uracil
  modified_base 2..3: mod_base = OTHER; note = S-phosphorothioate
  modified_base 3: mod_base = OTHER; note = 2-O-methylribose adenine
  modified_base 4: mod_base = um
  modified_base 5: mod_base = OTHER; note = 2-O-methylribose adenine
  modified_base 6: mod_base = OTHER; note = 2-fluororibose guanine
  modified_base 7: mod_base = OTHER; note = 2-O-methylribose adenine
  modified_base 7..8: mod_base = OTHER; note R-N-(1,3-dimethylimidazolidin-2-ylidene)phosphoramidate
  modified_base 8: mod_base = OTHER; note = 2-fluororibose guanine
  modified_base 9: mod_base = cm
  modified_base 10: mod_base = OTHER; note = 2-O-methylribose adenine
  modified_base 11: mod_base = OTHER; note = 2-O-methylribose adenine
  modified_base 12: mod_base = gm
  modified_base 13: mod_base = OTHER; note = 2-O-methylribose adenine
  modified_base 14: mod_base = OTHER; note = 2-fluororibose adenine
  modified_base 15: mod_base = cm
  modified_base 16: mod_base = OTHER; note = 2-fluororibose adenine
  modified_base 17: mod_base = cm
  modified_base 18: mod_base = um
  modified_base 19: mod_base = gm
  modified_base 20: mod_base = um
  modified_base 21: mod_base = um
  modified_base 21..22: mod_base = OTHER; note = S-phosphorothioate
  modified_base 22: mod_base = um
  modified_base 22..23: mod_base = OTHER; note = S-phosphorothioate
  modified_base 23: mod_base = um
  source 1..23: mol_type = other RNA
ttatagagcaagaacactgtttt

SEQ ID NO: 96 - RNA, 23 nt, synthetic construct
  misc_feature 1..23: note = Synthetic: WV-47071
  misc_feature 1..23: note = Synthetic: SSR-0104356
  modified_base 1: mod_base = um
  modified_base 1..2: mod_base = OTHER; note = R-phosphorothioate
  modified_base 2: mod_base = OTHER; note = 2-fluororibose uracil
  modified_base 2..3: mod_base = OTHER; note = S-phosphorothioate
  modified_base 3: mod_base = OTHER; note = 2-O-methylribose adenine
  modified_base 4: mod_base = um
  modified_base 5: mod_base = OTHER; note = 2-O-methylribose adenine
  modified_base 6: mod_base = OTHER; note = 2-fluororibose guanine
  modified_base 7: mod_base = OTHER; note = 2-O-methylribose adenine
  modified_base 8: mod_base = gm
  modified_base 8..9: mod_base = OTHER; note R-N-(1,3-dimethylimidazolidin-2-ylidene)phosphoramidate
  modified_base 9: mod_base = OTHER; note = 2-fluororibose cytosine
  modified_base 10: mod_base = OTHER; note = 2-O-methylribose adenine
  modified_base 11: mod_base = OTHER; note = 2-O-methylribose adenine
  modified_base 12: mod_base = gm
  modified_base 13: mod_base = OTHER; note = 2-O-methylribose adenine
  modified_base 14: mod_base = OTHER; note = 2-fluororibose adenine
  modified_base 15: mod_base = cm
  modified_base 16: mod_base = OTHER; note = 2-fluororibose adenine
  modified_base 17: mod_base = cm
  modified_base 18: mod_base = um
  modified_base 19: mod_base = gm
  modified_base 20: mod_base = um
  modified_base 21: mod_base = um
  modified_base 21..22: mod_base = OTHER; note = S-phosphorothioate
  modified_base 22: mod_base = um
  modified_base 22..23: mod_base = OTHER; note = S-phosphorothioate
  modified_base 23: mod_base = um
  source 1..23: mol_type = other RNA
ttatagagcaagaacactgtttt

SEQ ID NO: 97 - RNA, 23 nt, synthetic construct
  misc_feature 1..23: note = Synthetic: WV-47072
  misc_feature 1..23: note = Synthetic: SSR-0104360
  modified_base 1: mod_base = um
  modified_base 1..2: mod_base = OTHER; note = R-phosphorothioate
  modified_base 2: mod_base = OTHER; note = 2-fluororibose uracil
  modified_base 2..3: mod_base = OTHER; note = S-phosphorothioate
  modified_base 3: mod_base = OTHER; note = 2-O-methylribose adenine
  modified_base 4: mod_base = um
  modified_base 5: mod_base = OTHER; note = 2-O-methylribose adenine
  modified_base 6: mod_base = OTHER; note = 2-fluororibose guanine
  modified_base 7: mod_base = OTHER; note = 2-O-methylribose adenine
  modified_base 8: mod_base = gm
  modified_base 9: mod_base = cm
  modified_base 9..10: mod_base = OTHER; note R-N-(1,3-dimethylimidazolidin-2-ylidene)phosphoramidate
  modified_base 10: mod_base = OTHER; note = 2-fluororibose adenine
  modified_base 11: mod_base = OTHER; note = 2-O-methylribose adenine
  modified_base 12: mod_base = gm
  modified_base 13: mod_base = OTHER; note = 2-O-methylribose adenine
  modified_base 14: mod_base = OTHER; note = 2-fluororibose adenine
  modified_base 15: mod_base = cm
  modified_base 16: mod_base = OTHER; note = 2-fluororibose adenine
  modified_base 17: mod_base = cm
  modified_base 18: mod_base = um
  modified_base 19: mod_base = gm
  modified_base 20: mod_base = um
  modified_base 21: mod_base = um
  modified_base 21..22: mod_base = OTHER; note = S-phosphorothioate
  modified_base 22: mod_base = um
  modified_base 22..23: mod_base = OTHER; note = S-phosphorothioate
  modified_base 23: mod_base = um
  source 1..23: mol_type = other RNA
ttatagagcaagaacactgtttt

SEQ ID NO: 98 - RNA, 23 nt, synthetic construct
  misc_feature 1..23: note = Synthetic: WV-47073
  misc_feature 1..23: note = Synthetic: SSR-0104365
  modified_base 1: mod_base = um
  modified_base 1..2: mod_base = OTHER; note = R-phosphorothioate
  modified_base 2: mod_base = OTHER; note = 2-fluororibose uracil
  modified_base 2..3: mod_base = OTHER; note = S-phosphorothioate
  modified_base 3: mod_base = OTHER; note = 2-O-methylribose adenine
  modified_base 4: mod_base = um
  modified_base 5: mod_base = OTHER; note = 2-O-methylribose adenine
  modified_base 6: mod_base = OTHER; note = 2-fluororibose guanine
  modified_base 7: mod_base = OTHER; note = 2-O-methylribose adenine
  modified_base 8: mod_base = gm
  modified_base 9: mod_base = cm
  modified_base 10: mod_base = OTHER; note = 2-O-methylribose adenine
  modified_base 10..11: mod_base = OTHER; note R-N-(1,3-dimethylimidazolidin-2-ylidene)phosphoramidate
  modified_base 11: mod_base = OTHER; note = 2-fluororibose adenine
  modified_base 12: mod_base = gm
  modified_base 13: mod_base = OTHER; note = 2-O-methylribose adenine
  modified_base 14: mod_base = OTHER; note = 2-fluororibose adenine
  modified_base 15: mod_base = cm
  modified_base 16: mod_base = OTHER; note = 2-fluororibose adenine
  modified_base 17: mod_base = cm
  modified_base 18: mod_base = um
  modified_base 19: mod_base = gm
  modified_base 20: mod_base = um
  modified_base 21: mod_base = um
  modified_base 21..22: mod_base = OTHER; note = S-phosphorothioate
  modified_base 22: mod_base = um
  modified_base 22..23: mod_base = OTHER; note = S-phosphorothioate
  modified_base 23: mod_base = um
  source 1..23: mol_type = other RNA
ttatagagcaagaacactgtttt

SEQ ID NO: 99 - RNA, 23 nt, synthetic construct
  misc_feature 1..23: note = Synthetic: WV-47074
  misc_feature 1..23: note = Synthetic: SSR-0104370
  modified_base 1: mod_base = um
  modified_base 1..2: mod_base = OTHER; note = R-phosphorothioate
  modified_base 2: mod_base = OTHER; note = 2-fluororibose uracil
  modified_base 2..3: mod_base = OTHER; note = S-phosphorothioate
  modified_base 3: mod_base = OTHER; note = 2-O-methylribose adenine
  modified_base 4: mod_base = um
  modified_base 5: mod_base = OTHER; note = 2-O-methylribose adenine
  modified_base 6: mod_base = OTHER; note = 2-fluororibose guanine
  modified_base 7: mod_base = OTHER; note = 2-O-methylribose adenine
  modified_base 8: mod_base = gm
  modified_base 9: mod_base = cm
  modified_base 10: mod_base = OTHER; note = 2-O-methylribose adenine
  modified_base 11: mod_base = OTHER; note = 2-O-methylribose adenine
  modified_base 11..12: mod_base = OTHER; note R-N-(1,3-dimethylimidazolidin-2-ylidene)phosphoramidate
  modified_base 12: mod_base = OTHER; note = 2-fluororibose guanine
  modified_base 13: mod_base = OTHER; note = 2-O-methylribose adenine
  modified_base 14: mod_base = OTHER; note = 2-fluororibose adenine
  modified_base 15: mod_base = cm
  modified_base 16: mod_base = OTHER; note = 2-fluororibose adenine
  modified_base 17: mod_base = cm
  modified_base 18: mod_base = um
  modified_base 19: mod_base = gm
  modified_base 20: mod_base = um
  modified_base 21: mod_base = um
  modified_base 21..22: mod_base = OTHER; note = S-phosphorothioate
  modified_base 22: mod_base = um
  modified_base 22..23: mod_base = OTHER; note = S-phosphorothioate
  modified_base 23: mod_base = um
  source 1..23: mol_type = other RNA
ttatagagcaagaacactgtttt

SEQ ID NO: 100 - RNA, 23 nt, synthetic construct
  misc_feature 1..23: note = Synthetic: WV-47075
  misc_feature 1..23: note = Synthetic: SSR-0104374
  modified_base 1: mod_base = um
  modified_base 1..2: mod_base = OTHER; note = R-phosphorothioate
  modified_base 2: mod_base = OTHER; note = 2-fluororibose uracil
  modified_base 2..3: mod_base = OTHER; note = S-phosphorothioate
  modified_base 3: mod_base = OTHER; note = 2-O-methylribose adenine
  modified_base 4: mod_base = um
  modified_base 5: mod_base = OTHER; note = 2-O-methylribose adenine
  modified_base 6: mod_base = OTHER; note = 2-fluororibose guanine
  modified_base 7: mod_base = OTHER; note = 2-O-methylribose adenine
  modified_base 8: mod_base = gm
  modified_base 9: mod_base = cm
  modified_base 10: mod_base = OTHER; note = 2-O-methylribose adenine
  modified_base 11: mod_base = OTHER; note = 2-O-methylribose adenine
  modified_base 12: mod_base = gm
  modified_base 12..13: mod_base = OTHER; note R-N-(1,3-dimethylimidazolidin-2-ylidene)phosphoramidate
  modified_base 13: mod_base = OTHER; note = 2-fluororibose adenine
  modified_base 14: mod_base = OTHER; note = 2-fluororibose adenine
  modified_base 15: mod_base = cm
  modified_base 16: mod_base = OTHER; note = 2-fluororibose adenine
  modified_base 17: mod_base = cm
  modified_base 18: mod_base = um
  modified_base 19: mod_base = gm
  modified_base 20: mod_base = um
  modified_base 21: mod_base = um
  modified_base 21..22: mod_base = OTHER; note = S-phosphorothioate
  modified_base 22: mod_base = um
  modified_base 22..23: mod_base = OTHER; note = S-phosphorothioate
  modified_base 23: mod_base = um
  source 1..23: mol_type = other RNA
ttatagagcaagaacactgtttt

SEQ ID NO: 101 - RNA, 23 nt, synthetic construct
  misc_feature 1..23: note = Synthetic: WV-47076
  misc_feature 1..23: note = Synthetic: SSR-0104380
  modified_base 1: mod_base = um
  modified_base 1..2: mod_base = OTHER; note = R-phosphorothioate
  modified_base 2: mod_base = OTHER; note = 2-fluororibose uracil
  modified_base 2..3: mod_base = OTHER; note = S-phosphorothioate
  modified_base 3: mod_base = OTHER; note = 2-O-methylribose adenine
  modified_base 4: mod_base = um
  modified_base 5: mod_base = OTHER; note = 2-O-methylribose adenine
  modified_base 6: mod_base = OTHER; note = 2-fluororibose guanine
  modified_base 7: mod_base = OTHER; note = 2-O-methylribose adenine
  modified_base 8: mod_base = gm
  modified_base 9: mod_base = cm
  modified_base 10: mod_base = OTHER; note = 2-O-methylribose adenine
  modified_base 11: mod_base = OTHER; note = 2-O-methylribose adenine
  modified_base 12: mod_base = gm
  modified_base 13: mod_base = OTHER; note = 2-O-methylribose adenine
  modified_base 14: mod_base = OTHER; note = 2-fluororibose adenine
  modified_base 14..15: mod_base = OTHER; note R-N-(1,3-dimethylimidazolidin-2-ylidene)phosphoramidate
  modified_base 15: mod_base = OTHER; note = 2-fluororibose cytosine
  modified_base 16: mod_base = OTHER; note = 2-fluororibose adenine
  modified_base 17: mod_base = cm
  modified_base 18: mod_base = um
  modified_base 19: mod_base = gm
  modified_base 20: mod_base = um
  modified_base 21: mod_base = um
  modified_base 21..22: mod_base = OTHER; note = S-phosphorothioate
  modified_base 22: mod_base = um
  modified_base 22..23: mod_base = OTHER; note = S-phosphorothioate
  modified_base 23: mod_base = um
  source 1..23: mol_type = other RNA
ttatagagcaagaacactgtttt

SEQ ID NO: 102 - RNA, 23 nt, synthetic construct
  misc_feature 1..23: note = Synthetic: WV-47077
  misc_feature 1..23: note = Synthetic: SSR-0104386
  modified_base 1: mod_base = um
  modified_base 1..2: mod_base = OTHER; note = R-phosphorothioate
  modified_base 2: mod_base = OTHER; note = 2-fluororibose uracil
  modified_base 2..3: mod_base = OTHER; note = S-phosphorothioate
  modified_base 3: mod_base = OTHER; note = 2-O-methylribose adenine
  modified_base 4: mod_base = um
  modified_base 5: mod_base = OTHER; note = 2-O-methylribose adenine
  modified_base 6: mod_base = OTHER; note = 2-fluororibose guanine
  modified_base 7: mod_base = OTHER; note = 2-O-methylribose adenine
  modified_base 8: mod_base = gm
  modified_base 9: mod_base = cm
  modified_base 10: mod_base = OTHER; note = 2-O-methylribose adenine
  modified_base 11: mod_base = OTHER; note = 2-O-methylribose adenine
  modified_base 12: mod_base = gm
  modified_base 13: mod_base = OTHER; note = 2-O-methylribose adenine
  modified_base 14: mod_base = OTHER; note = 2-fluororibose adenine
  modified_base 15: mod_base = cm
  modified_base 16: mod_base = OTHER; note = 2-fluororibose adenine
  modified_base 16..17: mod_base = OTHER; note R-N-(1,3-dimethylimidazolidin-2-ylidene)phosphoramidate
  modified_base 17: mod_base = OTHER; note = 2-fluororibose cytosine
  modified_base 18: mod_base = um
  modified_base 19: mod_base = gm
  modified_base 20: mod_base = um
  modified_base 21: mod_base = um
  modified_base 21..22: mod_base = OTHER; note = S-phosphorothioate
  modified_base 22: mod_base = um
  modified_base 22..23: mod_base = OTHER; note = S-phosphorothioate
  modified_base 23: mod_base = um
  source 1..23: mol_type = other RNA
ttatagagcaagaacactgtttt

SEQ ID NO: 103 - RNA, 23 nt, synthetic construct
  misc_feature 1..23: note = Synthetic: WV-47078
  misc_feature 1..23: note = Synthetic: SSR-0104390
  modified_base 1: mod_base = um
  modified_base 1..2: mod_base = OTHER; note = R-phosphorothioate
  modified_base 2: mod_base = OTHER; note = 2-fluororibose uracil
  modified_base 2..3: mod_base = OTHER; note = S-phosphorothioate
  modified_base 3: mod_base = OTHER; note = 2-O-methylribose adenine
  modified_base 4: mod_base = um
  modified_base 5: mod_base = OTHER; note = 2-O-methylribose adenine
  modified_base 6: mod_base = OTHER; note = 2-fluororibose guanine
  modified_base 7: mod_base = OTHER; note = 2-O-methylribose adenine
  modified_base 8: mod_base = gm
  modified_base 9: mod_base = cm
  modified_base 10: mod_base = OTHER; note = 2-O-methylribose adenine
  modified_base 11: mod_base = OTHER; note = 2-O-methylribose adenine
  modified_base 12: mod_base = gm
  modified_base 13: mod_base = OTHER; note = 2-O-methylribose adenine
  modified_base 14: mod_base = OTHER; note = 2-fluororibose adenine
  modified_base 15: mod_base = cm
  modified_base 16: mod_base = OTHER; note = 2-fluororibose adenine
  modified_base 17: mod_base = cm
  modified_base 17..18: mod_base = OTHER; note R-N-(1,3-dimethylimidazolidin-2-ylidene)phosphoramidate
  modified_base 18: mod_base = OTHER; note = 2-fluororibose uracil
  modified_base 19: mod_base = gm
  modified_base 20: mod_base = um
  modified_base 21: mod_base = um
  modified_base 21..22: mod_base = OTHER; note = S-phosphorothioate
  modified_base 22: mod_base = um
  modified_base 22..23: mod_base = OTHER; note = S-phosphorothioate
  modified_base 23: mod_base = um
  source 1..23: mol_type = other RNA
ttatagagcaagaacactgtttt

SEQ ID NO: 104 - RNA, 23 nt, synthetic construct
  misc_feature 1..23: note = Synthetic: WV-47079
  misc_feature 1..23: note = Synthetic: SSR-0104394
  modified_base 1: mod_base = um
  modified_base 1..2: mod_base = OTHER; note = R-phosphorothioate
  modified_base 2: mod_base = OTHER; note = 2-fluororibose uracil
  modified_base 2..3: mod_base = OTHER; note = S-phosphorothioate
  modified_base 3: mod_base = OTHER; note = 2-O-methylribose adenine
  modified_base 4: mod_base = um
  modified_base 5: mod_base = OTHER; note = 2-O-methylribose adenine
  modified_base 6: mod_base = OTHER; note = 2-fluororibose guanine
  modified_base 7: mod_base = OTHER; note = 2-O-methylribose adenine
  modified_base 8: mod_base = gm
  modified_base 9: mod_base = cm
  modified_base 10: mod_base = OTHER; note = 2-O-methylribose adenine
  modified_base 11: mod_base = OTHER; note = 2-O-methylribose adenine
  modified_base 12: mod_base = gm
  modified_base 13: mod_base = OTHER; note = 2-O-methylribose adenine
  modified_base 14: mod_base = OTHER; note = 2-fluororibose adenine
  modified_base 15: mod_base = cm
  modified_base 16: mod_base = OTHER; note = 2-fluororibose adenine
  modified_base 17: mod_base = cm
  modified_base 18: mod_base = um
  modified_base 18..19: mod_base = OTHER; note R-N-(1,3-dimethylimidazolidin-2-ylidene)phosphoramidate
  modified_base 19: mod_base = OTHER; note = 2-fluororibose guanine
  modified_base 20: mod_base = um
  modified_base 21: mod_base = um
  modified_base 21..22: mod_base = OTHER; note = S-phosphorothioate
  modified_base 22: mod_base = um
  modified_base 22..23: mod_base = OTHER; note = S-phosphorothioate
  modified_base 23: mod_base = um
  source 1..23: mol_type = other RNA
ttatagagcaagaacactgtttt

SEQ ID NO: 105 - RNA, 23 nt, synthetic construct
  misc_feature 1..23: note = Synthetic: WV-47080
  misc_feature 1..23: note = Synthetic: SSR-0104398
  modified_base 1: mod_base = um
  modified_base 1..2: mod_base = OTHER; note = R-phosphorothioate
  modified_base 2: mod_base = OTHER; note = 2-fluororibose uracil
  modified_base 2..3: mod_base = OTHER; note = S-phosphorothioate
  modified_base 3: mod_base = OTHER; note = 2-O-methylribose adenine
  modified_base 4: mod_base = um
  modified_base 5: mod_base = OTHER; note = 2-O-methylribose adenine
  modified_base 6: mod_base = OTHER; note = 2-fluororibose guanine
  modified_base 7: mod_base = OTHER; note = 2-O-methylribose adenine
  modified_base 8: mod_base = gm
  modified_base 9: mod_base = cm
  modified_base 10: mod_base = OTHER; note = 2-O-methylribose adenine
  modified_base 11: mod_base = OTHER; note = 2-O-methylribose adenine
  modified_base 12: mod_base = gm
  modified_base 13: mod_base = OTHER; note = 2-O-methylribose adenine
  modified_base 14: mod_base = OTHER; note = 2-fluororibose adenine
  modified_base 15: mod_base = cm
  modified_base 16: mod_base = OTHER; note = 2-fluororibose adenine
  modified_base 17: mod_base = cm
  modified_base 18: mod_base = um
  modified_base 19: mod_base = gm
  modified_base 19..20: mod_base = OTHER; note R-N-(1,3-dimethylimidazolidin-2-ylidene)phosphoramidate
  modified_base 20: mod_base = OTHER; note = 2-fluororibose uracil
  modified_base 21: mod_base = um
  modified_base 21..22: mod_base = OTHER; note = S-phosphorothioate
  modified_base 22: mod_base = um
  modified_base 22..23: mod_base = OTHER; note = S-phosphorothioate
  modified_base 23: mod_base = um
  source 1..23: mol_type = other RNA
ttatagagcaagaacactgtttt

SEQ ID NO: 106 - RNA, 23 nt, synthetic construct
  misc_feature 1..23: note = Synthetic: WV-47081
  misc_feature 1..23: note = Synthetic: SSR-0104402
  modified_base 1: mod_base = um
  modified_base 1..2: mod_base = OTHER; note = R-phosphorothioate
  modified_base 2: mod_base = OTHER; note = 2-fluororibose uracil
  modified_base 2..3: mod_base = OTHER; note = S-phosphorothioate
  modified_base 3: mod_base = OTHER; note = 2-O-methylribose adenine
  modified_base 4: mod_base = um
  modified_base 5: mod_base = OTHER; note = 2-O-methylribose adenine
  modified_base 6: mod_base = OTHER; note = 2-fluororibose guanine
  modified_base 7: mod_base = OTHER; note = 2-O-methylribose adenine
  modified_base 8: mod_base = gm
  modified_base 9: mod_base = cm
  modified_base 10: mod_base = OTHER; note = 2-O-methylribose adenine
  modified_base 11: mod_base = OTHER; note = 2-O-methylribose adenine
  modified_base 12: mod_base = gm
  modified_base 13: mod_base = OTHER; note = 2-O-methylribose adenine
  modified_base 14: mod_base = OTHER; note = 2-fluororibose adenine
  modified_base 15: mod_base = cm
  modified_base 16: mod_base = OTHER; note = 2-fluororibose adenine
  modified_base 17: mod_base = cm
  modified_base 18: mod_base = um
  modified_base 19: mod_base = gm
  modified_base 20: mod_base = um
  modified_base 20..21: mod_base = OTHER; note R-N-(1,3-dimethylimidazolidin-2-ylidene)phosphoramidate
  modified_base 21: mod_base = OTHER; note = 2-fluororibose uracil
  modified_base 21..22: mod_base = OTHER; note = S-phosphorothioate
  modified_base 22: mod_base = um
  modified_base 22..23: mod_base = OTHER; note = S-phosphorothioate
  modified_base 23: mod_base = um
  source 1..23: mol_type = other RNA
ttatagagcaagaacactgtttt

SEQ ID NO: 107 - RNA, 23 nt, synthetic construct
  misc_feature 1..23: note = Synthetic: WV-47082
  misc_feature 1..23: note = Synthetic: SSR-0104411
  modified_base 1: mod_base = um
  modified_base 1..2: mod_base = OTHER; note = R-phosphorothioate
  modified_base 2: mod_base = OTHER; note = 2-fluororibose uracil
  modified_base 2..3: mod_base = OTHER; note = S-phosphorothioate
  modified_base 3: mod_base = OTHER; note = 2-O-methylribose adenine
  modified_base 4: mod_base = um
  modified_base 5: mod_base = OTHER; note = 2-O-methylribose adenine
  modified_base 6: mod_base = OTHER; note = 2-fluororibose guanine
  modified_base 7: mod_base = OTHER; note = 2-O-methylribose adenine
  modified_base 8: mod_base = gm
  modified_base 9: mod_base = cm
  modified_base 10: mod_base = OTHER; note = 2-O-methylribose adenine
  modified_base 11: mod_base = OTHER; note = 2-O-methylribose adenine
  modified_base 12: mod_base = gm
  modified_base 13: mod_base = OTHER; note = 2-O-methylribose adenine
  modified_base 14: mod_base = OTHER; note = 2-fluororibose adenine
  modified_base 15: mod_base = cm
  modified_base 16: mod_base = OTHER; note = 2-fluororibose adenine
  modified_base 17: mod_base = cm
  modified_base 18: mod_base = um
  modified_base 19: mod_base = gm
  modified_base 20: mod_base = um
  modified_base 21: mod_base = um
  modified_base 21..22: mod_base = OTHER; note R-N-(1,3-dimethylimidazolidin-2-ylidene)phosphoramidate
  modified_base 22: mod_base = OTHER; note = 2-fluororibose uracil
  modified_base 22..23: mod_base = OTHER; note = S-phosphorothioate
  modified_base 23: mod_base = um
  source 1..23: mol_type = other RNA
ttatagagcaagaacactgtttt

SEQ ID NO: 108 - RNA, 23 nt, synthetic construct
  misc_feature 1..23: note = Synthetic: WV-47083
  misc_feature 1..23: note = Synthetic: SSR-0104407
  modified_base 1: mod_base = um
  modified_base 1..2: mod_base = OTHER; note = R-phosphorothioate
  modified_base 2: mod_base = OTHER; note = 2-fluororibose uracil
  modified_base 2..3: mod_base = OTHER; note = S-phosphorothioate
  modified_base 3: mod_base = OTHER; note = 2-O-methylribose adenine
  modified_base 4: mod_base = um
  modified_base 5: mod_base = OTHER; note = 2-O-methylribose adenine
  modified_base 6: mod_base = OTHER; note = 2-fluororibose guanine
  modified_base 7: mod_base = OTHER; note = 2-O-methylribose adenine
  modified_base 8: mod_base = gm
  modified_base 9: mod_base = cm
  modified_base 10: mod_base = OTHER; note = 2-O-methylribose adenine
  modified_base 11: mod_base = OTHER; note = 2-O-methylribose adenine
  modified_base 12: mod_base = gm
  modified_base 13: mod_base = OTHER; note = 2-O-methylribose adenine
  modified_base 14: mod_base = OTHER; note = 2-fluororibose adenine
  modified_base 15: mod_base = cm
  modified_base 16: mod_base = OTHER; note = 2-fluororibose adenine
  modified_base 17: mod_base = cm
  modified_base 18: mod_base = um
  modified_base 19: mod_base = gm
  modified_base 20: mod_base = um
  modified_base 21: mod_base = um
  modified_base 21..22: mod_base = OTHER; note = S-phosphorothioate
  modified_base 22: mod_base = um
  modified_base 22..23: mod_base = OTHER; note R-N-(1,3-dimethylimidazolidin-2-ylidene)phosphoramidate
  modified_base 23: mod_base = OTHER; note = 2-fluororibose uracil
  source 1..23: mol_type = other RNA
ttatagagcaagaacactgtttt

SEQ ID NO: 109 - RNA, 23 nt, synthetic construct
  misc_feature 1..23: note = Synthetic: WV-47084
  misc_feature 1..23: note = Synthetic: SSR-0104418
  modified_base 1: mod_base = um
  modified_base 1..2: mod_base = OTHER; note = R-phosphorothioate
  modified_base 2: mod_base = OTHER; note = 2-fluororibose uracil
  modified_base 2..3: mod_base = OTHER; note S-N-(1,3-dimethylimidazolidin-2-ylidene)phosphoramidate
  modified_base 3: mod_base = OTHER; note = 2-fluororibose adenine
  modified_base 4: mod_base = um
  modified_base 5: mod_base = OTHER; note = 2-O-methylribose adenine
  modified_base 6: mod_base = OTHER; note = 2-fluororibose guanine
  modified_base 7: mod_base = OTHER; note = 2-O-methylribose adenine
  modified_base 8: mod_base = gm
  modified_base 9: mod_base = cm
  modified_base 10: mod_base = OTHER; note = 2-O-methylribose adenine
  modified_base 11: mod_base = OTHER; note = 2-O-methylribose adenine
  modified_base 12: mod_base = gm
  modified_base 13: mod_base = OTHER; note = 2-O-methylribose adenine
  modified_base 14: mod_base = OTHER; note = 2-fluororibose adenine
  modified_base 15: mod_base = cm
  modified_base 16: mod_base = OTHER; note = 2-fluororibose adenine
  modified_base 17: mod_base = cm
  modified_base 18: mod_base = um
  modified_base 19: mod_base = gm
  modified_base 20: mod_base = um
  modified_base 21: mod_base = um
  modified_base 21..22: mod_base = OTHER; note = S-phosphorothioate
  modified_base 22: mod_base = um
  modified_base 22..23: mod_base = OTHER; note = S-phosphorothioate
  modified_base 23: mod_base = um
  source 1..23: mol_type = other RNA
ttatagagcaagaacactgtttt

SEQ ID NO: 110 - RNA, 23 nt, synthetic construct
  misc_feature 1..23: note = Synthetic: WV-47085
  misc_feature 1..23: note = Synthetic: SSR-0104281
  modified_base 1: mod_base = um
  modified_base 1..2: mod_base = OTHER; note = R-phosphorothioate
  modified_base 2: mod_base = OTHER; note = 2-fluororibose uracil
  modified_base 2..3: mod_base = OTHER; note = S-phosphorothioate
  modified_base 3: mod_base = OTHER; note = 2-O-methylribose adenine
  modified_base 3..4: mod_base = OTHER; note S-N-(1,3-dimethylimidazolidin-2-ylidene)phosphoramidate
  modified_base 4: mod_base = OTHER; note = 2-fluororibose uracil
  modified_base 5: mod_base = OTHER; note = 2-O-methylribose adenine
  modified_base 6: mod_base = OTHER; note = 2-fluororibose guanine
  modified_base 7: mod_base = OTHER; note = 2-O-methylribose adenine
  modified_base 8: mod_base = gm
  modified_base 9: mod_base = cm
  modified_base 10: mod_base = OTHER; note = 2-O-methylribose adenine
  modified_base 11: mod_base = OTHER; note = 2-O-methylribose adenine
  modified_base 12: mod_base = gm
  modified_base 13: mod_base = OTHER; note = 2-O-methylribose adenine
  modified_base 14: mod_base = OTHER; note = 2-fluororibose adenine
  modified_base 15: mod_base = cm
  modified_base 16: mod_base = OTHER; note = 2-fluororibose adenine
  modified_base 17: mod_base = cm
  modified_base 18: mod_base = um
  modified_base 19: mod_base = gm
  modified_base 20: mod_base = um
  modified_base 21: mod_base = um
  modified_base 21..22: mod_base = OTHER; note = S-phosphorothioate
  modified_base 22: mod_base = um
  modified_base 22..23: mod_base = OTHER; note = S-phosphorothioate
  modified_base 23: mod_base = um
  source 1..23: mol_type = other RNA
ttatagagcaagaacactgtttt

SEQ ID NO: 111 - RNA, 23 nt, synthetic construct
  misc_feature 1..23: note = Synthetic: WV-47086
  misc_feature 1..23: note = Synthetic: SSR-0104343
  modified_base 1: mod_base = um
  modified_base 1..2: mod_base = OTHER; note = R-phosphorothioate
  modified_base 2: mod_base = OTHER; note = 2-fluororibose uracil
  modified_base 2..3: mod_base = OTHER; note = S-phosphorothioate
  modified_base 3: mod_base = OTHER; note = 2-O-methylribose adenine
  modified_base 4: mod_base = um
  modified_base 4..5: mod_base = OTHER; note S-N-(1,3-dimethylimidazolidin-2-ylidene)phosphoramidate
  modified_base 5: mod_base = OTHER; note = 2-fluororibose adenine
  modified_base 6: mod_base = OTHER; note = 2-fluororibose guanine
  modified_base 7: mod_base = OTHER; note = 2-O-methylribose adenine
  modified_base 8: mod_base = gm
  modified_base 9: mod_base = cm
  modified_base 10: mod_base = OTHER; note = 2-O-methylribose adenine
  modified_base 11: mod_base = OTHER; note = 2-O-methylribose adenine
  modified_base 12: mod_base = gm
  modified_base 13: mod_base = OTHER; note = 2-O-methylribose adenine
  modified_base 14: mod_base = OTHER; note = 2-fluororibose adenine
  modified_base 15: mod_base = cm
  modified_base 16: mod_base = OTHER; note = 2-fluororibose adenine
  modified_base 17: mod_base = cm
  modified_base 18: mod_base = um
  modified_base 19: mod_base = gm
  modified_base 20: mod_base = um
  modified_base 21: mod_base = um
  modified_base 21..22: mod_base = OTHER; note = S-phosphorothioate
  modified_base 22: mod_base = um
  modified_base 22..23: mod_base = OTHER; note = S-phosphorothioate
  modified_base 23: mod_base = um
  source 1..23: mol_type = other RNA
ttatagagcaagaacactgtttt

SEQ ID NO: 112 - RNA, 23 nt, synthetic construct
  misc_feature 1..23: note = Synthetic: WV-47087
  misc_feature 1..23: note = Synthetic: SSR-0104349
  modified_base 1: mod_base = um
  modified_base 1..2: mod_base = OTHER; note = R-phosphorothioate
  modified_base 2: mod_base = OTHER; note = 2-fluororibose uracil
  modified_base 2..3: mod_base = OTHER; note = S-phosphorothioate
  modified_base 3: mod_base = OTHER; note = 2-O-methylribose adenine
  modified_base 4: mod_base = um
  modified_base 5: mod_base = OTHER; note = 2-O-methylribose adenine
  modified_base 6: mod_base = OTHER; note = 2-fluororibose guanine
  modified_base 6..7: mod_base = OTHER; note S-N-(1,3-dimethylimidazolidin-2-ylidene)phosphoramidate
  modified_base 7: mod_base = OTHER; note = 2-fluororibose adenine
  modified_base 8: mod_base = gm
  modified_base 9: mod_base = cm
  modified_base 10: mod_base = OTHER; note = 2-O-methylribose adenine
  modified_base 11: mod_base = OTHER; note = 2-O-methylribose adenine
  modified_base 12: mod_base = gm
  modified_base 13: mod_base = OTHER; note = 2-O-methylribose adenine
  modified_base 14: mod_base = OTHER; note = 2-fluororibose adenine
  modified_base 15: mod_base = cm
  modified_base 16: mod_base = OTHER; note = 2-fluororibose adenine
  modified_base 17: mod_base = cm
  modified_base 18: mod_base = um
  modified_base 19: mod_base = gm
  modified_base 20: mod_base = um
  modified_base 21: mod_base = um
  modified_base 21..22: mod_base = OTHER; note = S-phosphorothioate
  modified_base 22: mod_base = um
  modified_base 22..23: mod_base = OTHER; note = S-phosphorothioate
  modified_base 23: mod_base = um
  source 1..23: mol_type = other RNA
ttatagagcaagaacactgtttt

SEQ ID NO: 113 - RNA, 23 nt, synthetic construct
  misc_feature 1..23: note = Synthetic: WV-47088
  misc_feature 1..23: note = Synthetic: SSR-0104353
  modified_base 1: mod_base = um
  modified_base 1..2: mod_base = OTHER; note = R-phosphorothioate
  modified_base 2: mod_base = OTHER; note = 2-fluororibose uracil
  modified_base 2..3: mod_base = OTHER; note = S-phosphorothioate
  modified_base 3: mod_base = OTHER; note = 2-O-methylribose adenine
  modified_base 4: mod_base = um
  modified_base 5: mod_base = OTHER; note = 2-O-methylribose adenine
  modified_base 6: mod_base = OTHER; note = 2-fluororibose guanine
  modified_base 7: mod_base = OTHER; note = 2-O-methylribose adenine
  modified_base 7..8: mod_base = OTHER; note S-N-(1,3-dimethylimidazolidin-2-ylidene)phosphoramidate
  modified_base 8: mod_base = OTHER; note = 2-fluororibose guanine
  modified_base 9: mod_base = cm
  modified_base 10: mod_base = OTHER; note = 2-O-methylribose adenine
  modified_base 11: mod_base = OTHER; note = 2-O-methylribose adenine
  modified_base 12: mod_base = gm
  modified_base 13: mod_base = OTHER; note = 2-O-methylribose adenine
  modified_base 14: mod_base = OTHER; note = 2-fluororibose adenine
  modified_base 15: mod_base = cm
  modified_base 16: mod_base = OTHER; note = 2-fluororibose adenine
  modified_base 17: mod_base = cm
  modified_base 18: mod_base = um
  modified_base 19: mod_base = gm
  modified_base 20: mod_base = um
  modified_base 21: mod_base = um
  modified_base 21..22: mod_base = OTHER; note = S-phosphorothioate
  modified_base 22: mod_base = um
  modified_base 22..23: mod_base = OTHER; note = S-phosphorothioate
  modified_base 23: mod_base = um
  source 1..23: mol_type = other RNA
ttatagagcaagaacactgtttt

SEQ ID NO: 114 - RNA, 23 nt, synthetic construct
  misc_feature 1..23: note = Synthetic: WV-47089
  misc_feature 1..23: note = Synthetic: SSR-0104358
  modified_base 1: mod_base = um
  modified_base 1..2: mod_base = OTHER; note = R-phosphorothioate
  modified_base 2: mod_base = OTHER; note = 2-fluororibose uracil
  modified_base 2..3: mod_base = OTHER; note = S-phosphorothioate
  modified_base 3: mod_base = OTHER; note = 2-O-methylribose adenine
  modified_base 4: mod_base = um
  modified_base 5: mod_base = OTHER; note = 2-O-methylribose adenine
  modified_base 6: mod_base = OTHER; note = 2-fluororibose guanine
  modified_base 7: mod_base = OTHER; note = 2-O-methylribose adenine
  modified_base 8: mod_base = gm
  modified_base 8..9: mod_base = OTHER; note S-N-(1,3-dimethylimidazolidin-2-ylidene)phosphoramidate
  modified_base 9: mod_base = OTHER; note = 2-fluororibose cytosine
  modified_base 10: mod_base = OTHER; note = 2-O-methylribose adenine
  modified_base 11: mod_base = OTHER; note = 2-O-methylribose adenine
  modified_base 12: mod_base = gm
  modified_base 13: mod_base = OTHER; note = 2-O-methylribose adenine
  modified_base 14: mod_base = OTHER; note = 2-fluororibose adenine
  modified_base 15: mod_base = cm
  modified_base 16: mod_base = OTHER; note = 2-fluororibose adenine
  modified_base 17: mod_base = cm
  modified_base 18: mod_base = um
  modified_base 19: mod_base = gm
  modified_base 20: mod_base = um
  modified_base 21: mod_base = um
  modified_base 21..22: mod_base = OTHER; note = S-phosphorothioate
  modified_base 22: mod_base = um
  modified_base 22..23: mod_base = OTHER; note = S-phosphorothioate
  modified_base 23: mod_base = um
  source 1..23: mol_type = other RNA
ttatagagcaagaacactgtttt

SEQ ID NO: 115 - RNA, 23 nt, synthetic construct
  misc_feature 1..23: note = Synthetic: WV-47090
  misc_feature 1..23: note = Synthetic: SSR-0104362
  modified_base 1: mod_base = um
  modified_base 1..2: mod_base = OTHER; note = R-phosphorothioate
  modified_base 2: mod_base = OTHER; note = 2-fluororibose uracil
  modified_base 2..3: mod_base = OTHER; note = S-phosphorothioate
  modified_base 3: mod_base = OTHER; note = 2-O-methylribose adenine
  modified_base 4: mod_base = um
  modified_base 5: mod_base = OTHER; note = 2-O-methylribose adenine
  modified_base 6: mod_base = OTHER; note = 2-fluororibose guanine
  modified_base 7: mod_base = OTHER; note = 2-O-methylribose adenine
  modified_base 8: mod_base = gm
  modified_base 9: mod_base = cm
  modified_base 9..10: mod_base = OTHER; note S-N-(1,3-dimethylimidazolidin-2-ylidene)phosphoramidate
  modified_base 10: mod_base = OTHER; note = 2-fluororibose adenine
  modified_base 11: mod_base = OTHER; note = 2-O-methylribose adenine
  modified_base 12: mod_base = gm
  modified_base 13: mod_base = OTHER; note = 2-O-methylribose adenine
  modified_base 14: mod_base = OTHER; note = 2-fluororibose adenine
  modified_base 15: mod_base = cm
  modified_base 16: mod_base = OTHER; note = 2-fluororibose adenine
  modified_base 17: mod_base = cm
  modified_base 18: mod_base = um
  modified_base 19: mod_base = gm
  modified_base 20: mod_base = um
  modified_base 21: mod_base = um
  modified_base 21..22: mod_base = OTHER; note = S-phosphorothioate
  modified_base 22: mod_base = um
  modified_base 22..23: mod_base = OTHER; note = S-phosphorothioate
  modified_base 23: mod_base = um
  source 1..23: mol_type = other RNA
ttatagagcaagaacactgtttt

SEQ ID NO: 116 - RNA, 23 nt, synthetic construct
  misc_feature 1..23: note = Synthetic: WV-47091
  misc_feature 1..23: note = Synthetic: SSR-0104367
  modified_base 1: mod_base = um
  modified_base 1..2: mod_base = OTHER; note = R-phosphorothioate
  modified_base 2: mod_base = OTHER; note = 2-fluororibose uracil
  modified_base 2..3: mod_base = OTHER; note = S-phosphorothioate
  modified_base 3: mod_base = OTHER; note = 2-O-methylribose adenine
  modified_base 4: mod_base = um
  modified_base 5: mod_base = OTHER; note = 2-O-methylribose adenine
  modified_base 6: mod_base = OTHER; note = 2-fluororibose guanine
  modified_base 7: mod_base = OTHER; note = 2-O-methylribose adenine
  modified_base 8: mod_base = gm
  modified_base 9: mod_base = cm
  modified_base 10: mod_base = OTHER; note = 2-O-methylribose adenine
  modified_base 10..11: mod_base = OTHER; note S-N-(1,3-dimethylimidazolidin-2-ylidene)phosphoramidate
  modified_base 11: mod_base = OTHER; note = 2-fluororibose adenine
  modified_base 12: mod_base = gm
  modified_base 13: mod_base = OTHER; note = 2-O-methylribose adenine
  modified_base 14: mod_base = OTHER; note = 2-fluororibose adenine
  modified_base 15: mod_base = cm
  modified_base 16: mod_base = OTHER; note = 2-fluororibose adenine
  modified_base 17: mod_base = cm
  modified_base 18: mod_base = um
  modified_base 19: mod_base = gm
  modified_base 20: mod_base = um
  modified_base 21: mod_base = um
  modified_base 21..22: mod_base = OTHER; note = S-phosphorothioate
  modified_base 22: mod_base = um
  modified_base 22..23: mod_base = OTHER; note = S-phosphorothioate
  modified_base 23: mod_base = um
  source 1..23: mol_type = other RNA
ttatagagcaagaacactgtttt

SEQ ID NO: 117 - RNA, 23 nt, synthetic construct
  misc_feature 1..23: note = Synthetic: WV-47092
  misc_feature 1..23: note = Synthetic: SSR-0104372
  modified_base 1: mod_base = um
  modified_base 1..2: mod_base = OTHER; note = R-phosphorothioate
  modified_base 2: mod_base = OTHER; note = 2-fluororibose uracil
  modified_base 2..3: mod_base = OTHER; note = S-phosphorothioate
  modified_base 3: mod_base = OTHER; note = 2-O-methylribose adenine
  modified_base 4: mod_base = um
  modified_base 5: mod_base = OTHER; note = 2-O-methylribose adenine
  modified_base 6: mod_base = OTHER; note = 2-fluororibose guanine
  modified_base 7: mod_base = OTHER; note = 2-O-methylribose adenine
  modified_base 8: mod_base = gm
  modified_base 9: mod_base = cm
  modified_base 10: mod_base = OTHER; note = 2-O-methylribose adenine
  modified_base 11: mod_base = OTHER; note = 2-O-methylribose adenine
  modified_base 11..12: mod_base = OTHER; note S-N-(1,3-dimethylimidazolidin-2-ylidene)phosphoramidate
  modified_base 12: mod_base = OTHER; note = 2-fluororibose guanine
  modified_base 13: mod_base = OTHER; note = 2-O-methylribose adenine
  modified_base 14: mod_base = OTHER; note = 2-fluororibose adenine
  modified_base 15: mod_base = cm
  modified_base 16: mod_base = OTHER; note = 2-fluororibose adenine
  modified_base 17: mod_base = cm
  modified_base 18: mod_base = um
  modified_base 19: mod_base = gm
  modified_base 20: mod_base = um
  modified_base 21: mod_base = um
  modified_base 21..22: mod_base = OTHER; note = S-phosphorothioate
  modified_base 22: mod_base = um
  modified_base 22..23: mod_base = OTHER; note = S-phosphorothioate
  modified_base 23: mod_base = um
  source 1..23: mol_type = other RNA
ttatagagcaagaacactgtttt

SEQ ID NO: 118 - RNA, 23 nt, synthetic construct
  misc_feature 1..23: note = Synthetic: WV-47093
  misc_feature 1..23: note = Synthetic: SSR-0104376
  modified_base 1: mod_base = um
  modified_base 1..2: mod_base = OTHER; note = R-phosphorothioate
  modified_base 2: mod_base = OTHER; note = 2-fluororibose uracil
  modified_base 2..3: mod_base = OTHER; note = S-phosphorothioate
  modified_base 3: mod_base = OTHER; note = 2-O-methylribose adenine
  modified_base 4: mod_base = um
  modified_base 5: mod_base = OTHER; note = 2-O-methylribose adenine
  modified_base 6: mod_base = OTHER; note = 2-fluororibose guanine
  modified_base 7: mod_base = OTHER; note = 2-O-methylribose adenine
  modified_base 8: mod_base = gm
  modified_base 9: mod_base = cm
  modified_base 10: mod_base = OTHER; note = 2-O-methylribose adenine
  modified_base 11: mod_base = OTHER; note = 2-O-methylribose adenine
  modified_base 12: mod_base = gm
  modified_base 12..13: mod_base = OTHER; note S-N-(1,3-dimethylimidazolidin-2-ylidene)phosphoramidate
  modified_base 13: mod_base = OTHER; note = 2-fluororibose adenine
  modified_base 14: mod_base = OTHER; note = 2-fluororibose adenine
  modified_base 15: mod_base = cm
  modified_base 16: mod_base = OTHER; note = 2-fluororibose adenine
  modified_base 17: mod_base = cm
  modified_base 18: mod_base = um
  modified_base 19: mod_base = gm
  modified_base 20: mod_base = um
  modified_base 21: mod_base = um
  modified_base 21..22: mod_base = OTHER; note = S-phosphorothioate
  modified_base 22: mod_base = um
  modified_base 22..23: mod_base = OTHER; note = S-phosphorothioate
  modified_base 23: mod_base = um
  source 1..23: mol_type = other RNA
ttatagagcaagaacactgtttt

SEQ ID NO: 119 - RNA, 23 nt, synthetic construct
  misc_feature 1..23: note = Synthetic: WV-47094
  misc_feature 1..23: note = Synthetic: SSR-0104382
  modified_base 1: mod_base = um
  modified_base 1..2: mod_base = OTHER; note = R-phosphorothioate
  modified_base 2: mod_base = OTHER; note = 2-fluororibose uracil
  modified_base 2..3: mod_base = OTHER; note = S-phosphorothioate
  modified_base 3: mod_base = OTHER; note = 2-O-methylribose adenine
  modified_base 4: mod_base = um
  modified_base 5: mod_base = OTHER; note = 2-O-methylribose adenine
  modified_base 6: mod_base = OTHER; note = 2-fluororibose guanine
  modified_base 7: mod_base = OTHER; note = 2-O-methylribose adenine
  modified_base 8: mod_base = gm
  modified_base 9: mod_base = cm
  modified_base 10: mod_base = OTHER; note = 2-O-methylribose adenine
  modified_base 11: mod_base = OTHER; note = 2-O-methylribose adenine
  modified_base 12: mod_base = gm
  modified_base 13: mod_base = OTHER; note = 2-O-methylribose adenine
  modified_base 14: mod_base = OTHER; note = 2-fluororibose adenine
  modified_base 14..15: mod_base = OTHER; note S-N-(1,3-dimethylimidazolidin-2-ylidene)phosphoramidate
  modified_base 15: mod_base = OTHER; note = 2-fluororibose cytosine
  modified_base 16: mod_base = OTHER; note = 2-fluororibose adenine
  modified_base 17: mod_base = cm
  modified_base 18: mod_base = um
  modified_base 19: mod_base = gm
  modified_base 20: mod_base = um
  modified_base 21: mod_base = um
  modified_base 21..22: mod_base = OTHER; note = S-phosphorothioate
  modified_base 22: mod_base = um
  modified_base 22..23: mod_base = OTHER; note = S-phosphorothioate
  modified_base 23: mod_base = um
  source 1..23: mol_type = other RNA
ttatagagcaagaacactgtttt

SEQ ID NO: 120 - RNA, 23 nt, synthetic construct
  misc_feature 1..23: note = Synthetic: WV-47095
  misc_feature 1..23: note = Synthetic: SSR-0104388
  modified_base 1: mod_base = um
  modified_base 1..2: mod_base = OTHER; note = R-phosphorothioate
  modified_base 2: mod_base = OTHER; note = 2-fluororibose uracil
  modified_base 2..3: mod_base = OTHER; note = S-phosphorothioate
  modified_base 3: mod_base = OTHER; note = 2-O-methylribose adenine
  modified_base 4: mod_base = um
  modified_base 5: mod_base = OTHER; note = 2-O-methylribose adenine
  modified_base 6: mod_base = OTHER; note = 2-fluororibose guanine
  modified_base 7: mod_base = OTHER; note = 2-O-methylribose adenine
  modified_base 8: mod_base = gm
  modified_base 9: mod_base = cm
  modified_base 10: mod_base = OTHER; note = 2-O-methylribose adenine
  modified_base 11: mod_base = OTHER; note = 2-O-methylribose adenine
  modified_base 12: mod_base = gm
  modified_base 13: mod_base = OTHER; note = 2-O-methylribose adenine
  modified_base 14: mod_base = OTHER; note = 2-fluororibose adenine
  modified_base 15: mod_base = cm
  modified_base 16: mod_base = OTHER; note = 2-fluororibose adenine
  modified_base 16..17: mod_base = OTHER; note S-N-(1,3-dimethylimidazolidin-2-ylidene)phosphoramidate
  modified_base 17: mod_base = OTHER; note = 2-fluororibose cytosine
  modified_base 18: mod_base = um
  modified_base 19: mod_base = gm
  modified_base 20: mod_base = um
  modified_base 21: mod_base = um
  modified_base 21..22: mod_base = OTHER; note = S-phosphorothioate
  modified_base 22: mod_base = um
  modified_base 22..23: mod_base = OTHER; note = S-phosphorothioate
  modified_base 23: mod_base = um
  source 1..23: mol_type = other RNA
ttatagagcaagaacactgtttt

SEQ ID NO: 121 - RNA, 23 nt, synthetic construct
  misc_feature 1..23: note = Synthetic: WV-47096
  misc_feature 1..23: note = Synthetic: SSR-0104392
  modified_base 1: mod_base = um
  modified_base 1..2: mod_base = OTHER; note = R-phosphorothioate
  modified_base 2: mod_base = OTHER; note = 2-fluororibose uracil
  modified_base 2..3: mod_base = OTHER; note = S-phosphorothioate
  modified_base 3: mod_base = OTHER; note = 2-O-methylribose adenine
  modified_base 4: mod_base = um
  modified_base 5: mod_base = OTHER; note = 2-O-methylribose adenine
  modified_base 6: mod_base = OTHER; note = 2-fluororibose guanine
  modified_base 7: mod_base = OTHER; note = 2-O-methylribose adenine
  modified_base 8: mod_base = gm
  modified_base 9: mod_base = cm
  modified_base 10: mod_base = OTHER; note = 2-O-methylribose adenine
  modified_base 11: mod_base = OTHER; note = 2-O-methylribose adenine
  modified_base 12: mod_base = gm
  modified_base 13: mod_base = OTHER; note = 2-O-methylribose adenine
  modified_base 14: mod_base = OTHER; note = 2-fluororibose adenine
  modified_base 15: mod_base = cm
  modified_base 16: mod_base = OTHER; note = 2-fluororibose adenine
  modified_base 17: mod_base = cm
  modified_base 17..18: mod_base = OTHER; note S-N-(1,3-dimethylimidazolidin-2-ylidene)phosphoramidate
  modified_base 18: mod_base = OTHER; note = 2-fluororibose uracil
  modified_base 19: mod_base = gm
  modified_base 20: mod_base = um
  modified_base 21: mod_base = um
  modified_base 21..22: mod_base = OTHER; note = S-phosphorothioate
  modified_base 22: mod_base = um
  modified_base 22..23: mod_base = OTHER; note = S-phosphorothioate
  modified_base 23: mod_base = um
  source 1..23: mol_type = other RNA
ttatagagcaagaacactgtttt

SEQ ID NO: 122 - RNA, 23 nt, synthetic construct
  misc_feature 1..23: note = Synthetic: WV-47097
  misc_feature 1..23: note = Synthetic: SSR-0104396
  modified_base 1: mod_base = um
  modified_base 1..2: mod_base = OTHER; note = R-phosphorothioate
  modified_base 2: mod_base = OTHER; note = 2-fluororibose uracil
  modified_base 2..3: mod_base = OTHER; note = S-phosphorothioate
  modified_base 3: mod_base = OTHER; note = 2-O-methylribose adenine
  modified_base 4: mod_base = um
  modified_base 5: mod_base = OTHER; note = 2-O-methylribose adenine
  modified_base 6: mod_base = OTHER; note = 2-fluororibose guanine
  modified_base 7: mod_base = OTHER; note = 2-O-methylribose adenine
  modified_base 8: mod_base = gm
  modified_base 9: mod_base = cm
  modified_base 10: mod_base = OTHER; note = 2-O-methylribose adenine
  modified_base 11: mod_base = OTHER; note = 2-O-methylribose adenine
  modified_base 12: mod_base = gm
  modified_base 13: mod_base = OTHER; note = 2-O-methylribose adenine
  modified_base 14: mod_base = OTHER; note = 2-fluororibose adenine
  modified_base 15: mod_base = cm
  modified_base 16: mod_base = OTHER; note = 2-fluororibose adenine
  modified_base 17: mod_base = cm
  modified_base 18: mod_base = um
  modified_base 18..19: mod_base = OTHER; note S-N-(1,3-dimethylimidazolidin-2-ylidene)phosphoramidate
  modified_base 19: mod_base = OTHER; note = 2-fluororibose guanine
  modified_base 20: mod_base = um
  modified_base 21: mod_base = um
  modified_base 21..22: mod_base = OTHER; note = S-phosphorothioate
  modified_base 22: mod_base = um
  modified_base 22..23: mod_base = OTHER; note = S-phosphorothioate
  modified_base 23: mod_base = um
  source 1..23: mol_type = other RNA
ttatagagcaagaacactgtttt

SEQ ID NO: 123 - RNA, 23 nt, synthetic construct
  misc_feature 1..23: note = Synthetic: WV-47098
  misc_feature 1..23: note = Synthetic: SSR-0104400
  modified_base 1: mod_base = um
  modified_base 1..2: mod_base = OTHER; note = R-phosphorothioate
  modified_base 2: mod_base = OTHER; note = 2-fluororibose uracil
  modified_base 2..3: mod_base = OTHER; note = S-phosphorothioate
  modified_base 3: mod_base = OTHER; note = 2-O-methylribose adenine
  modified_base 4: mod_base = um
  modified_base 5: mod_base = OTHER; note = 2-O-methylribose adenine
  modified_base 6: mod_base = OTHER; note = 2-fluororibose guanine
  modified_base 7: mod_base = OTHER; note = 2-O-methylribose adenine
  modified_base 8: mod_base = gm
  modified_base 9: mod_base = cm
  modified_base 10: mod_base = OTHER; note = 2-O-methylribose adenine
  modified_base 11: mod_base = OTHER; note = 2-O-methylribose adenine
  modified_base 12: mod_base = gm
  modified_base 13: mod_base = OTHER; note = 2-O-methylribose adenine
  modified_base 14: mod_base = OTHER; note = 2-fluororibose adenine
  modified_base 15: mod_base = cm
  modified_base 16: mod_base = OTHER; note = 2-fluororibose adenine
  modified_base 17: mod_base = cm
  modified_base 18: mod_base = um
  modified_base 19: mod_base = gm
  modified_base 19..20: mod_base = OTHER; note S-N-(1,3-dimethylimidazolidin-2-ylidene)phosphoramidate
  modified_base 20: mod_base = OTHER; note = 2-fluororibose uracil
  modified_base 21: mod_base = um
  modified_base 21..22: mod_base = OTHER; note = S-phosphorothioate
  modified_base 22: mod_base = um
  modified_base 22..23: mod_base = OTHER; note = S-phosphorothioate
  modified_base 23: mod_base = um
  source 1..23: mol_type = other RNA
ttatagagcaagaacactgtttt

SEQ ID NO: 124 - RNA, 23 nt, synthetic construct
  misc_feature 1..23: note = Synthetic: WV-47099
  misc_feature 1..23: note = Synthetic: SSR-0104404
  modified_base 1: mod_base = um
  modified_base 1..2: mod_base = OTHER; note = R-phosphorothioate
  modified_base 2: mod_base = OTHER; note = 2-fluororibose uracil
  modified_base 2..3: mod_base = OTHER; note = S-phosphorothioate
  modified_base 3: mod_base = OTHER; note = 2-O-methylribose adenine
  modified_base 4: mod_base = um
  modified_base 5: mod_base = OTHER; note = 2-O-methylribose adenine
  modified_base 6: mod_base = OTHER; note = 2-fluororibose guanine
  modified_base 7: mod_base = OTHER; note = 2-O-methylribose adenine
  modified_base 8: mod_base = gm
  modified_base 9: mod_base = cm
  modified_base 10: mod_base = OTHER; note = 2-O-methylribose adenine
  modified_base 11: mod_base = OTHER; note = 2-O-methylribose adenine
  modified_base 12: mod_base = gm
  modified_base 13: mod_base = OTHER; note = 2-O-methylribose adenine
  modified_base 14: mod_base = OTHER; note = 2-fluororibose adenine
  modified_base 15: mod_base = cm
  modified_base 16: mod_base = OTHER; note = 2-fluororibose adenine
  modified_base 17: mod_base = cm
  modified_base 18: mod_base = um
  modified_base 19: mod_base = gm
  modified_base 20: mod_base = um
  modified_base 20..21: mod_base = OTHER; note S-N-(1,3-dimethylimidazolidin-2-ylidene)phosphoramidate
  modified_base 21: mod_base = OTHER; note = 2-fluororibose uracil
  modified_base 21..22: mod_base = OTHER; note = S-phosphorothioate
  modified_base 22: mod_base = um
  modified_base 22..23: mod_base = OTHER; note = S-phosphorothioate
  modified_base 23: mod_base = um
  source 1..23: mol_type = other RNA
ttatagagcaagaacactgtttt

SEQ ID NO: 125 - RNA, 23 nt, synthetic construct
  misc_feature 1..23: note = Synthetic: WV-47100
  misc_feature 1..23: note = Synthetic: SSR-0104413
  modified_base 1: mod_base = um
  modified_base 1..2: mod_base = OTHER; note = R-phosphorothioate
  modified_base 2: mod_base = OTHER; note = 2-fluororibose uracil
  modified_base 2..3: mod_base = OTHER; note = S-phosphorothioate
  modified_base 3: mod_base = OTHER; note = 2-O-methylribose adenine
  modified_base 4: mod_base = um
  modified_base 5: mod_base = OTHER; note = 2-O-methylribose adenine
  modified_base 6: mod_base = OTHER; note = 2-fluororibose guanine
  modified_base 7: mod_base = OTHER; note = 2-O-methylribose adenine
  modified_base 8: mod_base = gm
  modified_base 9: mod_base = cm
  modified_base 10: mod_base = OTHER; note = 2-O-methylribose adenine
  modified_base 11: mod_base = OTHER; note = 2-O-methylribose adenine
  modified_base 12: mod_base = gm
  modified_base 13: mod_base = OTHER; note = 2-O-methylribose adenine
  modified_base 14: mod_base = OTHER; note = 2-fluororibose adenine
  modified_base 15: mod_base = cm
  modified_base 16: mod_base = OTHER; note = 2-fluororibose adenine
  modified_base 17: mod_base = cm
  modified_base 18: mod_base = um
  modified_base 19: mod_base = gm
  modified_base 20: mod_base = um
  modified_base 21: mod_base = um
  modified_base 21..22: mod_base = OTHER; note S-N-(1,3-dimethylimidazolidin-2-ylidene)phosphoramidate
  modified_base 22: mod_base = OTHER; note = 2-fluororibose uracil
  modified_base 22..23: mod_base = OTHER; note = S-phosphorothioate
  modified_base 23: mod_base = um
  source 1..23: mol_type = other RNA
ttatagagcaagaacactgtttt

SEQ ID NO: 126 - RNA, 23 nt, synthetic construct
  misc_feature 1..23: note = Synthetic: WV-47101
  misc_feature 1..23: note = Synthetic: SSR-0104409
  modified_base 1: mod_base = um
  modified_base 1..2: mod_base = OTHER; note = R-phosphorothioate
  modified_base 2: mod_base = OTHER; note = 2-fluororibose uracil
  modified_base 2..3: mod_base = OTHER; note = S-phosphorothioate
  modified_base 3: mod_base = OTHER; note = 2-O-methylribose adenine
  modified_base 4: mod_base = um
  modified_base 5: mod_base = OTHER; note = 2-O-methylribose adenine
  modified_base 6: mod_base = OTHER; note = 2-fluororibose guanine
  modified_base 7: mod_base = OTHER; note = 2-O-methylribose adenine
  modified_base 8: mod_base = gm
  modified_base 9: mod_base = cm
  modified_base 10: mod_base = OTHER; note = 2-O-methylribose adenine
  modified_base 11: mod_base = OTHER; note = 2-O-methylribose adenine
  modified_base 12: mod_base = gm
  modified_base 13: mod_base = OTHER; note = 2-O-methylribose adenine
  modified_base 14: mod_base = OTHER; note = 2-fluororibose adenine
  modified_base 15: mod_base = cm
  modified_base 16: mod_base = OTHER; note = 2-fluororibose adenine
  modified_base 17: mod_base = cm
  modified_base 18: mod_base = um
  modified_base 19: mod_base = gm
  modified_base 20: mod_base = um
  modified_base 21: mod_base = um
  modified_base 21..22: mod_base = OTHER; note = S-phosphorothioate
  modified_base 22: mod_base = um
  modified_base 22..23: mod_base = OTHER; note S-N-(1,3-dimethylimidazolidin-2-ylidene)phosphoramidate
  modified_base 23: mod_base = OTHER; note = 2-fluororibose uracil
  source 1..23: mol_type = other RNA
ttatagagcaagaacactgtttt

SEQ ID NO: 127 - RNA, 23 nt, synthetic construct
  misc_feature 1..23: note = Synthetic: WV-43775
  misc_feature 1..23: note = Synthetic: SSR-0104622
  modified_base 1: mod_base = um
  modified_base 1..2: mod_base = OTHER; note = S-phosphorothioate
  modified_base 2: mod_base = OTHER; note = 2-fluororibose uracil
  modified_base 2..3: mod_base = OTHER; note = R-phosphorothioate
  modified_base 3: mod_base = OTHER; note = 2-O-methylribose adenine
  modified_base 4: mod_base = um
  modified_base 5: mod_base = OTHER; note = 2-O-methylribose adenine
  modified_base 6: mod_base = OTHER; note = 2-fluororibose guanine
  modified_base 7: mod_base = OTHER; note = 2-O-methylribose adenine
  modified_base 8: mod_base = gm
  modified_base 9: mod_base = cm
  modified_base 10: mod_base = OTHER; note = 2-O-methylribose adenine
  modified_base 11: mod_base = OTHER; note = 2-O-methylribose adenine
  modified_base 12: mod_base = gm
  modified_base 13: mod_base = OTHER; note = 2-O-methylribose adenine
  modified_base 14: mod_base = OTHER; note = 2-fluororibose adenine
  modified_base 15: mod_base = cm
  modified_base 16: mod_base = OTHER; note = 2-fluororibose adenine
  modified_base 17: mod_base = cm
  modified_base 18: mod_base = um
  modified_base 19: mod_base = gm
  modified_base 20: mod_base = um
  modified_base 21: mod_base = um
  modified_base 21..22: mod_base = OTHER; note = S-phosphorothioate
  modified_base 22: mod_base = um
  modified_base 22..23: mod_base = OTHER; note = S-phosphorothioate
  modified_base 23: mod_base = um
  source 1..23: mol_type = other RNA
ttatagagcaagaacactgtttt

SEQ ID NO: 128 - RNA, 23 nt, synthetic construct
  misc_feature 1..23: note = Synthetic: WV-47102
  misc_feature 1..23: note = Synthetic: SSR-0104648
  modified_base 1: mod_base = um
  modified_base 1..2: mod_base = OTHER; note = S-phosphorothioate
  modified_base 2: mod_base = OTHER; note = 2-fluororibose uracil
  modified_base 2..3: mod_base = OTHER; note R-N-(1,3-dimethylimidazolidin-2-ylidene)phosphoramidate
  modified_base 3: mod_base = OTHER; note = 2-fluororibose adenine
  modified_base 4: mod_base = um
  modified_base 5: mod_base = OTHER; note = 2-O-methylribose adenine
  modified_base 6: mod_base = OTHER; note = 2-fluororibose guanine
  modified_base 7: mod_base = OTHER; note = 2-O-methylribose adenine
  modified_base 8: mod_base = gm
  modified_base 9: mod_base = cm
  modified_base 10: mod_base = OTHER; note = 2-O-methylribose adenine
  modified_base 11: mod_base = OTHER; note = 2-O-methylribose adenine
  modified_base 12: mod_base = gm
  modified_base 13: mod_base = OTHER; note = 2-O-methylribose adenine
  modified_base 14: mod_base = OTHER; note = 2-fluororibose adenine
  modified_base 15: mod_base = cm
  modified_base 16: mod_base = OTHER; note = 2-fluororibose adenine
  modified_base 17: mod_base = cm
  modified_base 18: mod_base = um
  modified_base 19: mod_base = gm
  modified_base 20: mod_base = um
  modified_base 21: mod_base = um
  modified_base 21..22: mod_base = OTHER; note = S-phosphorothioate
  modified_base 22: mod_base = um
  modified_base 22..23: mod_base = OTHER; note = S-phosphorothioate
  modified_base 23: mod_base = um
  source 1..23: mol_type = other RNA
ttatagagcaagaacactgtttt

SEQ ID NO: 129 - RNA, 23 nt, synthetic construct
  misc_feature 1..23: note = Synthetic: WV-47103
  misc_feature 1..23: note = Synthetic: SSR-0104451
  modified_base 1: mod_base = um
  modified_base 1..2: mod_base = OTHER; note = S-phosphorothioate
  modified_base 2: mod_base = OTHER; note = 2-fluororibose uracil
  modified_base 2..3: mod_base = OTHER; note = R-phosphorothioate
  modified_base 3: mod_base = OTHER; note = 2-O-methylribose adenine
  modified_base 3..4: mod_base = OTHER; note R-N-(1,3-dimethylimidazolidin-2-ylidene)phosphoramidate
  modified_base 4: mod_base = OTHER; note = 2-fluororibose uracil
  modified_base 5: mod_base = OTHER; note = 2-O-methylribose adenine
  modified_base 6: mod_base = OTHER; note = 2-fluororibose guanine
  modified_base 7: mod_base = OTHER; note = 2-O-methylribose adenine
  modified_base 8: mod_base = gm
  modified_base 9: mod_base = cm
  modified_base 10: mod_base = OTHER; note = 2-O-methylribose adenine
  modified_base 11: mod_base = OTHER; note = 2-O-methylribose adenine
  modified_base 12: mod_base = gm
  modified_base 13: mod_base = OTHER; note = 2-O-methylribose adenine
  modified_base 14: mod_base = OTHER; note = 2-fluororibose adenine
  modified_base 15: mod_base = cm
  modified_base 16: mod_base = OTHER; note = 2-fluororibose adenine
  modified_base 17: mod_base = cm
  modified_base 18: mod_base = um
  modified_base 19: mod_base = gm
  modified_base 20: mod_base = um
  modified_base 21: mod_base = um
  modified_base 21..22: mod_base = OTHER; note = S-phosphorothioate
  modified_base 22: mod_base = um
  modified_base 22..23: mod_base = OTHER; note = S-phosphorothioate
  modified_base 23: mod_base = um
  source 1..23: mol_type = other RNA
ttatagagcaagaacactgtttt

SEQ ID NO: 130 - RNA, 23 nt, synthetic construct
  misc_feature 1..23: note = Synthetic: WV-47104
  misc_feature 1..23: note = Synthetic: SSR-0104555
  modified_base 1: mod_base = um
  modified_base 1..2: mod_base = OTHER; note = S-phosphorothioate
  modified_base 2: mod_base = OTHER; note = 2-fluororibose uracil
  modified_base 2..3: mod_base = OTHER; note = R-phosphorothioate
  modified_base 3: mod_base = OTHER; note = 2-O-methylribose adenine
  modified_base 4: mod_base = um
  modified_base 4..5: mod_base = OTHER; note R-N-(1,3-dimethylimidazolidin-2-ylidene)phosphoramidate
  modified_base 5: mod_base = OTHER; note = 2-fluororibose adenine
  modified_base 6: mod_base = OTHER; note = 2-fluororibose guanine
  modified_base 7: mod_base = OTHER; note = 2-O-methylribose adenine
  modified_base 8: mod_base = gm
  modified_base 9: mod_base = cm
  modified_base 10: mod_base = OTHER; note = 2-O-methylribose adenine
  modified_base 11: mod_base = OTHER; note = 2-O-methylribose adenine
  modified_base 12: mod_base = gm
  modified_base 13: mod_base = OTHER; note = 2-O-methylribose adenine
  modified_base 14: mod_base = OTHER; note = 2-fluororibose adenine
  modified_base 15: mod_base = cm
  modified_base 16: mod_base = OTHER; note = 2-fluororibose adenine
  modified_base 17: mod_base = cm
  modified_base 18: mod_base = um
  modified_base 19: mod_base = gm
  modified_base 20: mod_base = um
  modified_base 21: mod_base = um
  modified_base 21..22: mod_base = OTHER; note = S-phosphorothioate
  modified_base 22: mod_base = um
  modified_base 22..23: mod_base = OTHER; note = S-phosphorothioate
  modified_base 23: mod_base = um
  source 1..23: mol_type = other RNA
ttatagagcaagaacactgtttt

SEQ ID NO: 131 - RNA, 23 nt, synthetic construct
  misc_feature 1..23: note = Synthetic: WV-47105
  misc_feature 1..23: note = Synthetic: SSR-0104561
  modified_base 1: mod_base = um
  modified_base 1..2: mod_base = OTHER; note = S-phosphorothioate
  modified_base 2: mod_base = OTHER; note = 2-fluororibose uracil
  modified_base 2..3: mod_base = OTHER; note = R-phosphorothioate
  modified_base 3: mod_base = OTHER; note = 2-O-methylribose adenine
  modified_base 4: mod_base = um
  modified_base 5: mod_base = OTHER; note = 2-O-methylribose adenine
  modified_base 6: mod_base = OTHER; note = 2-fluororibose guanine
  modified_base 6..7: mod_base = OTHER; note R-N-(1,3-dimethylimidazolidin-2-ylidene)phosphoramidate
  modified_base 7: mod_base = OTHER; note = 2-fluororibose adenine
  modified_base 8: mod_base = gm
  modified_base 9: mod_base = cm
  modified_base 10: mod_base = OTHER; note = 2-O-methylribose adenine
  modified_base 11: mod_base = OTHER; note = 2-O-methylribose adenine
  modified_base 12: mod_base = gm
  modified_base 13: mod_base = OTHER; note = 2-O-methylribose adenine
  modified_base 14: mod_base = OTHER; note = 2-fluororibose adenine
  modified_base 15: mod_base = cm
  modified_base 16: mod_base = OTHER; note = 2-fluororibose adenine
  modified_base 17: mod_base = cm
  modified_base 18: mod_base = um
  modified_base 19: mod_base = gm
  modified_base 20: mod_base = um
  modified_base 21: mod_base = um
  modified_base 21..22: mod_base = OTHER; note = S-phosphorothioate
  modified_base 22: mod_base = um
  modified_base 22..23: mod_base = OTHER; note = S-phosphorothioate
  modified_base 23: mod_base = um
  source 1..23: mol_type = other RNA
ttatagagcaagaacactgtttt

SEQ ID NO: 132 - RNA, 23 nt, synthetic construct
  misc_feature 1..23: note = Synthetic: WV-47106
  misc_feature 1..23: note = Synthetic: SSR-0104565
  modified_base 1: mod_base = um
  modified_base 1..2: mod_base = OTHER; note = S-phosphorothioate
  modified_base 2: mod_base = OTHER; note = 2-fluororibose uracil
  modified_base 2..3: mod_base = OTHER; note = R-phosphorothioate
  modified_base 3: mod_base = OTHER; note = 2-O-methylribose adenine
  modified_base 4: mod_base = um
  modified_base 5: mod_base = OTHER; note = 2-O-methylribose adenine
  modified_base 6: mod_base = OTHER; note = 2-fluororibose guanine
  modified_base 7: mod_base = OTHER; note = 2-O-methylribose adenine
  modified_base 7..8: mod_base = OTHER; note R-N-(1,3-dimethylimidazolidin-2-ylidene)phosphoramidate
  modified_base 8: mod_base = OTHER; note = 2-fluororibose guanine
  modified_base 9: mod_base = cm
  modified_base 10: mod_base = OTHER; note = 2-O-methylribose adenine
  modified_base 11: mod_base = OTHER; note = 2-O-methylribose adenine
  modified_base 12: mod_base = gm
  modified_base 13: mod_base = OTHER; note = 2-O-methylribose adenine
  modified_base 14: mod_base = OTHER; note = 2-fluororibose adenine
  modified_base 15: mod_base = cm
  modified_base 16: mod_base = OTHER; note = 2-fluororibose adenine
  modified_base 17: mod_base = cm
  modified_base 18: mod_base = um
  modified_base 19: mod_base = gm
  modified_base 20: mod_base = um
  modified_base 21: mod_base = um
  modified_base 21..22: mod_base = OTHER; note = S-phosphorothioate
  modified_base 22: mod_base = um
  modified_base 22..23: mod_base = OTHER; note = S-phosphorothioate
  modified_base 23: mod_base = um
  source 1..23: mol_type = other RNA
ttatagagcaagaacactgtttt

SEQ ID NO: 133 - RNA, 23 nt, synthetic construct
  misc_feature 1..23: note = Synthetic: WV-47107
  misc_feature 1..23: note = Synthetic: SSR-0104570
  modified_base 1: mod_base = um
  modified_base 1..2: mod_base = OTHER; note = S-phosphorothioate
  modified_base 2: mod_base = OTHER; note = 2-fluororibose uracil
  modified_base 2..3: mod_base = OTHER; note = R-phosphorothioate
  modified_base 3: mod_base = OTHER; note = 2-O-methylribose adenine
  modified_base 4: mod_base = um
  modified_base 5: mod_base = OTHER; note = 2-O-methylribose adenine
  modified_base 6: mod_base = OTHER; note = 2-fluororibose guanine
  modified_base 7: mod_base = OTHER; note = 2-O-methylribose adenine
  modified_base 8: mod_base = gm
  modified_base 8..9: mod_base = OTHER; note R-N-(1,3-dimethylimidazolidin-2-ylidene)phosphoramidate
  modified_base 9: mod_base = OTHER; note = 2-fluororibose cytosine
  modified_base 10: mod_base = OTHER; note = 2-O-methylribose adenine
  modified_base 11: mod_base = OTHER; note = 2-O-methylribose adenine
  modified_base 12: mod_base = gm
  modified_base 13: mod_base = OTHER; note = 2-O-methylribose adenine
  modified_base 14: mod_base = OTHER; note = 2-fluororibose adenine
  modified_base 15: mod_base = cm
  modified_base 16: mod_base = OTHER; note = 2-fluororibose adenine
  modified_base 17: mod_base = cm
  modified_base 18: mod_base = um
  modified_base 19: mod_base = gm
  modified_base 20: mod_base = um
  modified_base 21: mod_base = um
  modified_base 21..22: mod_base = OTHER; note = S-phosphorothioate
  modified_base 22: mod_base = um
  modified_base 22..23: mod_base = OTHER; note = S-phosphorothioate
  modified_base 23: mod_base = um
  source 1..23: mol_type = other RNA
ttatagagcaagaacactgtttt

SEQ ID NO: 134 - RNA, 23 nt, synthetic construct
  misc_feature 1..23: note = Synthetic: WV-47108
  misc_feature 1..23: note = Synthetic: SSR-0104574
  modified_base 1: mod_base = um
  modified_base 1..2: mod_base = OTHER; note = S-phosphorothioate
  modified_base 2: mod_base = OTHER; note = 2-fluororibose uracil
  modified_base 2..3: mod_base = OTHER; note = R-phosphorothioate
  modified_base 3: mod_base = OTHER; note = 2-O-methylribose adenine
  modified_base 4: mod_base = um
  modified_base 5: mod_base = OTHER; note = 2-O-methylribose adenine
  modified_base 6: mod_base = OTHER; note = 2-fluororibose guanine
  modified_base 7: mod_base = OTHER; note = 2-O-methylribose adenine
  modified_base 8: mod_base = gm
  modified_base 9: mod_base = cm
  modified_base 9..10: mod_base = OTHER; note R-N-(1,3-dimethylimidazolidin-2-ylidene)phosphoramidate
  modified_base 10: mod_base = OTHER; note = 2-fluororibose adenine
  modified_base 11: mod_base = OTHER; note = 2-O-methylribose adenine
  modified_base 12: mod_base = gm
  modified_base 13: mod_base = OTHER; note = 2-O-methylribose adenine
  modified_base 14: mod_base = OTHER; note = 2-fluororibose adenine
  modified_base 15: mod_base = cm
  modified_base 16: mod_base = OTHER; note = 2-fluororibose adenine
  modified_base 17: mod_base = cm
  modified_base 18: mod_base = um
  modified_base 19: mod_base = gm
  modified_base 20: mod_base = um
  modified_base 21: mod_base = um
  modified_base 21..22: mod_base = OTHER; note = S-phosphorothioate
  modified_base 22: mod_base = um
  modified_base 22..23: mod_base = OTHER; note = S-phosphorothioate
  modified_base 23: mod_base = um
  source 1..23: mol_type = other RNA
ttatagagcaagaacactgtttt

SEQ ID NO: 135 - RNA, 23 nt, synthetic construct
  misc_feature 1..23: note = Synthetic: WV-47109
  misc_feature 1..23: note = Synthetic: SSR-0104579
  modified_base 1: mod_base = um
  modified_base 1..2: mod_base = OTHER; note = S-phosphorothioate
  modified_base 2: mod_base = OTHER; note = 2-fluororibose uracil
  modified_base 2..3: mod_base = OTHER; note = R-phosphorothioate
  modified_base 3: mod_base = OTHER; note = 2-O-methylribose adenine
  modified_base 4: mod_base = um
  modified_base 5: mod_base = OTHER; note = 2-O-methylribose adenine
  modified_base 6: mod_base = OTHER; note = 2-fluororibose guanine
  modified_base 7: mod_base = OTHER; note = 2-O-methylribose adenine
  modified_base 8: mod_base = gm
  modified_base 9: mod_base = cm
  modified_base 10: mod_base = OTHER; note = 2-O-methylribose adenine
  modified_base 10..11: mod_base = OTHER; note R-N-(1,3-dimethylimidazolidin-2-ylidene)phosphoramidate
  modified_base 11: mod_base = OTHER; note = 2-fluororibose adenine
  modified_base 12: mod_base = gm
  modified_base 13: mod_base = OTHER; note = 2-O-methylribose adenine
  modified_base 14: mod_base = OTHER; note = 2-fluororibose adenine
  modified_base 15: mod_base = cm
  modified_base 16: mod_base = OTHER; note = 2-fluororibose adenine
  modified_base 17: mod_base = cm
  modified_base 18: mod_base = um
  modified_base 19: mod_base = gm
  modified_base 20: mod_base = um
  modified_base 21: mod_base = um
  modified_base 21..22: mod_base = OTHER; note = S-phosphorothioate
  modified_base 22: mod_base = um
  modified_base 22..23: mod_base = OTHER; note = S-phosphorothioate
  modified_base 23: mod_base = um
  source 1..23: mol_type = other RNA
ttatagagcaagaacactgtttt

SEQ ID NO: 136 - RNA, 23 nt, synthetic construct
  misc_feature 1..23: note = Synthetic: WV-47110
  misc_feature 1..23: note = Synthetic: SSR-0104586
  modified_base 1: mod_base = um
  modified_base 1..2: mod_base = OTHER; note = S-phosphorothioate
  modified_base 2: mod_base = OTHER; note = 2-fluororibose uracil
  modified_base 2..3: mod_base = OTHER; note = R-phosphorothioate
  modified_base 3: mod_base = OTHER; note = 2-O-methylribose adenine
  modified_base 4: mod_base = um
  modified_base 5: mod_base = OTHER; note = 2-O-methylribose adenine
  modified_base 6: mod_base = OTHER; note = 2-fluororibose guanine
  modified_base 7: mod_base = OTHER; note = 2-O-methylribose adenine
  modified_base 8: mod_base = gm
  modified_base 9: mod_base = cm
  modified_base 10: mod_base = OTHER; note = 2-O-methylribose adenine
  modified_base 11: mod_base = OTHER; note = 2-O-methylribose adenine
  modified_base 11..12: mod_base = OTHER; note R-N-(1,3-dimethylimidazolidin-2-ylidene)phosphoramidate
  modified_base 12: mod_base = OTHER; note = 2-fluororibose guanine
  modified_base 13: mod_base = OTHER; note = 2-O-methylribose adenine
  modified_base 14: mod_base = OTHER; note = 2-fluororibose adenine
  modified_base 15: mod_base = cm
  modified_base 16: mod_base = OTHER; note = 2-fluororibose adenine
  modified_base 17: mod_base = cm
  modified_base 18: mod_base = um
  modified_base 19: mod_base = gm
  modified_base 20: mod_base = um
  modified_base 21: mod_base = um
  modified_base 21..22: mod_base = OTHER; note = S-phosphorothioate
  modified_base 22: mod_base = um
  modified_base 22..23: mod_base = OTHER; note = S-phosphorothioate
  modified_base 23: mod_base = um
  source 1..23: mol_type = other RNA
ttatagagcaagaacactgtttt

SEQ ID NO: 137 - RNA, 23 nt, synthetic construct
  misc_feature 1..23: note = Synthetic: WV-47111
  misc_feature 1..23: note = Synthetic: SSR-0104590
  modified_base 1: mod_base = um
  modified_base 1..2: mod_base = OTHER; note = S-phosphorothioate
  modified_base 2: mod_base = OTHER; note = 2-fluororibose uracil
  modified_base 2..3: mod_base = OTHER; note = R-phosphorothioate
  modified_base 3: mod_base = OTHER; note = 2-O-methylribose adenine
  modified_base 4: mod_base = um
  modified_base 5: mod_base = OTHER; note = 2-O-methylribose adenine
  modified_base 6: mod_base = OTHER; note = 2-fluororibose guanine
  modified_base 7: mod_base = OTHER; note = 2-O-methylribose adenine
  modified_base 8: mod_base = gm
  modified_base 9: mod_base = cm
  modified_base 10: mod_base = OTHER; note = 2-O-methylribose adenine
  modified_base 11: mod_base = OTHER; note = 2-O-methylribose adenine
  modified_base 12: mod_base = gm
  modified_base 12..13: mod_base = OTHER; note R-N-(1,3-dimethylimidazolidin-2-ylidene)phosphoramidate
  modified_base 13: mod_base = OTHER; note = 2-fluororibose adenine
  modified_base 14: mod_base = OTHER; note = 2-fluororibose adenine
  modified_base 15: mod_base = cm
  modified_base 16: mod_base = OTHER; note = 2-fluororibose adenine
  modified_base 17: mod_base = cm
  modified_base 18: mod_base = um
  modified_base 19: mod_base = gm
  modified_base 20: mod_base = um
  modified_base 21: mod_base = um
  modified_base 21..22: mod_base = OTHER; note = S-phosphorothioate
  modified_base 22: mod_base = um
  modified_base 22..23: mod_base = OTHER; note = S-phosphorothioate
  modified_base 23: mod_base = um
  source 1..23: mol_type = other RNA
ttatagagcaagaacactgtttt

SEQ ID NO: 138 - RNA, 23 nt, synthetic construct
  misc_feature 1..23: note = Synthetic: WV-47112
  misc_feature 1..23: note = Synthetic: SSR-0104596
  modified_base 1: mod_base = um
  modified_base 1..2: mod_base = OTHER; note = S-phosphorothioate
  modified_base 2: mod_base = OTHER; note = 2-fluororibose uracil
  modified_base 2..3: mod_base = OTHER; note = R-phosphorothioate
  modified_base 3: mod_base = OTHER; note = 2-O-methylribose adenine
  modified_base 4: mod_base = um
  modified_base 5: mod_base = OTHER; note = 2-O-methylribose adenine
  modified_base 6: mod_base = OTHER; note = 2-fluororibose guanine
  modified_base 7: mod_base = OTHER; note = 2-O-methylribose adenine
  modified_base 8: mod_base = gm
  modified_base 9: mod_base = cm
  modified_base 10: mod_base = OTHER; note = 2-O-methylribose adenine
  modified_base 11: mod_base = OTHER; note = 2-O-methylribose adenine
  modified_base 12: mod_base = gm
  modified_base 13: mod_base = OTHER; note = 2-O-methylribose adenine
  modified_base 14: mod_base = OTHER; note = 2-fluororibose adenine
  modified_base 14..15: mod_base = OTHER; note R-N-(1,3-dimethylimidazolidin-2-ylidene)phosphoramidate
  modified_base 15: mod_base = OTHER; note = 2-fluororibose cytosine
  modified_base 16: mod_base = OTHER; note = 2-fluororibose adenine
  modified_base 17: mod_base = cm
  modified_base 18: mod_base = um
  modified_base 19: mod_base = gm
  modified_base 20: mod_base = um
  modified_base 21: mod_base = um
  modified_base 21..22: mod_base = OTHER; note = S-phosphorothioate
  modified_base 22: mod_base = um
  modified_base 22..23: mod_base = OTHER; note = S-phosphorothioate
  modified_base 23: mod_base = um
  source 1..23: mol_type = other RNA
ttatagagcaagaacactgtttt

SEQ ID NO: 139 - RNA, 23 nt, synthetic construct
  misc_feature 1..23: note = Synthetic: WV-47113
  misc_feature 1..23: note = Synthetic: SSR-0104602
  modified_base 1: mod_base = um
  modified_base 1..2: mod_base = OTHER; note = S-phosphorothioate
  modified_base 2: mod_base = OTHER; note = 2-fluororibose uracil
  modified_base 2..3: mod_base = OTHER; note = R-phosphorothioate
  modified_base 3: mod_base = OTHER; note = 2-O-methylribose adenine
  modified_base 4: mod_base = um
  modified_base 5: mod_base = OTHER; note = 2-O-methylribose adenine
  modified_base 6: mod_base = OTHER; note = 2-fluororibose guanine
  modified_base 7: mod_base = OTHER; note = 2-O-methylribose adenine
  modified_base 8: mod_base = gm
  modified_base 9: mod_base = cm
  modified_base 10: mod_base = OTHER; note = 2-O-methylribose adenine
  modified_base 11: mod_base = OTHER; note = 2-O-methylribose adenine
  modified_base 12: mod_base = gm
  modified_base 13: mod_base = OTHER; note = 2-O-methylribose adenine
  modified_base 14: mod_base = OTHER; note = 2-fluororibose adenine
  modified_base 15: mod_base = cm
  modified_base 16: mod_base = OTHER; note = 2-fluororibose adenine
  modified_base 16..17: mod_base = OTHER; note R-N-(1,3-dimethylimidazolidin-2-ylidene)phosphoramidate
  modified_base 17: mod_base = OTHER; note = 2-fluororibose cytosine
  modified_base 18: mod_base = um
  modified_base 19: mod_base = gm
  modified_base 20: mod_base = um
  modified_base 21: mod_base = um
  modified_base 21..22: mod_base = OTHER; note = S-phosphorothioate
  modified_base 22: mod_base = um
  modified_base 22..23: mod_base = OTHER; note = S-phosphorothioate
  modified_base 23: mod_base = um
  source 1..23: mol_type = other RNA
ttatagagcaagaacactgtttt

SEQ ID NO: 140 - RNA, 23 nt, synthetic construct
  misc_feature 1..23: note = Synthetic: WV-47114
  misc_feature 1..23: note = Synthetic: SSR-0104606
  modified_base 1: mod_base = um
  modified_base 1..2: mod_base = OTHER; note = S-phosphorothioate
  modified_base 2: mod_base = OTHER; note = 2-fluororibose uracil
  modified_base 2..3: mod_base = OTHER; note = R-phosphorothioate
  modified_base 3: mod_base = OTHER; note = 2-O-methylribose adenine
  modified_base 4: mod_base = um
  modified_base 5: mod_base = OTHER; note = 2-O-methylribose adenine
  modified_base 6: mod_base = OTHER; note = 2-fluororibose guanine
  modified_base 7: mod_base = OTHER; note = 2-O-methylribose adenine
  modified_base 8: mod_base = gm
  modified_base 9: mod_base = cm
  modified_base 10: mod_base = OTHER; note = 2-O-methylribose adenine
  modified_base 11: mod_base = OTHER; note = 2-O-methylribose adenine
  modified_base 12: mod_base = gm
  modified_base 13: mod_base = OTHER; note = 2-O-methylribose adenine
  modified_base 14: mod_base = OTHER; note = 2-fluororibose adenine
  modified_base 15: mod_base = cm
  modified_base 16: mod_base = OTHER; note = 2-fluororibose adenine
  modified_base 17: mod_base = cm
  modified_base 17..18: mod_base = OTHER; note R-N-(1,3-dimethylimidazolidin-2-ylidene)phosphoramidate
  modified_base 18: mod_base = OTHER; note = 2-fluororibose uracil
  modified_base 19: mod_base = gm
  modified_base 20: mod_base = um
  modified_base 21: mod_base = um
  modified_base 21..22: mod_base = OTHER; note = S-phosphorothioate
  modified_base 22: mod_base = um
  modified_base 22..23: mod_base = OTHER; note = S-phosphorothioate
  modified_base 23: mod_base = um
  source 1..23: mol_type = other RNA
ttatagagcaagaacactgtttt

SEQ ID NO: 141 - RNA, 23 nt, synthetic construct
  misc_feature 1..23: note = Synthetic: WV-47115
  misc_feature 1..23: note = Synthetic: SSR-0104610
  modified_base 1: mod_base = um
  modified_base 1..2: mod_base = OTHER; note = S-phosphorothioate
  modified_base 2: mod_base = OTHER; note = 2-fluororibose uracil
  modified_base 2..3: mod_base = OTHER; note = R-phosphorothioate
  modified_base 3: mod_base = OTHER; note = 2-O-methylribose adenine
  modified_base 4: mod_base = um
  modified_base 5: mod_base = OTHER; note = 2-O-methylribose adenine
  modified_base 6: mod_base = OTHER; note = 2-fluororibose guanine
  modified_base 7: mod_base = OTHER; note = 2-O-methylribose adenine
  modified_base 8: mod_base = gm
  modified_base 9: mod_base = cm
  modified_base 10: mod_base = OTHER; note = 2-O-methylribose adenine
  modified_base 11: mod_base = OTHER; note = 2-O-methylribose adenine
  modified_base 12: mod_base = gm
  modified_base 13: mod_base = OTHER; note = 2-O-methylribose adenine
  modified_base 14: mod_base = OTHER; note = 2-fluororibose adenine
  modified_base 15: mod_base = cm
  modified_base 16: mod_base = OTHER; note = 2-fluororibose adenine
  modified_base 17: mod_base = cm
  modified_base 18: mod_base = um
  modified_base 18..19: mod_base = OTHER; note R-N-(1,3-dimethylimidazolidin-2-ylidene)phosphoramidate
  modified_base 19: mod_base = OTHER; note = 2-fluororibose guanine
  modified_base 20: mod_base = um
  modified_base 21: mod_base = um
  modified_base 21..22: mod_base = OTHER; note = S-phosphorothioate
  modified_base 22: mod_base = um
  modified_base 22..23: mod_base = OTHER; note = S-phosphorothioate
  modified_base 23: mod_base = um
  source 1..23: mol_type = other RNA
ttatagagcaagaacactgtttt

SEQ ID NO: 142 - RNA, 23 nt, synthetic construct
  misc_feature 1..23: note = Synthetic: WV-47116
  misc_feature 1..23: note = Synthetic: SSR-0104614
  modified_base 1: mod_base = um
  modified_base 1..2: mod_base = OTHER; note = S-phosphorothioate
  modified_base 2: mod_base = OTHER; note = 2-fluororibose uracil
  modified_base 2..3: mod_base = OTHER; note = R-phosphorothioate
  modified_base 3: mod_base = OTHER; note = 2-O-methylribose adenine
  modified_base 4: mod_base = um
  modified_base 5: mod_base = OTHER; note = 2-O-methylribose adenine
  modified_base 6: mod_base = OTHER; note = 2-fluororibose guanine
  modified_base 7: mod_base = OTHER; note = 2-O-methylribose adenine
  modified_base 8: mod_base = gm
  modified_base 9: mod_base = cm
  modified_base 10: mod_base = OTHER; note = 2-O-methylribose adenine
  modified_base 11: mod_base = OTHER; note = 2-O-methylribose adenine
  modified_base 12: mod_base = gm
  modified_base 13: mod_base = OTHER; note = 2-O-methylribose adenine
  modified_base 14: mod_base = OTHER; note = 2-fluororibose adenine
  modified_base 15: mod_base = cm
  modified_base 16: mod_base = OTHER; note = 2-fluororibose adenine
  modified_base 17: mod_base = cm
  modified_base 18: mod_base = um
  modified_base 19: mod_base = gm
  modified_base 19..20: mod_base = OTHER; note R-N-(1,3-dimethylimidazolidin-2-ylidene)phosphoramidate
  modified_base 20: mod_base = OTHER; note = 2-fluororibose uracil
  modified_base 21: mod_base = um
  modified_base 21..22: mod_base = OTHER; note = S-phosphorothioate
  modified_base 22: mod_base = um
  modified_base 22..23: mod_base = OTHER; note = S-phosphorothioate
  modified_base 23: mod_base = um
  source 1..23: mol_type = other RNA
ttatagagcaagaacactgtttt

SEQ ID NO: 143 - RNA, 23 nt, synthetic construct
  misc_feature 1..23: note = Synthetic: WV-47118
  misc_feature 1..23: note = Synthetic: SSR-0104627
  modified_base 1: mod_base = um
  modified_base 1..2: mod_base = OTHER; note = S-phosphorothioate
  modified_base 2: mod_base = OTHER; note = 2-fluororibose uracil
  modified_base 2..3: mod_base = OTHER; note = R-phosphorothioate
  modified_base 3: mod_base = OTHER; note = 2-O-methylribose adenine
  modified_base 4: mod_base = um
  modified_base 5: mod_base = OTHER; note = 2-O-methylribose adenine
  modified_base 6: mod_base = OTHER; note = 2-fluororibose guanine
  modified_base 7: mod_base = OTHER; note = 2-O-methylribose adenine
  modified_base 8: mod_base = gm
  modified_base 9: mod_base = cm
  modified_base 10: mod_base = OTHER; note = 2-O-methylribose adenine
  modified_base 11: mod_base = OTHER; note = 2-O-methylribose adenine
  modified_base 12: mod_base = gm
  modified_base 13: mod_base = OTHER; note = 2-O-methylribose adenine
  modified_base 14: mod_base = OTHER; note = 2-fluororibose adenine
  modified_base 15: mod_base = cm
  modified_base 16: mod_base = OTHER; note = 2-fluororibose adenine
  modified_base 17: mod_base = cm
  modified_base 18: mod_base = um
  modified_base 19: mod_base = gm
  modified_base 20: mod_base = um
  modified_base 21: mod_base = um
  modified_base 21..22: mod_base = OTHER; note R-N-(1,3-dimethylimidazolidin-2-ylidene)phosphoramidate
  modified_base 22: mod_base = OTHER; note = 2-fluororibose uracil
  modified_base 22..23: mod_base = OTHER; note = S-phosphorothioate
  modified_base 23: mod_base = um
  source 1..23: mol_type = other RNA
ttatagagcaagaacactgtttt

SEQ ID NO: 144 - RNA, 23 nt, synthetic construct
  misc_feature 1..23: note = Synthetic: WV-47119
  misc_feature 1..23: note = Synthetic: SSR-0104623
  modified_base 1: mod_base = um
  modified_base 1..2: mod_base = OTHER; note = S-phosphorothioate
  modified_base 2: mod_base = OTHER; note = 2-fluororibose uracil
  modified_base 2..3: mod_base = OTHER; note = R-phosphorothioate
  modified_base 3: mod_base = OTHER; note = 2-O-methylribose adenine
  modified_base 4: mod_base = um
  modified_base 5: mod_base = OTHER; note = 2-O-methylribose adenine
  modified_base 6: mod_base = OTHER; note = 2-fluororibose guanine
  modified_base 7: mod_base = OTHER; note = 2-O-methylribose adenine
  modified_base 8: mod_base = gm
  modified_base 9: mod_base = cm
  modified_base 10: mod_base = OTHER; note = 2-O-methylribose adenine
  modified_base 11: mod_base = OTHER; note = 2-O-methylribose adenine
  modified_base 12: mod_base = gm
  modified_base 13: mod_base = OTHER; note = 2-O-methylribose adenine
  modified_base 14: mod_base = OTHER; note = 2-fluororibose adenine
  modified_base 15: mod_base = cm
  modified_base 16: mod_base = OTHER; note = 2-fluororibose adenine
  modified_base 17: mod_base = cm
  modified_base 18: mod_base = um
  modified_base 19: mod_base = gm
  modified_base 20: mod_base = um
  modified_base 21: mod_base = um
  modified_base 21..22: mod_base = OTHER; note = S-phosphorothioate
  modified_base 22: mod_base = um
  modified_base 22..23: mod_base = OTHER; note R-N-(1,3-dimethylimidazolidin-2-ylidene)phosphoramidate
  modified_base 23: mod_base = OTHER; note = 2-fluororibose uracil
  source 1..23: mol_type = other RNA
ttatagagcaagaacactgtttt

SEQ ID NO: 145 - RNA, 23 nt, synthetic construct
  misc_feature 1..23: note = Synthetic: WV-47120
  misc_feature 1..23: note = Synthetic: SSR-0104651
  modified_base 1: mod_base = um
  modified_base 1..2: mod_base = OTHER; note = S-phosphorothioate
  modified_base 2: mod_base = OTHER; note = 2-fluororibose uracil
  modified_base 2..3: mod_base = OTHER; note S-N-(1,3-dimethylimidazolidin-2-ylidene)phosphoramidate
  modified_base 3: mod_base = OTHER; note = 2-fluororibose adenine
  modified_base 4: mod_base = um
  modified_base 5: mod_base = OTHER; note = 2-O-methylribose adenine
  modified_base 6: mod_base = OTHER; note = 2-fluororibose guanine
  modified_base 7: mod_base = OTHER; note = 2-O-methylribose adenine
  modified_base 8: mod_base = gm
  modified_base 9: mod_base = cm
  modified_base 10: mod_base = OTHER; note = 2-O-methylribose adenine
  modified_base 11: mod_base = OTHER; note = 2-O-methylribose adenine
  modified_base 12: mod_base = gm
  modified_base 13: mod_base = OTHER; note = 2-O-methylribose adenine
  modified_base 14: mod_base = OTHER; note = 2-fluororibose adenine
  modified_base 15: mod_base = cm
  modified_base 16: mod_base = OTHER; note = 2-fluororibose adenine
  modified_base 17: mod_base = cm
  modified_base 18: mod_base = um
  modified_base 19: mod_base = gm
  modified_base 20: mod_base = um
  modified_base 21: mod_base = um
  modified_base 21..22: mod_base = OTHER; note = S-phosphorothioate
  modified_base 22: mod_base = um
  modified_base 22..23: mod_base = OTHER; note = S-phosphorothioate
  modified_base 23: mod_base = um
  source 1..23: mol_type = other RNA
ttatagagcaagaacactgtttt

SEQ ID NO: 146 - RNA, 23 nt, synthetic construct
  misc_feature 1..23: note = Synthetic: WV-47121
  misc_feature 1..23: note = Synthetic: SSR-0104480
  modified_base 1: mod_base = um
  modified_base 1..2: mod_base = OTHER; note = S-phosphorothioate
  modified_base 2: mod_base = OTHER; note = 2-fluororibose uracil
  modified_base 2..3: mod_base = OTHER; note = R-phosphorothioate
  modified_base 3: mod_base = OTHER; note = 2-O-methylribose adenine
  modified_base 3..4: mod_base = OTHER; note S-N-(1,3-dimethylimidazolidin-2-ylidene)phosphoramidate
  modified_base 4: mod_base = OTHER; note = 2-fluororibose uracil
  modified_base 5: mod_base = OTHER; note = 2-O-methylribose adenine
  modified_base 6: mod_base = OTHER; note = 2-fluororibose guanine
  modified_base 7: mod_base = OTHER; note = 2-O-methylribose adenine
  modified_base 8: mod_base = gm
  modified_base 9: mod_base = cm
  modified_base 10: mod_base = OTHER; note = 2-O-methylribose adenine
  modified_base 11: mod_base = OTHER; note = 2-O-methylribose adenine
  modified_base 12: mod_base = gm
  modified_base 13: mod_base = OTHER; note = 2-O-methylribose adenine
  modified_base 14: mod_base = OTHER; note = 2-fluororibose adenine
  modified_base 15: mod_base = cm
  modified_base 16: mod_base = OTHER; note = 2-fluororibose adenine
  modified_base 17: mod_base = cm
  modified_base 18: mod_base = um
  modified_base 19: mod_base = gm
  modified_base 20: mod_base = um
  modified_base 21: mod_base = um
  modified_base 21..22: mod_base = OTHER; note = S-phosphorothioate
  modified_base 22: mod_base = um
  modified_base 22..23: mod_base = OTHER; note = S-phosphorothioate
  modified_base 23: mod_base = um
  source 1..23: mol_type = other RNA
ttatagagcaagaacactgtttt

SEQ ID NO: 147 - RNA, 23 nt, synthetic construct
  misc_feature 1..23: note = Synthetic: WV-47122
  misc_feature 1..23: note = Synthetic: SSR-0104557
  modified_base 1: mod_base = um
  modified_base 1..2: mod_base = OTHER; note = S-phosphorothioate
  modified_base 2: mod_base = OTHER; note = 2-fluororibose uracil
  modified_base 2..3: mod_base = OTHER; note = R-phosphorothioate
  modified_base 3: mod_base = OTHER; note = 2-O-methylribose adenine
  modified_base 4: mod_base = um
  modified_base 4..5: mod_base = OTHER; note S-N-(1,3-dimethylimidazolidin-2-ylidene)phosphoramidate
  modified_base 5: mod_base = OTHER; note = 2-fluororibose adenine
  modified_base 6: mod_base = OTHER; note = 2-fluororibose guanine
  modified_base 7: mod_base = OTHER; note = 2-O-methylribose adenine
  modified_base 8: mod_base = gm
  modified_base 9: mod_base = cm
  modified_base 10: mod_base = OTHER; note = 2-O-methylribose adenine
  modified_base 11: mod_base = OTHER; note = 2-O-methylribose adenine
  modified_base 12: mod_base = gm
  modified_base 13: mod_base = OTHER; note = 2-O-methylribose adenine
  modified_base 14: mod_base = OTHER; note = 2-fluororibose adenine
  modified_base 15: mod_base = cm
  modified_base 16: mod_base = OTHER; note = 2-fluororibose adenine
  modified_base 17: mod_base = cm
  modified_base 18: mod_base = um
  modified_base 19: mod_base = gm
  modified_base 20: mod_base = um
  modified_base 21: mod_base = um
  modified_base 21..22: mod_base = OTHER; note = S-phosphorothioate
  modified_base 22: mod_base = um
  modified_base 22..23: mod_base = OTHER; note = S-phosphorothioate
  modified_base 23: mod_base = um
  source 1..23: mol_type = other RNA
ttatagagcaagaacactgtttt

SEQ ID NO: 148 - RNA, 23 nt, synthetic construct
  misc_feature 1..23: note = Synthetic: WV-47123
  misc_feature 1..23: note = Synthetic: SSR-0104563
  modified_base 1: mod_base = um
  modified_base 1..2: mod_base = OTHER; note = S-phosphorothioate
  modified_base 2: mod_base = OTHER; note = 2-fluororibose uracil
  modified_base 2..3: mod_base = OTHER; note = R-phosphorothioate
  modified_base 3: mod_base = OTHER; note = 2-O-methylribose adenine
  modified_base 4: mod_base = um
  modified_base 5: mod_base = OTHER; note = 2-O-methylribose adenine
  modified_base 6: mod_base = OTHER; note = 2-fluororibose guanine
  modified_base 6..7: mod_base = OTHER; note S-N-(1,3-dimethylimidazolidin-2-ylidene)phosphoramidate
  modified_base 7: mod_base = OTHER; note = 2-fluororibose adenine
  modified_base 8: mod_base = gm
  modified_base 9: mod_base = cm
  modified_base 10: mod_base = OTHER; note = 2-O-methylribose adenine
  modified_base 11: mod_base = OTHER; note = 2-O-methylribose adenine
  modified_base 12: mod_base = gm
  modified_base 13: mod_base = OTHER; note = 2-O-methylribose adenine
  modified_base 14: mod_base = OTHER; note = 2-fluororibose adenine
  modified_base 15: mod_base = cm
  modified_base 16: mod_base = OTHER; note = 2-fluororibose adenine
  modified_base 17: mod_base = cm
  modified_base 18: mod_base = um
  modified_base 19: mod_base = gm
  modified_base 20: mod_base = um
  modified_base 21: mod_base = um
  modified_base 21..22: mod_base = OTHER; note = S-phosphorothioate
  modified_base 22: mod_base = um
  modified_base 22..23: mod_base = OTHER; note = S-phosphorothioate
  modified_base 23: mod_base = um
  source 1..23: mol_type = other RNA
ttatagagcaagaacactgtttt

SEQ ID NO: 149 - RNA, 23 nt, synthetic construct
  misc_feature 1..23: note = Synthetic: WV-47124
  misc_feature 1..23: note = Synthetic: SSR-0104567
  modified_base 1: mod_base = um
  modified_base 1..2: mod_base = OTHER; note = S-phosphorothioate
  modified_base 2: mod_base = OTHER; note = 2-fluororibose uracil
  modified_base 2..3: mod_base = OTHER; note = R-phosphorothioate
  modified_base 3: mod_base = OTHER; note = 2-O-methylribose adenine
  modified_base 4: mod_base = um
  modified_base 5: mod_base = OTHER; note = 2-O-methylribose adenine
  modified_base 6: mod_base = OTHER; note = 2-fluororibose guanine
  modified_base 7: mod_base = OTHER; note = 2-O-methylribose adenine
  modified_base 7..8: mod_base = OTHER; note S-N-(1,3-dimethylimidazolidin-2-ylidene)phosphoramidate
  modified_base 8: mod_base = OTHER; note = 2-fluororibose guanine
  modified_base 9: mod_base = cm
  modified_base 10: mod_base = OTHER; note = 2-O-methylribose adenine
  modified_base 11: mod_base = OTHER; note = 2-O-methylribose adenine
  modified_base 12: mod_base = gm
  modified_base 13: mod_base = OTHER; note = 2-O-methylribose adenine
  modified_base 14: mod_base = OTHER; note = 2-fluororibose adenine
  modified_base 15: mod_base = cm
  modified_base 16: mod_base = OTHER; note = 2-fluororibose adenine
  modified_base 17: mod_base = cm
  modified_base 18: mod_base = um
  modified_base 19: mod_base = gm
  modified_base 20: mod_base = um
  modified_base 21: mod_base = um
  modified_base 21..22: mod_base = OTHER; note = S-phosphorothioate
  modified_base 22: mod_base = um
  modified_base 22..23: mod_base = OTHER; note = S-phosphorothioate
  modified_base 23: mod_base = um
  source 1..23: mol_type = other RNA
ttatagagcaagaacactgtttt

SEQ ID NO: 150 - RNA, 23 nt, synthetic construct
  misc_feature 1..23: note = Synthetic: WV-47125
  misc_feature 1..23: note = Synthetic: SSR-0104572
  modified_base 1: mod_base = um
  modified_base 1..2: mod_base = OTHER; note = S-phosphorothioate
  modified_base 2: mod_base = OTHER; note = 2-fluororibose uracil
  modified_base 2..3: mod_base = OTHER; note = R-phosphorothioate
  modified_base 3: mod_base = OTHER; note = 2-O-methylribose adenine
  modified_base 4: mod_base = um
  modified_base 5: mod_base = OTHER; note = 2-O-methylribose adenine
  modified_base 6: mod_base = OTHER; note = 2-fluororibose guanine
  modified_base 7: mod_base = OTHER; note = 2-O-methylribose adenine
  modified_base 8: mod_base = gm
  modified_base 8..9: mod_base = OTHER; note S-N-(1,3-dimethylimidazolidin-2-ylidene)phosphoramidate
  modified_base 9: mod_base = OTHER; note = 2-fluororibose cytosine
  modified_base 10: mod_base = OTHER; note = 2-O-methylribose adenine
  modified_base 11: mod_base = OTHER; note = 2-O-methylribose adenine
  modified_base 12: mod_base = gm
  modified_base 13: mod_base = OTHER; note = 2-O-methylribose adenine
  modified_base 14: mod_base = OTHER; note = 2-fluororibose adenine
  modified_base 15: mod_base = cm
  modified_base 16: mod_base = OTHER; note = 2-fluororibose adenine
  modified_base 17: mod_base = cm
  modified_base 18: mod_base = um
  modified_base 19: mod_base = gm
  modified_base 20: mod_base = um
  modified_base 21: mod_base = um
  modified_base 21..22: mod_base = OTHER; note = S-phosphorothioate
  modified_base 22: mod_base = um
  modified_base 22..23: mod_base = OTHER; note = S-phosphorothioate
  modified_base 23: mod_base = um
  source 1..23: mol_type = other RNA
ttatagagcaagaacactgtttt

SEQ ID NO: 151 - RNA, 23 nt, synthetic construct
  misc_feature 1..23: note = Synthetic: WV-47126
  misc_feature 1..23: note = Synthetic: SSR-0104576
  modified_base 1: mod_base = um
  modified_base 1..2: mod_base = OTHER; note = S-phosphorothioate
  modified_base 2: mod_base = OTHER; note = 2-fluororibose uracil
  modified_base 2..3: mod_base = OTHER; note = R-phosphorothioate
  modified_base 3: mod_base = OTHER; note = 2-O-methylribose adenine
  modified_base 4: mod_base = um
  modified_base 5: mod_base = OTHER; note = 2-O-methylribose adenine
  modified_base 6: mod_base = OTHER; note = 2-fluororibose guanine
  modified_base 7: mod_base = OTHER; note = 2-O-methylribose adenine
  modified_base 8: mod_base = gm
  modified_base 9: mod_base = cm
  modified_base 9..10: mod_base = OTHER; note S-N-(1,3-dimethylimidazolidin-2-ylidene)phosphoramidate
  modified_base 10: mod_base = OTHER; note = 2-fluororibose adenine
  modified_base 11: mod_base = OTHER; note = 2-O-methylribose adenine
  modified_base 12: mod_base = gm
  modified_base 13: mod_base = OTHER; note = 2-O-methylribose adenine
  modified_base 14: mod_base = OTHER; note = 2-fluororibose adenine
  modified_base 15: mod_base = cm
  modified_base 16: mod_base = OTHER; note = 2-fluororibose adenine
  modified_base 17: mod_base = cm
  modified_base 18: mod_base = um
  modified_base 19: mod_base = gm
  modified_base 20: mod_base = um
  modified_base 21: mod_base = um
  modified_base 21..22: mod_base = OTHER; note = S-phosphorothioate
  modified_base 22: mod_base = um
  modified_base 22..23: mod_base = OTHER; note = S-phosphorothioate
  modified_base 23: mod_base = um
  source 1..23: mol_type = other RNA
ttatagagcaagaacactgtttt

SEQ ID NO: 152 - RNA, 23 nt, synthetic construct
  misc_feature 1..23: note = Synthetic: WV-47127
  misc_feature 1..23: note = Synthetic: SSR-0104581
  modified_base 1: mod_base = um
  modified_base 1..2: mod_base = OTHER; note = S-phosphorothioate
  modified_base 2: mod_base = OTHER; note = 2-fluororibose uracil
  modified_base 2..3: mod_base = OTHER; note = R-phosphorothioate
  modified_base 3: mod_base = OTHER; note = 2-O-methylribose adenine
  modified_base 4: mod_base = um
  modified_base 5: mod_base = OTHER; note = 2-O-methylribose adenine
  modified_base 6: mod_base = OTHER; note = 2-fluororibose guanine
  modified_base 7: mod_base = OTHER; note = 2-O-methylribose adenine
  modified_base 8: mod_base = gm
  modified_base 9: mod_base = cm
  modified_base 10: mod_base = OTHER; note = 2-O-methylribose adenine
  modified_base 10..11: mod_base = OTHER; note S-N-(1,3-dimethylimidazolidin-2-ylidene)phosphoramidate
  modified_base 11: mod_base = OTHER; note = 2-fluororibose adenine
  modified_base 12: mod_base = gm
  modified_base 13: mod_base = OTHER; note = 2-O-methylribose adenine
  modified_base 14: mod_base = OTHER; note = 2-fluororibose adenine
  modified_base 15: mod_base = cm
  modified_base 16: mod_base = OTHER; note = 2-fluororibose adenine
  modified_base 17: mod_base = cm
  modified_base 18: mod_base = um
  modified_base 19: mod_base = gm
  modified_base 20: mod_base = um
  modified_base 21: mod_base = um
  modified_base 21..22: mod_base = OTHER; note = S-phosphorothioate
  modified_base 22: mod_base = um
  modified_base 22..23: mod_base = OTHER; note = S-phosphorothioate
  modified_base 23: mod_base = um
  source 1..23: mol_type = other RNA
ttatagagcaagaacactgtttt

SEQ ID NO: 153 - RNA, 23 nt, synthetic construct
  misc_feature 1..23: note = Synthetic: WV-47128
  misc_feature 1..23: note = Synthetic: SSR-0104588
  modified_base 1: mod_base = um
  modified_base 1..2: mod_base = OTHER; note = S-phosphorothioate
  modified_base 2: mod_base = OTHER; note = 2-fluororibose uracil
  modified_base 2..3: mod_base = OTHER; note = R-phosphorothioate
  modified_base 3: mod_base = OTHER; note = 2-O-methylribose adenine
  modified_base 4: mod_base = um
  modified_base 5: mod_base = OTHER; note = 2-O-methylribose adenine
  modified_base 6: mod_base = OTHER; note = 2-fluororibose guanine
  modified_base 7: mod_base = OTHER; note = 2-O-methylribose adenine
  modified_base 8: mod_base = gm
  modified_base 9: mod_base = cm
  modified_base 10: mod_base = OTHER; note = 2-O-methylribose adenine
  modified_base 11: mod_base = OTHER; note = 2-O-methylribose adenine
  modified_base 11..12: mod_base = OTHER; note S-N-(1,3-dimethylimidazolidin-2-ylidene)phosphoramidate
  modified_base 12: mod_base = OTHER; note = 2-fluororibose guanine
  modified_base 13: mod_base = OTHER; note = 2-O-methylribose adenine
  modified_base 14: mod_base = OTHER; note = 2-fluororibose adenine
  modified_base 15: mod_base = cm
  modified_base 16: mod_base = OTHER; note = 2-fluororibose adenine
  modified_base 17: mod_base = cm
  modified_base 18: mod_base = um
  modified_base 19: mod_base = gm
  modified_base 20: mod_base = um
  modified_base 21: mod_base = um
  modified_base 21..22: mod_base = OTHER; note = S-phosphorothioate
  modified_base 22: mod_base = um
  modified_base 22..23: mod_base = OTHER; note = S-phosphorothioate
  modified_base 23: mod_base = um
  source 1..23: mol_type = other RNA
ttatagagcaagaacactgtttt

SEQ ID NO: 154 - RNA, 23 nt, synthetic construct
  misc_feature 1..23: note = Synthetic: WV-47129
  misc_feature 1..23: note = Synthetic: SSR-0104592
  modified_base 1: mod_base = um
  modified_base 1..2: mod_base = OTHER; note = S-phosphorothioate
  modified_base 2: mod_base = OTHER; note = 2-fluororibose uracil
  modified_base 2..3: mod_base = OTHER; note = R-phosphorothioate
  modified_base 3: mod_base = OTHER; note = 2-O-methylribose adenine
  modified_base 4: mod_base = um
  modified_base 5: mod_base = OTHER; note = 2-O-methylribose adenine
  modified_base 6: mod_base = OTHER; note = 2-fluororibose guanine
  modified_base 7: mod_base = OTHER; note = 2-O-methylribose adenine
  modified_base 8: mod_base = gm
  modified_base 9: mod_base = cm
  modified_base 10: mod_base = OTHER; note = 2-O-methylribose adenine
  modified_base 11: mod_base = OTHER; note = 2-O-methylribose adenine
  modified_base 12: mod_base = gm
  modified_base 12..13: mod_base = OTHER; note S-N-(1,3-dimethylimidazolidin-2-ylidene)phosphoramidate
  modified_base 13: mod_base = OTHER; note = 2-fluororibose adenine
  modified_base 14: mod_base = OTHER; note = 2-fluororibose adenine
  modified_base 15: mod_base = cm
  modified_base 16: mod_base = OTHER; note = 2-fluororibose adenine
  modified_base 17: mod_base = cm
  modified_base 18: mod_base = um
  modified_base 19: mod_base = gm
  modified_base 20: mod_base = um
  modified_base 21: mod_base = um
  modified_base 21..22: mod_base = OTHER; note = S-phosphorothioate
  modified_base 22: mod_base = um
  modified_base 22..23: mod_base = OTHER; note = S-phosphorothioate
  modified_base 23: mod_base = um
  source 1..23: mol_type = other RNA
ttatagagcaagaacactgtttt

SEQ ID NO: 155 - RNA, 23 nt, synthetic construct
  misc_feature 1..23: note = Synthetic: WV-47130
  misc_feature 1..23: note = Synthetic: SSR-0104598
  modified_base 1: mod_base = um
  modified_base 1..2: mod_base = OTHER; note = S-phosphorothioate
  modified_base 2: mod_base = OTHER; note = 2-fluororibose uracil
  modified_base 2..3: mod_base = OTHER; note = R-phosphorothioate
  modified_base 3: mod_base = OTHER; note = 2-O-methylribose adenine
  modified_base 4: mod_base = um
  modified_base 5: mod_base = OTHER; note = 2-O-methylribose adenine
  modified_base 6: mod_base = OTHER; note = 2-fluororibose guanine
  modified_base 7: mod_base = OTHER; note = 2-O-methylribose adenine
  modified_base 8: mod_base = gm
  modified_base 9: mod_base = cm
  modified_base 10: mod_base = OTHER; note = 2-O-methylribose adenine
  modified_base 11: mod_base = OTHER; note = 2-O-methylribose adenine
  modified_base 12: mod_base = gm
  modified_base 13: mod_base = OTHER; note = 2-O-methylribose adenine
  modified_base 14: mod_base = OTHER; note = 2-fluororibose adenine
  modified_base 14..15: mod_base = OTHER; note S-N-(1,3-dimethylimidazolidin-2-ylidene)phosphoramidate
  modified_base 15: mod_base = OTHER; note = 2-fluororibose cytosine
  modified_base 16: mod_base = OTHER; note = 2-fluororibose adenine
  modified_base 17: mod_base = cm
  modified_base 18: mod_base = um
  modified_base 19: mod_base = gm
  modified_base 20: mod_base = um
  modified_base 21: mod_base = um
  modified_base 21..22: mod_base = OTHER; note = S-phosphorothioate
  modified_base 22: mod_base = um
  modified_base 22..23: mod_base = OTHER; note = S-phosphorothioate
  modified_base 23: mod_base = um
  source 1..23: mol_type = other RNA
ttatagagcaagaacactgtttt

SEQ ID NO: 156 - RNA, 23 nt, synthetic construct
  misc_feature 1..23: note = Synthetic: WV-47131
  misc_feature 1..23: note = Synthetic: SSR-0104604
  modified_base 1: mod_base = um
  modified_base 1..2: mod_base = OTHER; note = S-phosphorothioate
  modified_base 2: mod_base = OTHER; note = 2-fluororibose uracil
  modified_base 2..3: mod_base = OTHER; note = R-phosphorothioate
  modified_base 3: mod_base = OTHER; note = 2-O-methylribose adenine
  modified_base 4: mod_base = um
  modified_base 5: mod_base = OTHER; note = 2-O-methylribose adenine
  modified_base 6: mod_base = OTHER; note = 2-fluororibose guanine
  modified_base 7: mod_base = OTHER; note = 2-O-methylribose adenine
  modified_base 8: mod_base = gm
  modified_base 9: mod_base = cm
  modified_base 10: mod_base = OTHER; note = 2-O-methylribose adenine
  modified_base 11: mod_base = OTHER; note = 2-O-methylribose adenine
  modified_base 12: mod_base = gm
  modified_base 13: mod_base = OTHER; note = 2-O-methylribose adenine
  modified_base 14: mod_base = OTHER; note = 2-fluororibose adenine
  modified_base 15: mod_base = cm
  modified_base 16: mod_base = OTHER; note = 2-fluororibose adenine
  modified_base 16..17: mod_base = OTHER; note S-N-(1,3-dimethylimidazolidin-2-ylidene)phosphoramidate
  modified_base 17: mod_base = OTHER; note = 2-fluororibose cytosine
  modified_base 18: mod_base = um
  modified_base 19: mod_base = gm
  modified_base 20: mod_base = um
  modified_base 21: mod_base = um
  modified_base 21..22: mod_base = OTHER; note = S-phosphorothioate
  modified_base 22: mod_base = um
  modified_base 22..23: mod_base = OTHER; note = S-phosphorothioate
  modified_base 23: mod_base = um
  source 1..23: mol_type = other RNA
ttatagagcaagaacactgtttt

SEQ ID NO: 157 - RNA, 23 nt, synthetic construct
  misc_feature 1..23: note = Synthetic: WV-47132
  misc_feature 1..23: note = Synthetic: SSR-0104608
  modified_base 1: mod_base = um
  modified_base 1..2: mod_base = OTHER; note = S-phosphorothioate
  modified_base 2: mod_base = OTHER; note = 2-fluororibose uracil
  modified_base 2..3: mod_base = OTHER; note = R-phosphorothioate
  modified_base 3: mod_base = OTHER; note = 2-O-methylribose adenine
  modified_base 4: mod_base = um
  modified_base 5: mod_base = OTHER; note = 2-O-methylribose adenine
  modified_base 6: mod_base = OTHER; note = 2-fluororibose guanine
  modified_base 7: mod_base = OTHER; note = 2-O-methylribose adenine
  modified_base 8: mod_base = gm
  modified_base 9: mod_base = cm
  modified_base 10: mod_base = OTHER; note = 2-O-methylribose adenine
  modified_base 11: mod_base = OTHER; note = 2-O-methylribose adenine
  modified_base 12: mod_base = gm
  modified_base 13: mod_base = OTHER; note = 2-O-methylribose adenine
  modified_base 14: mod_base = OTHER; note = 2-fluororibose adenine
  modified_base 15: mod_base = cm
  modified_base 16: mod_base = OTHER; note = 2-fluororibose adenine
  modified_base 17: mod_base = cm
  modified_base 17..18: mod_base = OTHER; note S-N-(1,3-dimethylimidazolidin-2-ylidene)phosphoramidate
  modified_base 18: mod_base = OTHER; note = 2-fluororibose uracil
  modified_base 19: mod_base = gm
  modified_base 20: mod_base = um
  modified_base 21: mod_base = um
  modified_base 21..22: mod_base = OTHER; note = S-phosphorothioate
  modified_base 22: mod_base = um
  modified_base 22..23: mod_base = OTHER; note = S-phosphorothioate
  modified_base 23: mod_base = um
  source 1..23: mol_type = other RNA
ttatagagcaagaacactgtttt

SEQ ID NO: 158 - RNA, 23 nt, synthetic construct
  misc_feature 1..23: note = Synthetic: WV-47133
  misc_feature 1..23: note = Synthetic: SSR-0104612
  modified_base 1: mod_base = um
  modified_base 1..2: mod_base = OTHER; note = S-phosphorothioate
  modified_base 2: mod_base = OTHER; note = 2-fluororibose uracil
  modified_base 2..3: mod_base = OTHER; note = R-phosphorothioate
  modified_base 3: mod_base = OTHER; note = 2-O-methylribose adenine
  modified_base 4: mod_base = um
  modified_base 5: mod_base = OTHER; note = 2-O-methylribose adenine
  modified_base 6: mod_base = OTHER; note = 2-fluororibose guanine
  modified_base 7: mod_base = OTHER; note = 2-O-methylribose adenine
  modified_base 8: mod_base = gm
  modified_base 9: mod_base = cm
  modified_base 10: mod_base = OTHER; note = 2-O-methylribose adenine
  modified_base 11: mod_base = OTHER; note = 2-O-methylribose adenine
  modified_base 12: mod_base = gm
  modified_base 13: mod_base = OTHER; note = 2-O-methylribose adenine
  modified_base 14: mod_base = OTHER; note = 2-fluororibose adenine
  modified_base 15: mod_base = cm
  modified_base 16: mod_base = OTHER; note = 2-fluororibose adenine
  modified_base 17: mod_base = cm
  modified_base 18: mod_base = um
  modified_base 18..19: mod_base = OTHER; note S-N-(1,3-dimethylimidazolidin-2-ylidene)phosphoramidate
  modified_base 19: mod_base = OTHER; note = 2-fluororibose guanine
  modified_base 20: mod_base = um
  modified_base 21: mod_base = um
  modified_base 21..22: mod_base = OTHER; note = S-phosphorothioate
  modified_base 22: mod_base = um
  modified_base 22..23: mod_base = OTHER; note = S-phosphorothioate
  modified_base 23: mod_base = um
  source 1..23: mol_type = other RNA
ttatagagcaagaacactgtttt

SEQ ID NO: 159 - RNA, 23 nt, synthetic construct
  misc_feature 1..23: note = Synthetic: WV-47134
  misc_feature 1..23: note = Synthetic: SSR-0104616
  modified_base 1: mod_base = um
  modified_base 1..2: mod_base = OTHER; note = S-phosphorothioate
  modified_base 2: mod_base = OTHER; note = 2-fluororibose uracil
  modified_base 2..3: mod_base = OTHER; note = R-phosphorothioate
  modified_base 3: mod_base = OTHER; note = 2-O-methylribose adenine
  modified_base 4: mod_base = um
  modified_base 5: mod_base = OTHER; note = 2-O-methylribose adenine
  modified_base 6: mod_base = OTHER; note = 2-fluororibose guanine
  modified_base 7: mod_base = OTHER; note = 2-O-methylribose adenine
  modified_base 8: mod_base = gm
  modified_base 9: mod_base = cm
  modified_base 10: mod_base = OTHER; note = 2-O-methylribose adenine
  modified_base 11: mod_base = OTHER; note = 2-O-methylribose adenine
  modified_base 12: mod_base = gm
  modified_base 13: mod_base = OTHER; note = 2-O-methylribose adenine
  modified_base 14: mod_base = OTHER; note = 2-fluororibose adenine
  modified_base 15: mod_base = cm
  modified_base 16: mod_base = OTHER; note = 2-fluororibose adenine
  modified_base 17: mod_base = cm
  modified_base 18: mod_base = um
  modified_base 19: mod_base = gm
  modified_base 19..20: mod_base = OTHER; note S-N-(1,3-dimethylimidazolidin-2-ylidene)phosphoramidate
  modified_base 20: mod_base = OTHER; note = 2-fluororibose uracil
  modified_base 21: mod_base = um
  modified_base 21..22: mod_base = OTHER; note = S-phosphorothioate
  modified_base 22: mod_base = um
  modified_base 22..23: mod_base = OTHER; note = S-phosphorothioate
  modified_base 23: mod_base = um
  source 1..23: mol_type = other RNA
ttatagagcaagaacactgtttt

SEQ ID NO: 160 - RNA, 23 nt, synthetic construct
  misc_feature 1..23: note = Synthetic: WV-47135
  misc_feature 1..23: note = Synthetic: SSR-0104620
  modified_base 1: mod_base = um
  modified_base 1..2: mod_base = OTHER; note = S-phosphorothioate
  modified_base 2: mod_base = OTHER; note = 2-fluororibose uracil
  modified_base 2..3: mod_base = OTHER; note = R-phosphorothioate
  modified_base 3: mod_base = OTHER; note = 2-O-methylribose adenine
  modified_base 4: mod_base = um
  modified_base 5: mod_base = OTHER; note = 2-O-methylribose adenine
  modified_base 6: mod_base = OTHER; note = 2-fluororibose guanine
  modified_base 7: mod_base = OTHER; note = 2-O-methylribose adenine
  modified_base 8: mod_base = gm
  modified_base 9: mod_base = cm
  modified_base 10: mod_base = OTHER; note = 2-O-methylribose adenine
  modified_base 11: mod_base = OTHER; note = 2-O-methylribose adenine
  modified_base 12: mod_base = gm
  modified_base 13: mod_base = OTHER; note = 2-O-methylribose adenine
  modified_base 14: mod_base = OTHER; note = 2-fluororibose adenine
  modified_base 15: mod_base = cm
  modified_base 16: mod_base = OTHER; note = 2-fluororibose adenine
  modified_base 17: mod_base = cm
  modified_base 18: mod_base = um
  modified_base 19: mod_base = gm
  modified_base 20: mod_base = um
  modified_base 20..21: mod_base = OTHER; note S-N-(1,3-dimethylimidazolidin-2-ylidene)phosphoramidate
  modified_base 21: mod_base = OTHER; note = 2-fluororibose uracil
  modified_base 21..22: mod_base = OTHER; note = S-phosphorothioate
  modified_base 22: mod_base = um
  modified_base 22..23: mod_base = OTHER; note = S-phosphorothioate
  modified_base 23: mod_base = um
  source 1..23: mol_type = other RNA
ttatagagcaagaacactgtttt

SEQ ID NO: 161 - RNA, 23 nt, synthetic construct
  misc_feature 1..23: note = Synthetic: WV-47136
  misc_feature 1..23: note = Synthetic: SSR-0104629
  modified_base 1: mod_base = um
  modified_base 1..2: mod_base = OTHER; note = S-phosphorothioate
  modified_base 2: mod_base = OTHER; note = 2-fluororibose uracil
  modified_base 2..3: mod_base = OTHER; note = R-phosphorothioate
  modified_base 3: mod_base = OTHER; note = 2-O-methylribose adenine
  modified_base 4: mod_base = um
  modified_base 5: mod_base = OTHER; note = 2-O-methylribose adenine
  modified_base 6: mod_base = OTHER; note = 2-fluororibose guanine
  modified_base 7: mod_base = OTHER; note = 2-O-methylribose adenine
  modified_base 8: mod_base = gm
  modified_base 9: mod_base = cm
  modified_base 10: mod_base = OTHER; note = 2-O-methylribose adenine
  modified_base 11: mod_base = OTHER; note = 2-O-methylribose adenine
  modified_base 12: mod_base = gm
  modified_base 13: mod_base = OTHER; note = 2-O-methylribose adenine
  modified_base 14: mod_base = OTHER; note = 2-fluororibose adenine
  modified_base 15: mod_base = cm
  modified_base 16: mod_base = OTHER; note = 2-fluororibose adenine
  modified_base 17: mod_base = cm
  modified_base 18: mod_base = um
  modified_base 19: mod_base = gm
  modified_base 20: mod_base = um
  modified_base 21: mod_base = um
  modified_base 21..22: mod_base = OTHER; note S-N-(1,3-dimethylimidazolidin-2-ylidene)phosphoramidate
  modified_base 22: mod_base = OTHER; note = 2-fluororibose uracil
  modified_base 22..23: mod_base = OTHER; note = S-phosphorothioate
  modified_base 23: mod_base = um
  source 1..23: mol_type = other RNA
ttatagagcaagaacactgtttt

SEQ ID NO: 162 - RNA, 23 nt, synthetic construct
  misc_feature 1..23: note = Synthetic: WV-47137
  misc_feature 1..23: note = Synthetic: SSR-0104625
  modified_base 1: mod_base = um
  modified_base 1..2: mod_base = OTHER; note = S-phosphorothioate
  modified_base 2: mod_base = OTHER; note = 2-fluororibose uracil
  modified_base 2..3: mod_base = OTHER; note = R-phosphorothioate
  modified_base 3: mod_base = OTHER; note = 2-O-methylribose adenine
  modified_base 4: mod_base = um
  modified_base 5: mod_base = OTHER; note = 2-O-methylribose adenine
  modified_base 6: mod_base = OTHER; note = 2-fluororibose guanine
  modified_base 7: mod_base = OTHER; note = 2-O-methylribose adenine
  modified_base 8: mod_base = gm
  modified_base 9: mod_base = cm
  modified_base 10: mod_base = OTHER; note = 2-O-methylribose adenine
  modified_base 11: mod_base = OTHER; note = 2-O-methylribose adenine
  modified_base 12: mod_base = gm
  modified_base 13: mod_base = OTHER; note = 2-O-methylribose adenine
  modified_base 14: mod_base = OTHER; note = 2-fluororibose adenine
  modified_base 15: mod_base = cm
  modified_base 16: mod_base = OTHER; note = 2-fluororibose adenine
  modified_base 17: mod_base = cm
  modified_base 18: mod_base = um
  modified_base 19: mod_base = gm
  modified_base 20: mod_base = um
  modified_base 21: mod_base = um
  modified_base 21..22: mod_base = OTHER; note = S-phosphorothioate
  modified_base 22: mod_base = um
  modified_base 22..23: mod_base = OTHER; note S-N-(1,3-dimethylimidazolidin-2-ylidene)phosphoramidate
  modified_base 23: mod_base = OTHER; note = 2-fluororibose uracil
  source 1..23: mol_type = other RNA
ttatagagcaagaacactgtttt

SEQ ID NO: 163 - RNA, 23 nt, synthetic construct
  misc_feature 1..23: note = Synthetic: WV-41826
  misc_feature 1..23: note = Synthetic: SSR-0104720
  modified_base 1: mod_base = um
  modified_base 1..2: mod_base = OTHER; note = phosphorothioate
  modified_base 2: mod_base = OTHER; note = 2-fluororibose uracil
  modified_base 2..3: mod_base = OTHER; note = phosphorothioate
  modified_base 3: mod_base = OTHER; note = 2-O-methylribose adenine
  modified_base 4: mod_base = um
  modified_base 5: mod_base = OTHER; note = 2-O-methylribose adenine
  modified_base 6: mod_base = OTHER; note = 2-fluororibose guanine
  modified_base 7: mod_base = OTHER; note = 2-O-methylribose adenine
  modified_base 8: mod_base = gm
  modified_base 9: mod_base = cm
  modified_base 10: mod_base = OTHER; note = 2-O-methylribose adenine
  modified_base 11: mod_base = OTHER; note = 2-O-methylribose adenine
  modified_base 12: mod_base = gm
  modified_base 13: mod_base = OTHER; note = 2-O-methylribose adenine
  modified_base 14: mod_base = OTHER; note = 2-fluororibose adenine
  modified_base 15: mod_base = cm
  modified_base 16: mod_base = OTHER; note = 2-fluororibose adenine
  modified_base 17: mod_base = cm
  modified_base 18: mod_base = um
  modified_base 19: mod_base = gm
  modified_base 20: mod_base = um
  modified_base 21: mod_base = um
  modified_base 21..22: mod_base = OTHER; note = phosphorothioate
  modified_base 22: mod_base = um
  modified_base 22..23: mod_base = OTHER; note = phosphorothioate
  modified_base 23: mod_base = um
  source 1..23: mol_type = other RNA
ttatagagcaagaacactgtttt

SEQ ID NO: 164 - RNA, 21 nt, synthetic construct
  misc_feature 1..21: note = Synthetic: WV-41828
  misc_feature 1..21: note = Synthetic: SSR-0101596
  modified_base 1: mod_base = OTHER; note = triantennary GalNAc with C12 linker linked to 6-aminohexanol linked by phosphate to the 5' end of 2-O-methylribose adenine
  modified_base 1..2: mod_base = OTHER; note = phosphorothioate
  modified_base 2: mod_base = OTHER; note = 2-O-methylribose adenine
  modified_base 3: mod_base = cm
  modified_base 4: mod_base = OTHER; note = 2-O-methylribose adenine
  modified_base 5: mod_base = gm
  modified_base 6: mod_base = um
  modified_base 7: mod_base = OTHER; note = 2-fluororibose guanine
  modified_base 8: mod_base = um
  modified_base 9: mod_base = OTHER; note = 2-fluororibose uracil
  modified_base 10: mod_base = OTHER; note = 2-fluororibose cytosine
  modified_base 11: mod_base = OTHER; note = 2-fluororibose uracil
  modified_base 12: mod_base = um
  modified_base 13: mod_base = gm
  modified_base 14: mod_base = cm
  modified_base 15: mod_base = um
  modified_base 16: mod_base = cm
  modified_base 17: mod_base = um
  modified_base 18: mod_base = OTHER; note = 2-O-methylribose adenine
  modified_base 19: mod_base = um
  modified_base 20: mod_base = OTHER; note = 2-O-methylribose adenine
  modified_base 20..21: mod_base = OTHER; note = phosphorothioate
  modified_base 21: mod_base = OTHER; note = 2-O-methylribose adenine
  source 1..21: mol_type = other RNA
aacagtgttcttgctctataa

SEQ ID NO: 165 - RNA, 21 nt, synthetic construct
  source 1..21: mol_type = other RNA
aacagtgttcttgctctataa

SEQ ID NO: 166 - RNA, 23 nt, synthetic construct
  misc_feature 1..23: note = Synthetic: WV-46380
  misc_feature 1..23: note = Synthetic: SSR-0104223
  modified_base 1: mod_base = OTHER; note = deoxyribose thymine
  modified_base 1..2: mod_base = OTHER; note = S-phosphorothioate
  modified_base 2: mod_base = OTHER; note = 2-fluororibose uracil
  modified_base 2..3: mod_base = OTHER; note = R-phosphorothioate
  modified_base 3: mod_base = OTHER; note = 2-O-methylribose adenine
  modified_base 4: mod_base = um
  modified_base 5: mod_base = OTHER; note = 2-O-methylribose adenine
  modified_base 6: mod_base = OTHER; note = 2-fluororibose guanine
  modified_base 7: mod_base = OTHER; note = 2-O-methylribose adenine
  modified_base 8: mod_base = gm
  modified_base 9: mod_base = cm
  modified_base 10: mod_base = OTHER; note = 2-O-methylribose adenine
  modified_base 11: mod_base = OTHER; note = 2-O-methylribose adenine
  modified_base 12: mod_base = gm
  modified_base 13: mod_base = OTHER; note = 2-O-methylribose adenine
  modified_base 14: mod_base = OTHER; note = 2-fluororibose adenine
  modified_base 15: mod_base = cm
  modified_base 16: mod_base = OTHER; note = 2-fluororibose adenine
  modified_base 17: mod_base = cm
  modified_base 18: mod_base = um
  modified_base 19: mod_base = gm
  modified_base 20: mod_base = um
  modified_base 21: mod_base = um
  modified_base 21..22: mod_base = OTHER; note = S-phosphorothioate
  modified_base 22: mod_base = um
  modified_base 22..23: mod_base = OTHER; note = S-phosphorothioate
  modified_base 23: mod_base = um
  source 1..23: mol_type = other RNA
ttatagagcaagaacactgtttt

SEQ ID NO: 167 - RNA, 23 nt, synthetic construct
  modified_base 1: mod_base = OTHER; note = ribose thymine
  source 1..23: mol_type = other RNA
ttatagagcaagaacactgtttt

SEQ ID NO: 168 - RNA, 23 nt, synthetic construct
  misc_feature 1..23: note = Synthetic: WV-46381
  misc_feature 1..23: note = Synthetic: SSR-0105681
  modified_base 1: mod_base = OTHER; note = phosphate linked to the 5' end of deoxyribose thymine
  modified_base 1..2: mod_base = OTHER; note = S-phosphorothioate
  modified_base 2: mod_base = OTHER; note = 2-fluororibose uracil
  modified_base 2..3: mod_base = OTHER; note = R-phosphorothioate
  modified_base 3: mod_base = OTHER; note = 2-O-methylribose adenine
  modified_base 4: mod_base = um
  modified_base 5: mod_base = OTHER; note = 2-O-methylribose adenine
  modified_base 6: mod_base = OTHER; note = 2-fluororibose guanine
  modified_base 7: mod_base = OTHER; note = 2-O-methylribose adenine
  modified_base 8: mod_base = gm
  modified_base 9: mod_base = cm
  modified_base 10: mod_base = OTHER; note = 2-O-methylribose adenine
  modified_base 11: mod_base = OTHER; note = 2-O-methylribose adenine
  modified_base 12: mod_base = gm
  modified_base 13: mod_base = OTHER; note = 2-O-methylribose adenine
  modified_base 14: mod_base = OTHER; note = 2-fluororibose adenine
  modified_base 15: mod_base = cm
  modified_base 16: mod_base = OTHER; note = 2-fluororibose adenine
  modified_base 17: mod_base = cm
  modified_base 18: mod_base = um
  modified_base 19: mod_base = gm
  modified_base 20: mod_base = um
  modified_base 21: mod_base = um
  modified_base 21..22: mod_base = OTHER; note = S-phosphorothioate
  modified_base 22: mod_base = um
  modified_base 22..23: mod_base = OTHER; note = S-phosphorothioate
  modified_base 23: mod_base = um
  source 1..23: mol_type = other RNA
ttatagagcaagaacactgtttt

SEQ ID NO: 169 - RNA, 23 nt, synthetic construct
  misc_feature 1..23: note = Synthetic: WV-46382
  misc_feature 1..23: note = Synthetic: SSR-0105673
  modified_base 1: mod_base = OTHER; note = phosphate linked to the 5' end of S-5-methyl-deoxyribose thymine
  modified_base 1..2: mod_base = OTHER; note = S-phosphorothioate
  modified_base 2: mod_base = OTHER; note = 2-fluororibose uracil
  modified_base 2..3: mod_base = OTHER; note = R-phosphorothioate
  modified_base 3: mod_base = OTHER; note = 2-O-methylribose adenine
  modified_base 4: mod_base = um
  modified_base 5: mod_base = OTHER; note = 2-O-methylribose adenine
  modified_base 6: mod_base = OTHER; note = 2-fluororibose guanine
  modified_base 7: mod_base = OTHER; note = 2-O-methylribose adenine
  modified_base 8: mod_base = gm
  modified_base 9: mod_base = cm
  modified_base 10: mod_base = OTHER; note = 2-O-methylribose adenine
  modified_base 11: mod_base = OTHER; note = 2-O-methylribose adenine
  modified_base 12: mod_base = gm
  modified_base 13: mod_base = OTHER; note = 2-O-methylribose adenine
  modified_base 14: mod_base = OTHER; note = 2-fluororibose adenine
  modified_base 15: mod_base = cm
  modified_base 16: mod_base = OTHER; note = 2-fluororibose adenine
  modified_base 17: mod_base = cm
  modified_base 18: mod_base = um
  modified_base 19: mod_base = gm
  modified_base 20: mod_base = um
  modified_base 21: mod_base = um
  modified_base 21..22: mod_base = OTHER; note = S-phosphorothioate
  modified_base 22: mod_base = um
  modified_base 22..23: mod_base = OTHER; note = S-phosphorothioate
  modified_base 23: mod_base = um
  source 1..23: mol_type = other RNA
ttatagagcaagaacactgtttt

SEQ ID NO: 170 - RNA, 23 nt, synthetic construct
  misc_feature 1..23: note = Synthetic: WV-46383
  misc_feature 1..23: note = Synthetic: SSR-0105665
  modified_base 1: mod_base = OTHER; note = phosphate linked to the 5' end of R-5-methyl-deoxyribose thymine
  modified_base 1..2: mod_base = OTHER; note = S-phosphorothioate
  modified_base 2: mod_base = OTHER; note = 2-fluororibose uracil
  modified_base 2..3: mod_base = OTHER; note = R-phosphorothioate
  modified_base 3: mod_base = OTHER; note = 2-O-methylribose adenine
  modified_base 4: mod_base = um
  modified_base 5: mod_base = OTHER; note = 2-O-methylribose adenine
  modified_base 6: mod_base = OTHER; note = 2-fluororibose guanine
  modified_base 7: mod_base = OTHER; note = 2-O-methylribose adenine
  modified_base 8: mod_base = gm
  modified_base 9: mod_base = cm
  modified_base 10: mod_base = OTHER; note = 2-O-methylribose adenine
  modified_base 11: mod_base = OTHER; note = 2-O-methylribose adenine
  modified_base 12: mod_base = gm
  modified_base 13: mod_base = OTHER; note = 2-O-methylribose adenine
  modified_base 14: mod_base = OTHER; note = 2-fluororibose adenine
  modified_base 15: mod_base = cm
  modified_base 16: mod_base = OTHER; note = 2-fluororibose adenine
  modified_base 17: mod_base = cm
  modified_base 18: mod_base = um
  modified_base 19: mod_base = gm
  modified_base 20: mod_base = um
  modified_base 21: mod_base = um
  modified_base 21..22: mod_base = OTHER; note = S-phosphorothioate
  modified_base 22: mod_base = um
  modified_base 22..23: mod_base = OTHER; note = S-phosphorothioate
  modified_base 23: mod_base = um
  source 1..23: mol_type = other RNA
ttatagagcaagaacactgtttt

SEQ ID NO: 171 - RNA, 23 nt, synthetic construct
  misc_feature 1..23: note = Synthetic: WV-46384
  misc_feature 1..23: note = Synthetic: SSR-0104215
  modified_base 1: mod_base = OTHER; note = 5-(E)-vinylphosphonate-2,5-deoxyribose thymine
  modified_base 1..2: mod_base = OTHER; note = S-phosphorothioate
  modified_base 2: mod_base = OTHER; note = 2-fluororibose uracil
  modified_base 2..3: mod_base = OTHER; note = R-phosphorothioate
  modified_base 3: mod_base = OTHER; note = 2-O-methylribose adenine
  modified_base 4: mod_base = um
  modified_base 5: mod_base = OTHER; note = 2-O-methylribose adenine
  modified_base 6: mod_base = OTHER; note = 2-fluororibose guanine
  modified_base 7: mod_base = OTHER; note = 2-O-methylribose adenine
  modified_base 8: mod_base = gm
  modified_base 9: mod_base = cm
  modified_base 10: mod_base = OTHER; note = 2-O-methylribose adenine
  modified_base 11: mod_base = OTHER; note = 2-O-methylribose adenine
  modified_base 12: mod_base = gm
  modified_base 13: mod_base = OTHER; note = 2-O-methylribose adenine
  modified_base 14: mod_base = OTHER; note = 2-fluororibose adenine
  modified_base 15: mod_base = cm
  modified_base 16: mod_base = OTHER; note = 2-fluororibose adenine
  modified_base 17: mod_base = cm
  modified_base 18: mod_base = um
  modified_base 19: mod_base = gm
  modified_base 20: mod_base = um
  modified_base 21: mod_base = um
  modified_base 21..22: mod_base = OTHER; note = S-phosphorothioate
  modified_base 22: mod_base = um
  modified_base 22..23: mod_base = OTHER; note = S-phosphorothioate
  modified_base 23: mod_base = um
  source 1..23: mol_type = other RNA
ttatagagcaagaacactgtttt

SEQ ID NO: 172 - RNA, 23 nt, synthetic construct
  misc_feature 1..23: note = Synthetic: WV-46385
  misc_feature 1..23: note = Synthetic: SSR-0104199
  modified_base 1: mod_base = OTHER; note = 5-(S)-methyl-2,5-deoxyribose thymine
  modified_base 1..2: mod_base = OTHER; note = S-phosphorothioate
  modified_base 2: mod_base = OTHER; note = 2-fluororibose uracil
  modified_base 2..3: mod_base = OTHER; note = R-phosphorothioate
  modified_base 3: mod_base = OTHER; note = 2-O-methylribose adenine
  modified_base 4: mod_base = um
  modified_base 5: mod_base = OTHER; note = 2-O-methylribose adenine
  modified_base 6: mod_base = OTHER; note = 2-fluororibose guanine
  modified_base 7: mod_base = OTHER; note = 2-O-methylribose adenine
  modified_base 8: mod_base = gm
  modified_base 9: mod_base = cm
  modified_base 10: mod_base = OTHER; note = 2-O-methylribose adenine
  modified_base 11: mod_base = OTHER; note = 2-O-methylribose adenine
  modified_base 12: mod_base = gm
  modified_base 13: mod_base = OTHER; note = 2-O-methylribose adenine
  modified_base 14: mod_base = OTHER; note = 2-fluororibose adenine
  modified_base 15: mod_base = cm
  modified_base 16: mod_base = OTHER; note = 2-fluororibose adenine
  modified_base 17: mod_base = cm
  modified_base 18: mod_base = um
  modified_base 19: mod_base = gm
  modified_base 20: mod_base = um
  modified_base 21: mod_base = um
  modified_base 21..22: mod_base = OTHER; note = S-phosphorothioate
  modified_base 22: mod_base = um
  modified_base 22..23: mod_base = OTHER; note = S-phosphorothioate
  modified_base 23: mod_base = um
  source 1..23: mol_type = other RNA
ttatagagcaagaacactgtttt

SEQ ID NO: 173 - RNA, 23 nt, synthetic construct
  misc_feature 1..23: note = Synthetic: WV-46386
  misc_feature 1..23: note = Synthetic: SSR-0104185
  modified_base 1: mod_base = OTHER; note = 5-(R)-methyl-2,5-deoxyribose thymine
  modified_base 1..2: mod_base = OTHER; note = S-phosphorothioate
  modified_base 2: mod_base = OTHER; note = 2-fluororibose uracil
  modified_base 2..3: mod_base = OTHER; note = R-phosphorothioate
  modified_base 3: mod_base = OTHER; note = 2-O-methylribose adenine
  modified_base 4: mod_base = um
  modified_base 5: mod_base = OTHER; note = 2-O-methylribose adenine
  modified_base 6: mod_base = OTHER; note = 2-fluororibose guanine
  modified_base 7: mod_base = OTHER; note = 2-O-methylribose adenine
  modified_base 8: mod_base = gm
  modified_base 9: mod_base = cm
  modified_base 10: mod_base = OTHER; note = 2-O-methylribose adenine
  modified_base 11: mod_base = OTHER; note = 2-O-methylribose adenine
  modified_base 12: mod_base = gm
  modified_base 13: mod_base = OTHER; note = 2-O-methylribose adenine
  modified_base 14: mod_base = OTHER; note = 2-fluororibose adenine
  modified_base 15: mod_base = cm
  modified_base 16: mod_base = OTHER; note = 2-fluororibose adenine
  modified_base 17: mod_base = cm
  modified_base 18: mod_base = um
  modified_base 19: mod_base = gm
  modified_base 20: mod_base = um
  modified_base 21: mod_base = um
  modified_base 21..22: mod_base = OTHER; note = S-phosphorothioate
  modified_base 22: mod_base = um
  modified_base 22..23: mod_base = OTHER; note = S-phosphorothioate
  modified_base 23: mod_base = um
  source 1..23: mol_type = other RNA
ttatagagcaagaacactgtttt

SEQ ID NO: 174 - RNA, 23 nt, synthetic construct
  misc_feature 1..23: note = Synthetic: WV-42079
  misc_feature 1..23: note = Synthetic: SSR-0104484
  modified_base 1: mod_base = um
  modified_base 1..2: mod_base = OTHER; note = S-phosphorothioate
  modified_base 2: mod_base = OTHER; note = 2-fluororibose uracil
  modified_base 2..3: mod_base = OTHER; note = R-phosphorothioate
  modified_base 3: mod_base = OTHER; note = 2-O-methylribose adenine
  modified_base 3..4: mod_base = OTHER; note S-N-(1,3-dimethylimidazolidin-2-ylidene)phosphoramidate
  modified_base 4: mod_base = um
  modified_base 5: mod_base = OTHER; note = 2-O-methylribose adenine
  modified_base 6: mod_base = OTHER; note = 2-fluororibose guanine
  modified_base 7: mod_base = OTHER; note = 2-O-methylribose adenine
  modified_base 8: mod_base = gm
  modified_base 9: mod_base = cm
  modified_base 10: mod_base = OTHER; note = 2-O-methylribose adenine
  modified_base 10..11: mod_base = OTHER; note S-N-(1,3-dimethylimidazolidin-2-ylidene)phosphoramidate
  modified_base 11: mod_base = OTHER; note = 2-O-methylribose adenine
  modified_base 12: mod_base = gm
  modified_base 13: mod_base = OTHER; note = 2-O-methylribose adenine
  modified_base 14: mod_base = OTHER; note = 2-fluororibose adenine
  modified_base 15: mod_base = cm
  modified_base 16: mod_base = OTHER; note = 2-fluororibose adenine
  modified_base 17: mod_base = cm
  modified_base 18: mod_base = um
  modified_base 19: mod_base = gm
  modified_base 19..20: mod_base = OTHER; note S-N-(1,3-dimethylimidazolidin-2-ylidene)phosphoramidate
  modified_base 20: mod_base = um
  modified_base 21: mod_base = um
  modified_base 21..22: mod_base = OTHER; note = S-phosphorothioate
  modified_base 22: mod_base = um
  modified_base 22..23: mod_base = OTHER; note = S-phosphorothioate
  modified_base 23: mod_base = um
  source 1..23: mol_type = other RNA
ttatagagcaagaacactgtttt

SEQ ID NO: 175 - RNA, 23 nt, synthetic construct
  misc_feature 1..23: note = Synthetic: WV-44434
  misc_feature 1..23: note = Synthetic: SSR-0104222
  modified_base 1: mod_base = OTHER; note = deoxyribose thymine
  modified_base 1..2: mod_base = OTHER; note = S-phosphorothioate
  modified_base 2: mod_base = OTHER; note = 2-fluororibose uracil
  modified_base 2..3: mod_base = OTHER; note = R-phosphorothioate
  modified_base 3: mod_base = OTHER; note = 2-O-methylribose adenine
  modified_base 3..4: mod_base = OTHER; note S-N-(1,3-dimethylimidazolidin-2-ylidene)phosphoramidate
  modified_base 4: mod_base = um
  modified_base 5: mod_base = OTHER; note = 2-O-methylribose adenine
  modified_base 6: mod_base = OTHER; note = 2-fluororibose guanine
  modified_base 7: mod_base = OTHER; note = 2-O-methylribose adenine
  modified_base 8: mod_base = gm
  modified_base 9: mod_base = cm
  modified_base 10: mod_base = OTHER; note = 2-O-methylribose adenine
  modified_base 10..11: mod_base = OTHER; note S-N-(1,3-dimethylimidazolidin-2-ylidene)phosphoramidate
  modified_base 11: mod_base = OTHER; note = 2-O-methylribose adenine
  modified_base 12: mod_base = gm
  modified_base 13: mod_base = OTHER; note = 2-O-methylribose adenine
  modified_base 14: mod_base = OTHER; note = 2-fluororibose adenine
  modified_base 15: mod_base = cm
  modified_base 16: mod_base = OTHER; note = 2-fluororibose adenine
  modified_base 17: mod_base = cm
  modified_base 18: mod_base = um
  modified_base 19: mod_base = gm
  modified_base 19..20: mod_base = OTHER; note S-N-(1,3-dimethylimidazolidin-2-ylidene)phosphoramidate
  modified_base 20: mod_base = um
  modified_base 21: mod_base = um
  modified_base 21..22: mod_base = OTHER; note = S-phosphorothioate
  modified_base 22: mod_base = um
  modified_base 22..23: mod_base = OTHER; note = S-phosphorothioate
  modified_base 23: mod_base = um
  source 1..23: mol_type = other RNA
ttatagagcaagaacactgtttt

SEQ ID NO: 176 - RNA, 23 nt, synthetic construct
  misc_feature 1..23: note = Synthetic: WV-44435
  misc_feature 1..23: note = Synthetic: SSR-0105680
  modified_base 1: mod_base = OTHER; note = phosphate linked to the 5' end of deoxyribose thymine
  modified_base 1..2: mod_base = OTHER; note = S-phosphorothioate
  modified_base 2: mod_base = OTHER; note = 2-fluororibose uracil
  modified_base 2..3: mod_base = OTHER; note = R-phosphorothioate
  modified_base 3: mod_base = OTHER; note = 2-O-methylribose adenine
  modified_base 3..4: mod_base = OTHER; note S-N-(1,3-dimethylimidazolidin-2-ylidene)phosphoramidate
  modified_base 4: mod_base = um
  modified_base 5: mod_base = OTHER; note = 2-O-methylribose adenine
  modified_base 6: mod_base = OTHER; note = 2-fluororibose guanine
  modified_base 7: mod_base = OTHER; note = 2-O-methylribose adenine
  modified_base 8: mod_base = gm
  modified_base 9: mod_base = cm
  modified_base 10: mod_base = OTHER; note = 2-O-methylribose adenine
  modified_base 10..11: mod_base = OTHER; note S-N-(1,3-dimethylimidazolidin-2-ylidene)phosphoramidate
  modified_base 11: mod_base = OTHER; note = 2-O-methylribose adenine
  modified_base 12: mod_base = gm
  modified_base 13: mod_base = OTHER; note = 2-O-methylribose adenine
  modified_base 14: mod_base = OTHER; note = 2-fluororibose adenine
  modified_base 15: mod_base = cm
  modified_base 16: mod_base = OTHER; note = 2-fluororibose adenine
  modified_base 17: mod_base = cm
  modified_base 18: mod_base = um
  modified_base 19: mod_base = gm
  modified_base 19..20: mod_base = OTHER; note S-N-(1,3-dimethylimidazolidin-2-ylidene)phosphoramidate
  modified_base 20: mod_base = um
  modified_base 21: mod_base = um
  modified_base 21..22: mod_base = OTHER; note = S-phosphorothioate
  modified_base 22: mod_base = um
  modified_base 22..23: mod_base = OTHER; note = S-phosphorothioate
  modified_base 23: mod_base = um
  source 1..23: mol_type = other RNA
ttatagagcaagaacactgtttt

SEQ ID NO: 177 - RNA, 23 nt, synthetic construct
  misc_feature 1..23: note = Synthetic: WV-44436
  misc_feature 1..23: note = Synthetic: SSR-0105672
  modified_base 1: mod_base = OTHER; note = phosphate linked to the 5' end of S-5-methyl-deoxyribose thymine
  modified_base 1..2: mod_base = OTHER; note = S-phosphorothioate
  modified_base 2: mod_base = OTHER; note = 2-fluororibose uracil
  modified_base 2..3: mod_base = OTHER; note = R-phosphorothioate
  modified_base 3: mod_base = OTHER; note = 2-O-methylribose adenine
  modified_base 3..4: mod_base = OTHER; note S-N-(1,3-dimethylimidazolidin-2-ylidene)phosphoramidate
  modified_base 4: mod_base = um
  modified_base 5: mod_base = OTHER; note = 2-O-methylribose adenine
  modified_base 6: mod_base = OTHER; note = 2-fluororibose guanine
  modified_base 7: mod_base = OTHER; note = 2-O-methylribose adenine
  modified_base 8: mod_base = gm
  modified_base 9: mod_base = cm
  modified_base 10: mod_base = OTHER; note = 2-O-methylribose adenine
  modified_base 10..11: mod_base = OTHER; note S-N-(1,3-dimethylimidazolidin-2-ylidene)phosphoramidate
  modified_base 11: mod_base = OTHER; note = 2-O-methylribose adenine
  modified_base 12: mod_base = gm
  modified_base 13: mod_base = OTHER; note = 2-O-methylribose adenine
  modified_base 14: mod_base = OTHER; note = 2-fluororibose adenine
  modified_base 15: mod_base = cm
  modified_base 16: mod_base = OTHER; note = 2-fluororibose adenine
  modified_base 17: mod_base = cm
  modified_base 18: mod_base = um
  modified_base 19: mod_base = gm
  modified_base 19..20: mod_base = OTHER; note S-N-(1,3-dimethylimidazolidin-2-ylidene)phosphoramidate
  modified_base 20: mod_base = um
  modified_base 21: mod_base = um
  modified_base 21..22: mod_base = OTHER; note = S-phosphorothioate
  modified_base 22: mod_base = um
  modified_base 22..23: mod_base = OTHER; note = S-phosphorothioate
  modified_base 23: mod_base = um
  source 1..23: mol_type = other RNA
ttatagagcaagaacactgtttt

SEQ ID NO: 178 - RNA, 23 nt, synthetic construct
  misc_feature 1..23: note = Synthetic: WV-44437
  misc_feature 1..23: note = Synthetic: SSR-0105664
  modified_base 1: mod_base = OTHER; note = phosphate linked to the 5' end of R-5-methyl-deoxyribose thymine
  modified_base 1..2: mod_base = OTHER; note = S-phosphorothioate
  modified_base 2: mod_base = OTHER; note = 2-fluororibose uracil
  modified_base 2..3: mod_base = OTHER; note = R-phosphorothioate
  modified_base 3: mod_base = OTHER; note = 2-O-methylribose adenine
  modified_base 3..4: mod_base = OTHER; note S-N-(1,3-dimethylimidazolidin-2-ylidene)phosphoramidate
  modified_base 4: mod_base = um
  modified_base 5: mod_base = OTHER; note = 2-O-methylribose adenine
  modified_base 6: mod_base = OTHER; note = 2-fluororibose guanine
  modified_base 7: mod_base = OTHER; note = 2-O-methylribose adenine
  modified_base 8: mod_base = gm
  modified_base 9: mod_base = cm
  modified_base 10: mod_base = OTHER; note = 2-O-methylribose adenine
  modified_base 10..11: mod_base = OTHER; note S-N-(1,3-dimethylimidazolidin-2-ylidene)phosphoramidate
  modified_base 11: mod_base = OTHER; note = 2-O-methylribose adenine
  modified_base 12: mod_base = gm
  modified_base 13: mod_base = OTHER; note = 2-O-methylribose adenine
  modified_base 14: mod_base = OTHER; note = 2-fluororibose adenine
  modified_base 15: mod_base = cm
  modified_base 16: mod_base = OTHER; note = 2-fluororibose adenine
  modified_base 17: mod_base = cm
  modified_base 18: mod_base = um
  modified_base 19: mod_base = gm
  modified_base 19..20: mod_base = OTHER; note S-N-(1,3-dimethylimidazolidin-2-ylidene)phosphoramidate
  modified_base 20: mod_base = um
  modified_base 21: mod_base = um
  modified_base 21..22: mod_base = OTHER; note = S-phosphorothioate
  modified_base 22: mod_base = um
  modified_base 22..23: mod_base = OTHER; note = S-phosphorothioate
  modified_base 23: mod_base = um
  source 1..23: mol_type = other RNA
ttatagagcaagaacactgtttt

SEQ ID NO: 179 - RNA, 23 nt, synthetic construct
  misc_feature 1..23: note = Synthetic: WV-44438
  misc_feature 1..23: note = Synthetic: SSR-0104214
  modified_base 1: mod_base = OTHER; note = 5-(E)-vinylphosphonate-2,5-deoxyribose thymine
  modified_base 1..2: mod_base = OTHER; note = S-phosphorothioate
  modified_base 2: mod_base = OTHER; note = 2-fluororibose uracil
  modified_base 2..3: mod_base = OTHER; note = R-phosphorothioate
  modified_base 3: mod_base = OTHER; note = 2-O-methylribose adenine
  modified_base 3..4: mod_base = OTHER; note S-N-(1,3-dimethylimidazolidin-2-ylidene)phosphoramidate
  modified_base 4: mod_base = um
  modified_base 5: mod_base = OTHER; note = 2-O-methylribose adenine
  modified_base 6: mod_base = OTHER; note = 2-fluororibose guanine
  modified_base 7: mod_base = OTHER; note = 2-O-methylribose adenine
  modified_base 8: mod_base = gm
  modified_base 9: mod_base = cm
  modified_base 10: mod_base = OTHER; note = 2-O-methylribose adenine
  modified_base 10..11: mod_base = OTHER; note S-N-(1,3-dimethylimidazolidin-2-ylidene)phosphoramidate
  modified_base 11: mod_base = OTHER; note = 2-O-methylribose adenine
  modified_base 12: mod_base = gm
  modified_base 13: mod_base = OTHER; note = 2-O-methylribose adenine
  modified_base 14: mod_base = OTHER; note = 2-fluororibose adenine
  modified_base 15: mod_base = cm
  modified_base 16: mod_base = OTHER; note = 2-fluororibose adenine
  modified_base 17: mod_base = cm
  modified_base 18: mod_base = um
  modified_base 19: mod_base = gm
  modified_base 19..20: mod_base = OTHER; note S-N-(1,3-dimethylimidazolidin-2-ylidene)phosphoramidate
  modified_base 20: mod_base = um
  modified_base 21: mod_base = um
  modified_base 21..22: mod_base = OTHER; note = S-phosphorothioate
  modified_base 22: mod_base = um
  modified_base 22..23: mod_base = OTHER; note = S-phosphorothioate
  modified_base 23: mod_base = um
  source 1..23: mol_type = other RNA
ttatagagcaagaacactgtttt

SEQ ID NO: 180 - RNA, 23 nt, synthetic construct
  misc_feature 1..23: note = Synthetic: WV-44439
  misc_feature 1..23: note = Synthetic: SSR-0104201
  modified_base 1: mod_base = OTHER; note = 5-(S)-methyl-(E)-vinyl-2,5-deoxyribose thymine
  modified_base 1..2: mod_base = OTHER; note = S-phosphorothioate
  modified_base 2: mod_base = OTHER; note = 2-fluororibose uracil
  modified_base 2..3: mod_base = OTHER; note = R-phosphorothioate
  modified_base 3: mod_base = OTHER; note = 2-O-methylribose adenine
  modified_base 3..4: mod_base = OTHER; note S-N-(1,3-dimethylimidazolidin-2-ylidene)phosphoramidate
  modified_base 4: mod_base = um
  modified_base 5: mod_base = OTHER; note = 2-O-methylribose adenine
  modified_base 6: mod_base = OTHER; note = 2-fluororibose guanine
  modified_base 7: mod_base = OTHER; note = 2-O-methylribose adenine
  modified_base 8: mod_base = gm
  modified_base 9: mod_base = cm
  modified_base 10: mod_base = OTHER; note = 2-O-methylribose adenine
  modified_base 10..11: mod_base = OTHER; note S-N-(1,3-dimethylimidazolidin-2-ylidene)phosphoramidate
  modified_base 11: mod_base = OTHER; note = 2-O-methylribose adenine
  modified_base 12: mod_base = gm
  modified_base 13: mod_base = OTHER; note = 2-O-methylribose adenine
  modified_base 14: mod_base = OTHER; note = 2-fluororibose adenine
  modified_base 15: mod_base = cm
  modified_base 16: mod_base = OTHER; note = 2-fluororibose adenine
  modified_base 17: mod_base = cm
  modified_base 18: mod_base = um
  modified_base 19: mod_base = gm
  modified_base 19..20: mod_base = OTHER; note S-N-(1,3-dimethylimidazolidin-2-ylidene)phosphoramidate
  modified_base 20: mod_base = um
  modified_base 21: mod_base = um
  modified_base 21..22: mod_base = OTHER; note = S-phosphorothioate
  modified_base 22: mod_base = um
  modified_base 22..23: mod_base = OTHER; note = S-phosphorothioate
  modified_base 23: mod_base = um
  source 1..23: mol_type = other RNA
ttatagagcaagaacactgtttt

SEQ ID NO: 181 - RNA, 23 nt, synthetic construct
  misc_feature 1..23: note = Synthetic: WV-44440
  misc_feature 1..23: note = Synthetic: SSR-0104198
  modified_base 1: mod_base = OTHER; note = 5-(S)-methyl-2,5-deoxyribose thymine
  modified_base 1..2: mod_base = OTHER; note = S-phosphorothioate
  modified_base 2: mod_base = OTHER; note = 2-fluororibose uracil
  modified_base 2..3: mod_base = OTHER; note = R-phosphorothioate
  modified_base 3: mod_base = OTHER; note = 2-O-methylribose adenine
  modified_base 3..4: mod_base = OTHER; note S-N-(1,3-dimethylimidazolidin-2-ylidene)phosphoramidate
  modified_base 4: mod_base = um
  modified_base 5: mod_base = OTHER; note = 2-O-methylribose adenine
  modified_base 6: mod_base = OTHER; note = 2-fluororibose guanine
  modified_base 7: mod_base = OTHER; note = 2-O-methylribose adenine
  modified_base 8: mod_base = gm
  modified_base 9: mod_base = cm
  modified_base 10: mod_base = OTHER; note = 2-O-methylribose adenine
  modified_base 10..11: mod_base = OTHER; note S-N-(1,3-dimethylimidazolidin-2-ylidene)phosphoramidate
  modified_base 11: mod_base = OTHER; note = 2-O-methylribose adenine
  modified_base 12: mod_base = gm
  modified_base 13: mod_base = OTHER; note = 2-O-methylribose adenine
  modified_base 14: mod_base = OTHER; note = 2-fluororibose adenine
  modified_base 15: mod_base = cm
  modified_base 16: mod_base = OTHER; note = 2-fluororibose adenine
  modified_base 17: mod_base = cm
  modified_base 18: mod_base = um
  modified_base 19: mod_base = gm
  modified_base 19..20: mod_base = OTHER; note S-N-(1,3-dimethylimidazolidin-2-ylidene)phosphoramidate
  modified_base 20: mod_base = um
  modified_base 21: mod_base = um
  modified_base 21..22: mod_base = OTHER; note = S-phosphorothioate
  modified_base 22: mod_base = um
  modified_base 22..23: mod_base = OTHER; note = S-phosphorothioate
  modified_base 23: mod_base = um
  source 1..23: mol_type = other RNA
ttatagagcaagaacactgtttt

SEQ ID NO: 182 - RNA, 23 nt, synthetic construct
  misc_feature 1..23: note = Synthetic: WV-44441
  misc_feature 1..23: note = Synthetic: SSR-0104184
  modified_base 1: mod_base = OTHER; note = 5-(R)-methyl-2,5-deoxyribose thymine
  modified_base 1..2: mod_base = OTHER; note = S-phosphorothioate
  modified_base 2: mod_base = OTHER; note = 2-fluororibose uracil
  modified_base 2..3: mod_base = OTHER; note = R-phosphorothioate
  modified_base 3: mod_base = OTHER; note = 2-O-methylribose adenine
  modified_base 3..4: mod_base = OTHER; note S-N-(1,3-dimethylimidazolidin-2-ylidene)phosphoramidate
  modified_base 4: mod_base = um
  modified_base 5: mod_base = OTHER; note = 2-O-methylribose adenine
  modified_base 6: mod_base = OTHER; note = 2-fluororibose guanine
  modified_base 7: mod_base = OTHER; note = 2-O-methylribose adenine
  modified_base 8: mod_base = gm
  modified_base 9: mod_base = cm
  modified_base 10: mod_base = OTHER; note = 2-O-methylribose adenine
  modified_base 10..11: mod_base = OTHER; note S-N-(1,3-dimethylimidazolidin-2-ylidene)phosphoramidate
  modified_base 11: mod_base = OTHER; note = 2-O-methylribose adenine
  modified_base 12: mod_base = gm
  modified_base 13: mod_base = OTHER; note = 2-O-methylribose adenine
  modified_base 14: mod_base = OTHER; note = 2-fluororibose adenine
  modified_base 15: mod_base = cm
  modified_base 16: mod_base = OTHER; note = 2-fluororibose adenine
  modified_base 17: mod_base = cm
  modified_base 18: mod_base = um
  modified_base 19: mod_base = gm
  modified_base 19..20: mod_base = OTHER; note S-N-(1,3-dimethylimidazolidin-2-ylidene)phosphoramidate
  modified_base 20: mod_base = um
  modified_base 21: mod_base = um
  modified_base 21..22: mod_base = OTHER; note = S-phosphorothioate
  modified_base 22: mod_base = um
  modified_base 22..23: mod_base = OTHER; note = S-phosphorothioate
  modified_base 23: mod_base = um
  source 1..23: mol_type = other RNA
ttatagagcaagaacactgtttt

SEQ ID NO: 183 - RNA, 23 nt, synthetic construct
  misc_feature 1..23: note = Synthetic: WV-46387
  misc_feature 1..23: note = Synthetic: SSR-0104219
  modified_base 1: mod_base = OTHER; note = deoxyribose thymine
  modified_base 1..2: mod_base = OTHER; note = R-phosphorothioate
  modified_base 2: mod_base = OTHER; note = 2-fluororibose uracil
  modified_base 2..3: mod_base = OTHER; note = S-phosphorothioate
  modified_base 3: mod_base = OTHER; note = 2-O-methylribose adenine
  modified_base 4: mod_base = um
  modified_base 5: mod_base = OTHER; note = 2-O-methylribose adenine
  modified_base 6: mod_base = OTHER; note = 2-fluororibose guanine
  modified_base 7: mod_base = OTHER; note = 2-O-methylribose adenine
  modified_base 8: mod_base = gm
  modified_base 9: mod_base = cm
  modified_base 10: mod_base = OTHER; note = 2-O-methylribose adenine
  modified_base 11: mod_base = OTHER; note = 2-O-methylribose adenine
  modified_base 12: mod_base = gm
  modified_base 13: mod_base = OTHER; note = 2-O-methylribose adenine
  modified_base 14: mod_base = OTHER; note = 2-fluororibose adenine
  modified_base 15: mod_base = cm
  modified_base 16: mod_base = OTHER; note = 2-fluororibose adenine
  modified_base 17: mod_base = cm
  modified_base 18: mod_base = um
  modified_base 19: mod_base = gm
  modified_base 20: mod_base = um
  modified_base 21: mod_base = um
  modified_base 21..22: mod_base = OTHER; note = S-phosphorothioate
  modified_base 22: mod_base = um
  modified_base 22..23: mod_base = OTHER; note = S-phosphorothioate
  modified_base 23: mod_base = um
  source 1..23: mol_type = other RNA
ttatagagcaagaacactgtttt

SEQ ID NO: 184 - RNA, 23 nt, synthetic construct
  misc_feature 1..23: note = Synthetic: WV-46388
  misc_feature 1..23: note = Synthetic: SSR-0105677
  modified_base 1: mod_base = OTHER; note = phosphate linked to the 5' end of deoxyribose thymine
  modified_base 1..2: mod_base = OTHER; note = R-phosphorothioate
  modified_base 2: mod_base = OTHER; note = 2-fluororibose uracil
  modified_base 2..3: mod_base = OTHER; note = S-phosphorothioate
  modified_base 3: mod_base = OTHER; note = 2-O-methylribose adenine
  modified_base 4: mod_base = um
  modified_base 5: mod_base = OTHER; note = 2-O-methylribose adenine
  modified_base 6: mod_base = OTHER; note = 2-fluororibose guanine
  modified_base 7: mod_base = OTHER; note = 2-O-methylribose adenine
  modified_base 8: mod_base = gm
  modified_base 9: mod_base = cm
  modified_base 10: mod_base = OTHER; note = 2-O-methylribose adenine
  modified_base 11: mod_base = OTHER; note = 2-O-methylribose adenine
  modified_base 12: mod_base = gm
  modified_base 13: mod_base = OTHER; note = 2-O-methylribose adenine
  modified_base 14: mod_base = OTHER; note = 2-fluororibose adenine
  modified_base 15: mod_base = cm
  modified_base 16: mod_base = OTHER; note = 2-fluororibose adenine
  modified_base 17: mod_base = cm
  modified_base 18: mod_base = um
  modified_base 19: mod_base = gm
  modified_base 20: mod_base = um
  modified_base 21: mod_base = um
  modified_base 21..22: mod_base = OTHER; note = S-phosphorothioate
  modified_base 22: mod_base = um
  modified_base 22..23: mod_base = OTHER; note = S-phosphorothioate
  modified_base 23: mod_base = um
  source 1..23: mol_type = other RNA
ttatagagcaagaacactgtttt

SEQ ID NO: 185 - RNA, 23 nt, synthetic construct
  misc_feature 1..23: note = Synthetic: WV-46389
  misc_feature 1..23: note = Synthetic: SSR-0105669
  modified_base 1: mod_base = OTHER; note = phosphate linked to the 5' end of S-5-methyl-deoxyribose thymine
  modified_base 1..2: mod_base = OTHER; note = R-phosphorothioate
  modified_base 2: mod_base = OTHER; note = 2-fluororibose uracil
  modified_base 2..3: mod_base = OTHER; note = S-phosphorothioate
  modified_base 3: mod_base = OTHER; note = 2-O-methylribose adenine
  modified_base 4: mod_base = um
  modified_base 5: mod_base = OTHER; note = 2-O-methylribose adenine
  modified_base 6: mod_base = OTHER; note = 2-fluororibose guanine
  modified_base 7: mod_base = OTHER; note = 2-O-methylribose adenine
  modified_base 8: mod_base = gm
  modified_base 9: mod_base = cm
  modified_base 10: mod_base = OTHER; note = 2-O-methylribose adenine
  modified_base 11: mod_base = OTHER; note = 2-O-methylribose adenine
  modified_base 12: mod_base = gm
  modified_base 13: mod_base = OTHER; note = 2-O-methylribose adenine
  modified_base 14: mod_base = OTHER; note = 2-fluororibose adenine
  modified_base 15: mod_base = cm
  modified_base 16: mod_base = OTHER; note = 2-fluororibose adenine
  modified_base 17: mod_base = cm
  modified_base 18: mod_base = um
  modified_base 19: mod_base = gm
  modified_base 20: mod_base = um
  modified_base 21: mod_base = um
  modified_base 21..22: mod_base = OTHER; note = S-phosphorothioate
  modified_base 22: mod_base = um
  modified_base 22..23: mod_base = OTHER; note = S-phosphorothioate
  modified_base 23: mod_base = um
  source 1..23: mol_type = other RNA
ttatagagcaagaacactgtttt

SEQ ID NO: 186 - RNA, 23 nt, synthetic construct
  misc_feature 1..23: note = Synthetic: WV-46390
  misc_feature 1..23: note = Synthetic: SSR-0105661
  modified_base 1: mod_base = OTHER; note = phosphate linked to the 5' end of R-5-methyl-deoxyribose thymine
  modified_base 1..2: mod_base = OTHER; note = R-phosphorothioate
  modified_base 2: mod_base = OTHER; note = 2-fluororibose uracil
  modified_base 2..3: mod_base = OTHER; note = S-phosphorothioate
  modified_base 3: mod_base = OTHER; note = 2-O-methylribose adenine
  modified_base 4: mod_base = um
  modified_base 5: mod_base = OTHER; note = 2-O-methylribose adenine
  modified_base 6: mod_base = OTHER; note = 2-fluororibose guanine
  modified_base 7: mod_base = OTHER; note = 2-O-methylribose adenine
  modified_base 8: mod_base = gm
  modified_base 9: mod_base = cm
  modified_base 10: mod_base = OTHER; note = 2-O-methylribose adenine
  modified_base 11: mod_base = OTHER; note = 2-O-methylribose adenine
  modified_base 12: mod_base = gm
  modified_base 13: mod_base = OTHER; note = 2-O-methylribose adenine
  modified_base 14: mod_base = OTHER; note = 2-fluororibose adenine
  modified_base 15: mod_base = cm
  modified_base 16: mod_base = OTHER; note = 2-fluororibose adenine
  modified_base 17: mod_base = cm
  modified_base 18: mod_base = um
  modified_base 19: mod_base = gm
  modified_base 20: mod_base = um
  modified_base 21: mod_base = um
  modified_base 21..22: mod_base = OTHER; note = S-phosphorothioate
  modified_base 22: mod_base = um
  modified_base 22..23: mod_base = OTHER; note = S-phosphorothioate
  modified_base 23: mod_base = um
  source 1..23: mol_type = other RNA
ttatagagcaagaacactgtttt

SEQ ID NO: 187 - RNA, 23 nt, synthetic construct
  misc_feature 1..23: note = Synthetic: WV-46391
  misc_feature 1..23: note = Synthetic: SSR-0104211
  modified_base 1: mod_base = OTHER; note = 5-(E)-vinylphosphonate-2,5-deoxyribose thymine
  modified_base 1..2: mod_base = OTHER; note = R-phosphorothioate
  modified_base 2: mod_base = OTHER; note = 2-fluororibose uracil
  modified_base 2..3: mod_base = OTHER; note = S-phosphorothioate
  modified_base 3: mod_base = OTHER; note = 2-O-methylribose adenine
  modified_base 4: mod_base = um
  modified_base 5: mod_base = OTHER; note = 2-O-methylribose adenine
  modified_base 6: mod_base = OTHER; note = 2-fluororibose guanine
  modified_base 7: mod_base = OTHER; note = 2-O-methylribose adenine
  modified_base 8: mod_base = gm
  modified_base 9: mod_base = cm
  modified_base 10: mod_base = OTHER; note = 2-O-methylribose adenine
  modified_base 11: mod_base = OTHER; note = 2-O-methylribose adenine
  modified_base 12: mod_base = gm
  modified_base 13: mod_base = OTHER; note = 2-O-methylribose adenine
  modified_base 14: mod_base = OTHER; note = 2-fluororibose adenine
  modified_base 15: mod_base = cm
  modified_base 16: mod_base = OTHER; note = 2-fluororibose adenine
  modified_base 17: mod_base = cm
  modified_base 18: mod_base = um
  modified_base 19: mod_base = gm
  modified_base 20: mod_base = um
  modified_base 21: mod_base = um
  modified_base 21..22: mod_base = OTHER; note = S-phosphorothioate
  modified_base 22: mod_base = um
  modified_base 22..23: mod_base = OTHER; note = S-phosphorothioate
  modified_base 23: mod_base = um
  source 1..23: mol_type = other RNA
ttatagagcaagaacactgtttt

SEQ ID NO: 188 - RNA, 23 nt, synthetic construct
  misc_feature 1..23: note = Synthetic: WV-46392
  misc_feature 1..23: note = Synthetic: SSR-0104195
  modified_base 1: mod_base = OTHER; note = 5-(S)-methyl-2,5-deoxyribose thymine
  modified_base 1..2: mod_base = OTHER; note = R-phosphorothioate
  modified_base 2: mod_base = OTHER; note = 2-fluororibose uracil
  modified_base 2..3: mod_base = OTHER; note = S-phosphorothioate
  modified_base 3: mod_base = OTHER; note = 2-O-methylribose adenine
  modified_base 4: mod_base = um
  modified_base 5: mod_base = OTHER; note = 2-O-methylribose adenine
  modified_base 6: mod_base = OTHER; note = 2-fluororibose guanine
  modified_base 7: mod_base = OTHER; note = 2-O-methylribose adenine
  modified_base 8: mod_base = gm
  modified_base 9: mod_base = cm
  modified_base 10: mod_base = OTHER; note = 2-O-methylribose adenine
  modified_base 11: mod_base = OTHER; note = 2-O-methylribose adenine
  modified_base 12: mod_base = gm
  modified_base 13: mod_base = OTHER; note = 2-O-methylribose adenine
  modified_base 14: mod_base = OTHER; note = 2-fluororibose adenine
  modified_base 15: mod_base = cm
  modified_base 16: mod_base = OTHER; note = 2-fluororibose adenine
  modified_base 17: mod_base = cm
  modified_base 18: mod_base = um
  modified_base 19: mod_base = gm
  modified_base 20: mod_base = um
  modified_base 21: mod_base = um
  modified_base 21..22: mod_base = OTHER; note = S-phosphorothioate
  modified_base 22: mod_base = um
  modified_base 22..23: mod_base = OTHER; note = S-phosphorothioate
  modified_base 23: mod_base = um
  source 1..23: mol_type = other RNA
ttatagagcaagaacactgtttt

SEQ ID NO: 189 - RNA, 23 nt, synthetic construct
  misc_feature 1..23: note = Synthetic: WV-46393
  misc_feature 1..23: note = Synthetic: SSR-0104181
  modified_base 1: mod_base = OTHER; note = 5-(R)-methyl-2,5-deoxyribose thymine
  modified_base 1..2: mod_base = OTHER; note = R-phosphorothioate
  modified_base 2: mod_base = OTHER; note = 2-fluororibose uracil
  modified_base 2..3: mod_base = OTHER; note = S-phosphorothioate
  modified_base 3: mod_base = OTHER; note = 2-O-methylribose adenine
  modified_base 4: mod_base = um
  modified_base 5: mod_base = OTHER; note = 2-O-methylribose adenine
  modified_base 6: mod_base = OTHER; note = 2-fluororibose guanine
  modified_base 7: mod_base = OTHER; note = 2-O-methylribose adenine
  modified_base 8: mod_base = gm
  modified_base 9: mod_base = cm
  modified_base 10: mod_base = OTHER; note = 2-O-methylribose adenine
  modified_base 11: mod_base = OTHER; note = 2-O-methylribose adenine
  modified_base 12: mod_base = gm
  modified_base 13: mod_base = OTHER; note = 2-O-methylribose adenine
  modified_base 14: mod_base = OTHER; note = 2-fluororibose adenine
  modified_base 15: mod_base = cm
  modified_base 16: mod_base = OTHER; note = 2-fluororibose adenine
  modified_base 17: mod_base = cm
  modified_base 18: mod_base = um
  modified_base 19: mod_base = gm
  modified_base 20: mod_base = um
  modified_base 21: mod_base = um
  modified_base 21..22: mod_base = OTHER; note = S-phosphorothioate
  modified_base 22: mod_base = um
  modified_base 22..23: mod_base = OTHER; note = S-phosphorothioate
  modified_base 23: mod_base = um
  source 1..23: mol_type = other RNA
ttatagagcaagaacactgtttt

SEQ ID NO: 190 - RNA, 23 nt, synthetic construct
  misc_feature 1..23: note = Synthetic: WV-42078
  misc_feature 1..23: note = Synthetic: SSR-0104290
  modified_base 1: mod_base = um
  modified_base 1..2: mod_base = OTHER; note = R-phosphorothioate
  modified_base 2: mod_base = OTHER; note = 2-fluororibose uracil
  modified_base 2..3: mod_base = OTHER; note = S-phosphorothioate
  modified_base 3: mod_base = OTHER; note = 2-O-methylribose adenine
  modified_base 3..4: mod_base = OTHER; note S-N-(1,3-dimethylimidazolidin-2-ylidene)phosphoramidate
  modified_base 4: mod_base = um
  modified_base 5: mod_base = OTHER; note = 2-O-methylribose adenine
  modified_base 6: mod_base = OTHER; note = 2-fluororibose guanine
  modified_base 7: mod_base = OTHER; note = 2-O-methylribose adenine
  modified_base 8: mod_base = gm
  modified_base 9: mod_base = cm
  modified_base 10: mod_base = OTHER; note = 2-O-methylribose adenine
  modified_base 10..11: mod_base = OTHER; note S-N-(1,3-dimethylimidazolidin-2-ylidene)phosphoramidate
  modified_base 11: mod_base = OTHER; note = 2-O-methylribose adenine
  modified_base 12: mod_base = gm
  modified_base 13: mod_base = OTHER; note = 2-O-methylribose adenine
  modified_base 14: mod_base = OTHER; note = 2-fluororibose adenine
  modified_base 15: mod_base = cm
  modified_base 16: mod_base = OTHER; note = 2-fluororibose adenine
  modified_base 17: mod_base = cm
  modified_base 18: mod_base = um
  modified_base 19: mod_base = gm
  modified_base 19..20: mod_base = OTHER; note S-N-(1,3-dimethylimidazolidin-2-ylidene)phosphoramidate
  modified_base 20: mod_base = um
  modified_base 21: mod_base = um
  modified_base 21..22: mod_base = OTHER; note = S-phosphorothioate
  modified_base 22: mod_base = um
  modified_base 22..23: mod_base = OTHER; note = S-phosphorothioate
  modified_base 23: mod_base = um
  source 1..23: mol_type = other RNA
ttatagagcaagaacactgtttt

SEQ ID NO: 191 - RNA, 23 nt, synthetic construct
  misc_feature 1..23: note = Synthetic: WV-46394
  misc_feature 1..23: note = Synthetic: SSR-0104218
  modified_base 1: mod_base = OTHER; note = deoxyribose thymine
  modified_base 1..2: mod_base = OTHER; note = R-phosphorothioate
  modified_base 2: mod_base = OTHER; note = 2-fluororibose uracil
  modified_base 2..3: mod_base = OTHER; note = S-phosphorothioate
  modified_base 3: mod_base = OTHER; note = 2-O-methylribose adenine
  modified_base 3..4: mod_base = OTHER; note S-N-(1,3-dimethylimidazolidin-2-ylidene)phosphoramidate
  modified_base 4: mod_base = um
  modified_base 5: mod_base = OTHER; note = 2-O-methylribose adenine
  modified_base 6: mod_base = OTHER; note = 2-fluororibose guanine
  modified_base 7: mod_base = OTHER; note = 2-O-methylribose adenine
  modified_base 8: mod_base = gm
  modified_base 9: mod_base = cm
  modified_base 10: mod_base = OTHER; note = 2-O-methylribose adenine
  modified_base 10..11: mod_base = OTHER; note S-N-(1,3-dimethylimidazolidin-2-ylidene)phosphoramidate
  modified_base 11: mod_base = OTHER; note = 2-O-methylribose adenine
  modified_base 12: mod_base = gm
  modified_base 13: mod_base = OTHER; note = 2-O-methylribose adenine
  modified_base 14: mod_base = OTHER; note = 2-fluororibose adenine
  modified_base 15: mod_base = cm
  modified_base 16: mod_base = OTHER; note = 2-fluororibose adenine
  modified_base 17: mod_base = cm
  modified_base 18: mod_base = um
  modified_base 19: mod_base = gm
  modified_base 19..20: mod_base = OTHER; note S-N-(1,3-dimethylimidazolidin-2-ylidene)phosphoramidate
  modified_base 20: mod_base = um
  modified_base 21: mod_base = um
  modified_base 21..22: mod_base = OTHER; note = S-phosphorothioate
  modified_base 22: mod_base = um
  modified_base 22..23: mod_base = OTHER; note = S-phosphorothioate
  modified_base 23: mod_base = um
  source 1..23: mol_type = other RNA
ttatagagcaagaacactgtttt

SEQ ID NO: 192 - RNA, 23 nt, synthetic construct
  misc_feature 1..23: note = Synthetic: WV-46395
  misc_feature 1..23: note = Synthetic: SSR-0105676
  modified_base 1: mod_base = OTHER; note = phosphate linked to the 5' end of deoxyribose thymine
  modified_base 1..2: mod_base = OTHER; note = R-phosphorothioate
  modified_base 2: mod_base = OTHER; note = 2-fluororibose uracil
  modified_base 2..3: mod_base = OTHER; note = S-phosphorothioate
  modified_base 3: mod_base = OTHER; note = 2-O-methylribose adenine
  modified_base 3..4: mod_base = OTHER; note S-N-(1,3-dimethylimidazolidin-2-ylidene)phosphoramidate
  modified_base 4: mod_base = um
  modified_base 5: mod_base = OTHER; note = 2-O-methylribose adenine
  modified_base 6: mod_base = OTHER; note = 2-fluororibose guanine
  modified_base 7: mod_base = OTHER; note = 2-O-methylribose adenine
  modified_base 8: mod_base = gm
  modified_base 9: mod_base = cm
  modified_base 10: mod_base = OTHER; note = 2-O-methylribose adenine
  modified_base 10..11: mod_base = OTHER; note S-N-(1,3-dimethylimidazolidin-2-ylidene)phosphoramidate
  modified_base 11: mod_base = OTHER; note = 2-O-methylribose adenine
  modified_base 12: mod_base = gm
  modified_base 13: mod_base = OTHER; note = 2-O-methylribose adenine
  modified_base 14: mod_base = OTHER; note = 2-fluororibose adenine
  modified_base 15: mod_base = cm
  modified_base 16: mod_base = OTHER; note = 2-fluororibose adenine
  modified_base 17: mod_base = cm
  modified_base 18: mod_base = um
  modified_base 19: mod_base = gm
  modified_base 19..20: mod_base = OTHER; note S-N-(1,3-dimethylimidazolidin-2-ylidene)phosphoramidate
  modified_base 20: mod_base = um
  modified_base 21: mod_base = um
  modified_base 21..22: mod_base = OTHER; note = S-phosphorothioate
  modified_base 22: mod_base = um
  modified_base 22..23: mod_base = OTHER; note = S-phosphorothioate
  modified_base 23: mod_base = um
  source 1..23: mol_type = other RNA
ttatagagcaagaacactgtttt

SEQ ID NO: 193 - RNA, 23 nt, synthetic construct
  misc_feature 1..23: note = Synthetic: WV-46396
  misc_feature 1..23: note = Synthetic: SSR-0105668
  modified_base 1: mod_base = OTHER; note = phosphate linked to the 5' end of S-5-methyl-deoxyribose thymine
  modified_base 1..2: mod_base = OTHER; note = R-phosphorothioate
  modified_base 2: mod_base = OTHER; note = 2-fluororibose uracil
  modified_base 2..3: mod_base = OTHER; note = S-phosphorothioate
  modified_base 3: mod_base = OTHER; note = 2-O-methylribose adenine
  modified_base 3..4: mod_base = OTHER; note S-N-(1,3-dimethylimidazolidin-2-ylidene)phosphoramidate
  modified_base 4: mod_base = um
  modified_base 5: mod_base = OTHER; note = 2-O-methylribose adenine
  modified_base 6: mod_base = OTHER; note = 2-fluororibose guanine
  modified_base 7: mod_base = OTHER; note = 2-O-methylribose adenine
  modified_base 8: mod_base = gm
  modified_base 9: mod_base = cm
  modified_base 10: mod_base = OTHER; note = 2-O-methylribose adenine
  modified_base 10..11: mod_base = OTHER; note S-N-(1,3-dimethylimidazolidin-2-ylidene)phosphoramidate
  modified_base 11: mod_base = OTHER; note = 2-O-methylribose adenine
  modified_base 12: mod_base = gm
  modified_base 13: mod_base = OTHER; note = 2-O-methylribose adenine
  modified_base 14: mod_base = OTHER; note = 2-fluororibose adenine
  modified_base 15: mod_base = cm
  modified_base 16: mod_base = OTHER; note = 2-fluororibose adenine
  modified_base 17: mod_base = cm
  modified_base 18: mod_base = um
  modified_base 19: mod_base = gm
  modified_base 19..20: mod_base = OTHER; note S-N-(1,3-dimethylimidazolidin-2-ylidene)phosphoramidate
  modified_base 20: mod_base = um
  modified_base 21: mod_base = um
  modified_base 21..22: mod_base = OTHER; note = S-phosphorothioate
  modified_base 22: mod_base = um
  modified_base 22..23: mod_base = OTHER; note = S-phosphorothioate
  modified_base 23: mod_base = um
  source 1..23: mol_type = other RNA
ttatagagcaagaacactgtttt

SEQ ID NO: 194 - RNA, 23 nt, synthetic construct
  misc_feature 1..23: note = Synthetic: WV-46397
  misc_feature 1..23: note = Synthetic: SSR-0105660
  modified_base 1: mod_base = OTHER; note = phosphate linked to the 5' end of R-5-methyl-deoxyribose thymine
  modified_base 1..2: mod_base = OTHER; note = R-phosphorothioate
  modified_base 2: mod_base = OTHER; note = 2-fluororibose uracil
  modified_base 2..3: mod_base = OTHER; note = S-phosphorothioate
  modified_base 3: mod_base = OTHER; note = 2-O-methylribose adenine
  modified_base 3..4: mod_base = OTHER; note S-N-(1,3-dimethylimidazolidin-2-ylidene)phosphoramidate
  modified_base 4: mod_base = um
  modified_base 5: mod_base = OTHER; note = 2-O-methylribose adenine
  modified_base 6: mod_base = OTHER; note = 2-fluororibose guanine
  modified_base 7: mod_base = OTHER; note = 2-O-methylribose adenine
  modified_base 8: mod_base = gm
  modified_base 9: mod_base = cm
  modified_base 10: mod_base = OTHER; note = 2-O-methylribose adenine
  modified_base 10..11: mod_base = OTHER; note S-N-(1,3-dimethylimidazolidin-2-ylidene)phosphoramidate
  modified_base 11: mod_base = OTHER; note = 2-O-methylribose adenine
  modified_base 12: mod_base = gm
  modified_base 13: mod_base = OTHER; note = 2-O-methylribose adenine
  modified_base 14: mod_base = OTHER; note = 2-fluororibose adenine
  modified_base 15: mod_base = cm
  modified_base 16: mod_base = OTHER; note = 2-fluororibose adenine
  modified_base 17: mod_base = cm
  modified_base 18: mod_base = um
  modified_base 19: mod_base = gm
  modified_base 19..20: mod_base = OTHER; note S-N-(1,3-dimethylimidazolidin-2-ylidene)phosphoramidate
  modified_base 20: mod_base = um
  modified_base 21: mod_base = um
  modified_base 21..22: mod_base = OTHER; note = S-phosphorothioate
  modified_base 22: mod_base = um
  modified_base 22..23: mod_base = OTHER; note = S-phosphorothioate
  modified_base 23: mod_base = um
  source 1..23: mol_type = other RNA
ttatagagcaagaacactgtttt

SEQ ID NO: 195 - RNA, 23 nt, synthetic construct
  misc_feature 1..23: note = Synthetic: WV-46398
  misc_feature 1..23: note = Synthetic: SSR-0104210
  modified_base 1: mod_base = OTHER; note = 5-(E)-vinylphosphonate-2,5-deoxyribose thymine
  modified_base 1..2: mod_base = OTHER; note = R-phosphorothioate
  modified_base 2: mod_base = OTHER; note = 2-fluororibose uracil
  modified_base 2..3: mod_base = OTHER; note = S-phosphorothioate
  modified_base 3: mod_base = OTHER; note = 2-O-methylribose adenine
  modified_base 3..4: mod_base = OTHER; note S-N-(1,3-dimethylimidazolidin-2-ylidene)phosphoramidate
  modified_base 4: mod_base = um
  modified_base 5: mod_base = OTHER; note = 2-O-methylribose adenine
  modified_base 6: mod_base = OTHER; note = 2-fluororibose guanine
  modified_base 7: mod_base = OTHER; note = 2-O-methylribose adenine
  modified_base 8: mod_base = gm
  modified_base 9: mod_base = cm
  modified_base 10: mod_base = OTHER; note = 2-O-methylribose adenine
  modified_base 10..11: mod_base = OTHER; note S-N-(1,3-dimethylimidazolidin-2-ylidene)phosphoramidate
  modified_base 11: mod_base = OTHER; note = 2-O-methylribose adenine
  modified_base 12: mod_base = gm
  modified_base 13: mod_base = OTHER; note = 2-O-methylribose adenine
  modified_base 14: mod_base = OTHER; note = 2-fluororibose adenine
  modified_base 15: mod_base = cm
  modified_base 16: mod_base = OTHER; note = 2-fluororibose adenine
  modified_base 17: mod_base = cm
  modified_base 18: mod_base = um
  modified_base 19: mod_base = gm
  modified_base 19..20: mod_base = OTHER; note S-N-(1,3-dimethylimidazolidin-2-ylidene)phosphoramidate
  modified_base 20: mod_base = um
  modified_base 21: mod_base = um
  modified_base 21..22: mod_base = OTHER; note = S-phosphorothioate
  modified_base 22: mod_base = um
  modified_base 22..23: mod_base = OTHER; note = S-phosphorothioate
  modified_base 23: mod_base = um
  source 1..23: mol_type = other RNA
ttatagagcaagaacactgtttt

SEQ ID NO: 196 - RNA, 23 nt, synthetic construct
  misc_feature 1..23: note = Synthetic: WV-46399
  misc_feature 1..23: note = Synthetic: SSR-0104194
  modified_base 1: mod_base = OTHER; note = 5-(S)-methyl-2,5-deoxyribose thymine
  modified_base 1..2: mod_base = OTHER; note = R-phosphorothioate
  modified_base 2: mod_base = OTHER; note = 2-fluororibose uracil
  modified_base 2..3: mod_base = OTHER; note = S-phosphorothioate
  modified_base 3: mod_base = OTHER; note = 2-O-methylribose adenine
  modified_base 3..4: mod_base = OTHER; note S-N-(1,3-dimethylimidazolidin-2-ylidene)phosphoramidate
  modified_base 4: mod_base = um
  modified_base 5: mod_base = OTHER; note = 2-O-methylribose adenine
  modified_base 6: mod_base = OTHER; note = 2-fluororibose guanine
  modified_base 7: mod_base = OTHER; note = 2-O-methylribose adenine
  modified_base 8: mod_base = gm
  modified_base 9: mod_base = cm
  modified_base 10: mod_base = OTHER; note = 2-O-methylribose adenine
  modified_base 10..11: mod_base = OTHER; note S-N-(1,3-dimethylimidazolidin-2-ylidene)phosphoramidate
  modified_base 11: mod_base = OTHER; note = 2-O-methylribose adenine
  modified_base 12: mod_base = gm
  modified_base 13: mod_base = OTHER; note = 2-O-methylribose adenine
  modified_base 14: mod_base = OTHER; note = 2-fluororibose adenine
  modified_base 15: mod_base = cm
  modified_base 16: mod_base = OTHER; note = 2-fluororibose adenine
  modified_base 17: mod_base = cm
  modified_base 18: mod_base = um
  modified_base 19: mod_base = gm
  modified_base 19..20: mod_base = OTHER; note S-N-(1,3-dimethylimidazolidin-2-ylidene)phosphoramidate
  modified_base 20: mod_base = um
  modified_base 21: mod_base = um
  modified_base 21..22: mod_base = OTHER; note = S-phosphorothioate
  modified_base 22: mod_base = um
  modified_base 22..23: mod_base = OTHER; note = S-phosphorothioate
  modified_base 23: mod_base = um
  source 1..23: mol_type = other RNA
ttatagagcaagaacactgtttt

SEQ ID NO: 197 - RNA, 23 nt, synthetic construct
  misc_feature 1..23: note = Synthetic: WV-46400
  misc_feature 1..23: note = Synthetic: SSR-0104180
  modified_base 1: mod_base = OTHER; note = 5-(R)-methyl-2,5-deoxyribose thymine
  modified_base 1..2: mod_base = OTHER; note = R-phosphorothioate
  modified_base 2: mod_base = OTHER; note = 2-fluororibose uracil
  modified_base 2..3: mod_base = OTHER; note = S-phosphorothioate
  modified_base 3: mod_base = OTHER; note = 2-O-methylribose adenine
  modified_base 3..4: mod_base = OTHER; note S-N-(1,3-dimethylimidazolidin-2-ylidene)phosphoramidate
  modified_base 4: mod_base = um
  modified_base 5: mod_base = OTHER; note = 2-O-methylribose adenine
  modified_base 6: mod_base = OTHER; note = 2-fluororibose guanine
  modified_base 7: mod_base = OTHER; note = 2-O-methylribose adenine
  modified_base 8: mod_base = gm
  modified_base 9: mod_base = cm
  modified_base 10: mod_base = OTHER; note = 2-O-methylribose adenine
  modified_base 10..11: mod_base = OTHER; note S-N-(1,3-dimethylimidazolidin-2-ylidene)phosphoramidate
  modified_base 11: mod_base = OTHER; note = 2-O-methylribose adenine
  modified_base 12: mod_base = gm
  modified_base 13: mod_base = OTHER; note = 2-O-methylribose adenine
  modified_base 14: mod_base = OTHER; note = 2-fluororibose adenine
  modified_base 15: mod_base = cm
  modified_base 16: mod_base = OTHER; note = 2-fluororibose adenine
  modified_base 17: mod_base = cm
  modified_base 18: mod_base = um
  modified_base 19: mod_base = gm
  modified_base 19..20: mod_base = OTHER; note S-N-(1,3-dimethylimidazolidin-2-ylidene)phosphoramidate
  modified_base 20: mod_base = um
  modified_base 21: mod_base = um
  modified_base 21..22: mod_base = OTHER; note = S-phosphorothioate
  modified_base 22: mod_base = um
  modified_base 22..23: mod_base = OTHER; note = S-phosphorothioate
  modified_base 23: mod_base = um
  source 1..23: mol_type = other RNA
ttatagagcaagaacactgtttt

SEQ ID NO: 198 - RNA, 21 nt, synthetic construct
  misc_feature 1..21: note = Synthetic: WV-42080
  misc_feature 1..21: note = Synthetic: SSR-0101599
  modified_base 1: mod_base = OTHER; note = triantennary GalNAc with C12 linker linked to 6-aminohexanol linked by phosphate to the 5' end of 2-O-methylribose adenine
  modified_base 1..2: mod_base = OTHER; note = S-phosphorothioate
  modified_base 2: mod_base = OTHER; note = 2-O-methylribose adenine
  modified_base 3: mod_base = cm
  modified_base 4: mod_base = OTHER; note = 2-O-methylribose adenine
  modified_base 5: mod_base = gm
  modified_base 6: mod_base = um
  modified_base 7: mod_base = OTHER; note = 2-fluororibose guanine
  modified_base 8: mod_base = um
  modified_base 9: mod_base = OTHER; note = 2-fluororibose uracil
  modified_base 10: mod_base = OTHER; note = 2-fluororibose cytosine
  modified_base 11: mod_base = OTHER; note = 2-fluororibose uracil
  modified_base 12: mod_base = um
  modified_base 13: mod_base = gm
  modified_base 14: mod_base = cm
  modified_base 15: mod_base = um
  modified_base 16: mod_base = cm
  modified_base 17: mod_base = um
  modified_base 18: mod_base = OTHER; note = 2-O-methylribose adenine
  modified_base 19: mod_base = um
  modified_base 20: mod_base = OTHER; note = 2-O-methylribose adenine
  modified_base 20..21: mod_base = OTHER; note = S-phosphorothioate
  modified_base 21: mod_base = OTHER; note = 2-O-methylribose adenine
  source 1..21: mol_type = other RNA
aacagtgttcttgctctataa

SEQ ID NO: 199 - RNA, 23 nt, synthetic construct
  misc_feature 1..23: note = Synthetic: WV-47144
  misc_feature 1..23: note = Synthetic: SSR-0104280
  modified_base 1: mod_base = um
  modified_base 1..2: mod_base = OTHER; note = R-phosphorothioate
  modified_base 2: mod_base = OTHER; note = 2-fluororibose uracil
  modified_base 2..3: mod_base = OTHER; note = S-phosphorothioate
  modified_base 3: mod_base = OTHER; note = 2-O-methylribose adenine
  modified_base 3..4: mod_base = OTHER; note S-N-(1,3-dimethylimidazolidin-2-ylidene)phosphoramidate
  modified_base 4: mod_base = OTHER; note = 2-fluororibose uracil
  modified_base 5: mod_base = OTHER; note = 2-O-methylribose adenine
  modified_base 6: mod_base = OTHER; note = 2-fluororibose guanine
  modified_base 7: mod_base = OTHER; note = 2-O-methylribose adenine
  modified_base 8: mod_base = gm
  modified_base 9: mod_base = cm
  modified_base 10: mod_base = OTHER; note = 2-O-methylribose adenine
  modified_base 10..11: mod_base = OTHER; note S-N-(1,3-dimethylimidazolidin-2-ylidene)phosphoramidate
  modified_base 11: mod_base = OTHER; note = 2-fluororibose adenine
  modified_base 12: mod_base = gm
  modified_base 13: mod_base = OTHER; note = 2-O-methylribose adenine
  modified_base 14: mod_base = OTHER; note = 2-fluororibose adenine
  modified_base 15: mod_base = cm
  modified_base 16: mod_base = OTHER; note = 2-fluororibose adenine
  modified_base 17: mod_base = cm
  modified_base 18: mod_base = um
  modified_base 19: mod_base = gm
  modified_base 20: mod_base = um
  modified_base 21: mod_base = um
  modified_base 21..22: mod_base = OTHER; note = S-phosphorothioate
  modified_base 22: mod_base = um
  modified_base 22..23: mod_base = OTHER; note = S-phosphorothioate
  modified_base 23: mod_base = um
  source 1..23: mol_type = other RNA
ttatagagcaagaacactgtttt

SEQ ID NO: 200 - RNA, 23 nt, synthetic construct
  misc_feature 1..23: note = Synthetic: WV-47145
  misc_feature 1..23: note = Synthetic: SSR-0104475
  modified_base 1: mod_base = um
  modified_base 1..2: mod_base = OTHER; note = S-phosphorothioate
  modified_base 2: mod_base = OTHER; note = 2-fluororibose uracil
  modified_base 2..3: mod_base = OTHER; note = R-phosphorothioate
  modified_base 3: mod_base = OTHER; note = 2-O-methylribose adenine
  modified_base 3..4: mod_base = OTHER; note S-N-(1,3-dimethylimidazolidin-2-ylidene)phosphoramidate
  modified_base 4: mod_base = OTHER; note = 2-fluororibose uracil
  modified_base 5: mod_base = OTHER; note = 2-O-methylribose adenine
  modified_base 6: mod_base = OTHER; note = 2-fluororibose guanine
  modified_base 7: mod_base = OTHER; note = 2-O-methylribose adenine
  modified_base 8: mod_base = gm
  modified_base 9: mod_base = cm
  modified_base 10: mod_base = OTHER; note = 2-O-methylribose adenine
  modified_base 10..11: mod_base = OTHER; note S-N-(1,3-dimethylimidazolidin-2-ylidene)phosphoramidate
  modified_base 11: mod_base = OTHER; note = 2-fluororibose adenine
  modified_base 12: mod_base = gm
  modified_base 13: mod_base = OTHER; note = 2-O-methylribose adenine
  modified_base 14: mod_base = OTHER; note = 2-fluororibose adenine
  modified_base 15: mod_base = cm
  modified_base 16: mod_base = OTHER; note = 2-fluororibose adenine
  modified_base 17: mod_base = cm
  modified_base 18: mod_base = um
  modified_base 19: mod_base = gm
  modified_base 20: mod_base = um
  modified_base 21: mod_base = um
  modified_base 21..22: mod_base = OTHER; note = S-phosphorothioate
  modified_base 22: mod_base = um
  modified_base 22..23: mod_base = OTHER; note = S-phosphorothioate
  modified_base 23: mod_base = um
  source 1..23: mol_type = other RNA
ttatagagcaagaacactgtttt

SEQ ID NO: 201 - RNA, 23 nt, synthetic construct
  misc_feature 1..23: note = Synthetic: WV-43771
  misc_feature 1..23: note = Synthetic: SSR-0104569
  modified_base 1: mod_base = um
  modified_base 1..2: mod_base = OTHER; note = S-phosphorothioate
  modified_base 2: mod_base = OTHER; note = 2-fluororibose uracil
  modified_base 2..3: mod_base = OTHER; note = R-phosphorothioate
  modified_base 3: mod_base = OTHER; note = 2-O-methylribose adenine
  modified_base 4: mod_base = um
  modified_base 5: mod_base = OTHER; note = 2-O-methylribose adenine
  modified_base 6: mod_base = OTHER; note = 2-fluororibose guanine
  modified_base 7: mod_base = OTHER; note = 2-O-methylribose adenine
  modified_base 8: mod_base = OTHER; note = 2-fluororibose guanine
  modified_base 9: mod_base = OTHER; note = 2-fluororibose cytosine
  modified_base 10: mod_base = OTHER; note = 2-O-methylribose adenine
  modified_base 11: mod_base = OTHER; note = 2-O-methylribose adenine
  modified_base 12: mod_base = gm
  modified_base 13: mod_base = OTHER; note = 2-O-methylribose adenine
  modified_base 14: mod_base = OTHER; note = 2-fluororibose adenine
  modified_base 15: mod_base = cm
  modified_base 16: mod_base = OTHER; note = 2-fluororibose adenine
  modified_base 17: mod_base = cm
  modified_base 18: mod_base = um
  modified_base 19: mod_base = gm
  modified_base 20: mod_base = um
  modified_base 21: mod_base = um
  modified_base 21..22: mod_base = OTHER; note = S-phosphorothioate
  modified_base 22: mod_base = um
  modified_base 22..23: mod_base = OTHER; note = S-phosphorothioate
  modified_base 23: mod_base = um
  source 1..23: mol_type = other RNA
ttatagagcaagaacactgtttt

SEQ ID NO: 202 - RNA, 23 nt, synthetic construct
  misc_feature 1..23: note = Synthetic: WV-43773
  misc_feature 1..23: note = Synthetic: SSR-0104481
  modified_base 1: mod_base = um
  modified_base 1..2: mod_base = OTHER; note = S-phosphorothioate
  modified_base 2: mod_base = OTHER; note = 2-fluororibose uracil
  modified_base 2..3: mod_base = OTHER; note = R-phosphorothioate
  modified_base 3: mod_base = OTHER; note = 2-O-methylribose adenine
  modified_base 3..4: mod_base = OTHER; note S-N-(1,3-dimethylimidazolidin-2-ylidene)phosphoramidate
  modified_base 4: mod_base = um
  modified_base 5: mod_base = OTHER; note = 2-O-methylribose adenine
  modified_base 6: mod_base = OTHER; note = 2-fluororibose guanine
  modified_base 7: mod_base = OTHER; note = 2-O-methylribose adenine
  modified_base 8: mod_base = OTHER; note = 2-fluororibose guanine
  modified_base 9: mod_base = OTHER; note = 2-fluororibose cytosine
  modified_base 10: mod_base = OTHER; note = 2-O-methylribose adenine
  modified_base 10..11: mod_base = OTHER; note S-N-(1,3-dimethylimidazolidin-2-ylidene)phosphoramidate
  modified_base 11: mod_base = OTHER; note = 2-O-methylribose adenine
  modified_base 12: mod_base = gm
  modified_base 13: mod_base = OTHER; note = 2-O-methylribose adenine
  modified_base 14: mod_base = OTHER; note = 2-fluororibose adenine
  modified_base 15: mod_base = cm
  modified_base 16: mod_base = OTHER; note = 2-fluororibose adenine
  modified_base 17: mod_base = cm
  modified_base 18: mod_base = um
  modified_base 19: mod_base = gm
  modified_base 19..20: mod_base = OTHER; note S-N-(1,3-dimethylimidazolidin-2-ylidene)phosphoramidate
  modified_base 20: mod_base = um
  modified_base 21: mod_base = um
  modified_base 21..22: mod_base = OTHER; note = S-phosphorothioate
  modified_base 22: mod_base = um
  modified_base 22..23: mod_base = OTHER; note = S-phosphorothioate
  modified_base 23: mod_base = um
  source 1..23: mol_type = other RNA
ttatagagcaagaacactgtttt

SEQ ID NO: 203 - RNA, 23 nt, synthetic construct
  misc_feature 1..23: note = Synthetic: WV-43988
  misc_feature 1..23: note = Synthetic: SSR-0104474
  modified_base 1: mod_base = um
  modified_base 1..2: mod_base = OTHER; note = S-phosphorothioate
  modified_base 2: mod_base = OTHER; note = 2-fluororibose uracil
  modified_base 2..3: mod_base = OTHER; note = R-phosphorothioate
  modified_base 3: mod_base = OTHER; note = 2-O-methylribose adenine
  modified_base 3..4: mod_base = OTHER; note S-N-(1,3-dimethylimidazolidin-2-ylidene)phosphoramidate
  modified_base 4: mod_base = OTHER; note = 2-fluororibose uracil
  modified_base 5: mod_base = OTHER; note = 2-O-methylribose adenine
  modified_base 6: mod_base = OTHER; note = 2-fluororibose guanine
  modified_base 7: mod_base = OTHER; note = 2-O-methylribose adenine
  modified_base 8: mod_base = gm
  modified_base 9: mod_base = cm
  modified_base 10: mod_base = OTHER; note = 2-O-methylribose adenine
  modified_base 10..11: mod_base = OTHER; note S-N-(1,3-dimethylimidazolidin-2-ylidene)phosphoramidate
  modified_base 11: mod_base = OTHER; note = 2-fluororibose adenine
  modified_base 12: mod_base = gm
  modified_base 13: mod_base = OTHER; note = 2-O-methylribose adenine
  modified_base 14: mod_base = OTHER; note = 2-fluororibose adenine
  modified_base 15: mod_base = cm
  modified_base 16: mod_base = OTHER; note = 2-fluororibose adenine
  modified_base 17: mod_base = cm
  modified_base 18: mod_base = um
  modified_base 19: mod_base = gm
  modified_base 19..20: mod_base = OTHER; note S-N-(1,3-dimethylimidazolidin-2-ylidene)phosphoramidate
  modified_base 20: mod_base = OTHER; note = 2-fluororibose uracil
  modified_base 21: mod_base = um
  modified_base 21..22: mod_base = OTHER; note = S-phosphorothioate
  modified_base 22: mod_base = um
  modified_base 22..23: mod_base = OTHER; note = S-phosphorothioate
  modified_base 23: mod_base = um
  source 1..23: mol_type = other RNA
ttatagagcaagaacactgtttt

SEQ ID NO: 204 - RNA, 23 nt, synthetic construct
  misc_feature 1..23: note = Synthetic: WV-43989
  misc_feature 1..23: note = Synthetic: SSR-0104471
  modified_base 1: mod_base = um
  modified_base 1..2: mod_base = OTHER; note = S-phosphorothioate
  modified_base 2: mod_base = OTHER; note = 2-fluororibose uracil
  modified_base 2..3: mod_base = OTHER; note = R-phosphorothioate
  modified_base 3: mod_base = OTHER; note = 2-O-methylribose adenine
  modified_base 3..4: mod_base = OTHER; note S-N-(1,3-dimethylimidazolidin-2-ylidene)phosphoramidate
  modified_base 4: mod_base = OTHER; note = 2-fluororibose uracil
  modified_base 5: mod_base = OTHER; note = 2-O-methylribose adenine
  modified_base 6: mod_base = OTHER; note = 2-fluororibose guanine
  modified_base 7: mod_base = OTHER; note = 2-O-methylribose adenine
  modified_base 8: mod_base = gm
  modified_base 9: mod_base = cm
  modified_base 10: mod_base = OTHER; note = 2-fluororibose adenine
  modified_base 10..11: mod_base = OTHER; note S-N-(1,3-dimethylimidazolidin-2-ylidene)phosphoramidate
  modified_base 11: mod_base = OTHER; note = 2-O-methylribose adenine
  modified_base 12: mod_base = gm
  modified_base 13: mod_base = OTHER; note = 2-O-methylribose adenine
  modified_base 14: mod_base = OTHER; note = 2-fluororibose adenine
  modified_base 15: mod_base = cm
  modified_base 16: mod_base = OTHER; note = 2-fluororibose adenine
  modified_base 17: mod_base = cm
  modified_base 18: mod_base = um
  modified_base 19: mod_base = gm
  modified_base 19..20: mod_base = OTHER; note S-N-(1,3-dimethylimidazolidin-2-ylidene)phosphoramidate
  modified_base 20: mod_base = OTHER; note = 2-fluororibose uracil
  modified_base 21: mod_base = um
  modified_base 21..22: mod_base = OTHER; note = S-phosphorothioate
  modified_base 22: mod_base = um
  modified_base 22..23: mod_base = OTHER; note = S-phosphorothioate
  modified_base 23: mod_base = um
  source 1..23: mol_type = other RNA
ttatagagcaagaacactgtttt

SEQ ID NO: 205 - RNA, 23 nt, synthetic construct
  misc_feature 1..23: note = Synthetic: WV-43994
  misc_feature 1..23: note = Synthetic: SSR-0104438
  modified_base 1: mod_base = um
  modified_base 1..2: mod_base = OTHER; note = S-phosphorothioate
  modified_base 2: mod_base = OTHER; note = 2-fluororibose uracil
  modified_base 2..3: mod_base = OTHER; note = R-phosphorothioate
  modified_base 3: mod_base = OTHER; note = 2-fluororibose adenine
  modified_base 3..4: mod_base = OTHER; note S-N-(1,3-dimethylimidazolidin-2-ylidene)phosphoramidate
  modified_base 4: mod_base = OTHER; note = 2-fluororibose uracil
  modified_base 5: mod_base = OTHER; note = 2-O-methylribose adenine
  modified_base 6: mod_base = OTHER; note = 2-fluororibose guanine
  modified_base 7: mod_base = OTHER; note = 2-O-methylribose adenine
  modified_base 8: mod_base = OTHER; note = 2-fluororibose guanine
  modified_base 9: mod_base = cm
  modified_base 10: mod_base = OTHER; note = 2-fluororibose adenine
  modified_base 10..11: mod_base = OTHER; note S-N-(1,3-dimethylimidazolidin-2-ylidene)phosphoramidate
  modified_base 11: mod_base = OTHER; note = 2-fluororibose adenine
  modified_base 12: mod_base = gm
  modified_base 13: mod_base = OTHER; note = 2-O-methylribose adenine
  modified_base 14: mod_base = OTHER; note = 2-fluororibose adenine
  modified_base 15: mod_base = cm
  modified_base 16: mod_base = OTHER; note = 2-fluororibose adenine
  modified_base 17: mod_base = cm
  modified_base 18: mod_base = OTHER; note = 2-fluororibose uracil
  modified_base 19: mod_base = OTHER; note = 2-fluororibose guanine
  modified_base 19..20: mod_base = OTHER; note S-N-(1,3-dimethylimidazolidin-2-ylidene)phosphoramidate
  modified_base 20: mod_base = OTHER; note = 2-fluororibose uracil
  modified_base 21: mod_base = um
  modified_base 21..22: mod_base = OTHER; note = S-phosphorothioate
  modified_base 22: mod_base = um
  modified_base 22..23: mod_base = OTHER; note = S-phosphorothioate
  modified_base 23: mod_base = um
  source 1..23: mol_type = other RNA
ttatagagcaagaacactgtttt

SEQ ID NO: 206 - RNA, 23 nt, synthetic construct
  misc_feature 1..23: note = Synthetic: WV-43996
  misc_feature 1..23: note = Synthetic: SSR-0104460
  modified_base 1: mod_base = um
  modified_base 1..2: mod_base = OTHER; note = S-phosphorothioate
  modified_base 2: mod_base = OTHER; note = 2-fluororibose uracil
  modified_base 2..3: mod_base = OTHER; note = R-phosphorothioate
  modified_base 3: mod_base = OTHER; note = 2-O-methylribose adenine
  modified_base 3..4: mod_base = OTHER; note S-N-(1,3-dimethylimidazolidin-2-ylidene)phosphoramidate
  modified_base 4: mod_base = OTHER; note = 2-fluororibose uracil
  modified_base 5: mod_base = OTHER; note = 2-O-methylribose adenine
  modified_base 6: mod_base = OTHER; note = 2-fluororibose guanine
  modified_base 7: mod_base = OTHER; note = 2-O-methylribose adenine
  modified_base 8: mod_base = OTHER; note = 2-fluororibose guanine
  modified_base 9: mod_base = OTHER; note = 2-fluororibose cytosine
  modified_base 10: mod_base = OTHER; note = 2-O-methylribose adenine
  modified_base 10..11: mod_base = OTHER; note S-N-(1,3-dimethylimidazolidin-2-ylidene)phosphoramidate
  modified_base 11: mod_base = OTHER; note = 2-fluororibose adenine
  modified_base 12: mod_base = gm
  modified_base 13: mod_base = OTHER; note = 2-O-methylribose adenine
  modified_base 14: mod_base = OTHER; note = 2-fluororibose adenine
  modified_base 15: mod_base = cm
  modified_base 16: mod_base = OTHER; note = 2-fluororibose adenine
  modified_base 17: mod_base = cm
  modified_base 18: mod_base = um
  modified_base 19: mod_base = gm
  modified_base 19..20: mod_base = OTHER; note S-N-(1,3-dimethylimidazolidin-2-ylidene)phosphoramidate
  modified_base 20: mod_base = OTHER; note = 2-fluororibose uracil
  modified_base 21: mod_base = um
  modified_base 21..22: mod_base = OTHER; note = S-phosphorothioate
  modified_base 22: mod_base = um
  modified_base 22..23: mod_base = OTHER; note = S-phosphorothioate
  modified_base 23: mod_base = um
  source 1..23: mol_type = other RNA
ttatagagcaagaacactgtttt

SEQ ID NO: 207 - RNA, 23 nt, synthetic construct
  misc_feature 1..23: note = Synthetic: WV-43256
  misc_feature 1..23: note = Synthetic: SSR-0104468
  modified_base 1: mod_base = um
  modified_base 1..2: mod_base = OTHER; note = S-phosphorothioate
  modified_base 2: mod_base = OTHER; note = 2-fluororibose uracil
  modified_base 2..3: mod_base = OTHER; note = R-phosphorothioate
  modified_base 3: mod_base = OTHER; note = 2-O-methylribose adenine
  modified_base 3..4: mod_base = OTHER; note S-N-(1,3-dimethylimidazolidin-2-ylidene)phosphoramidate
  modified_base 4: mod_base = OTHER; note = 2-fluororibose uracil
  modified_base 5: mod_base = OTHER; note = 2-O-methylribose adenine
  modified_base 6: mod_base = OTHER; note = 2-fluororibose guanine
  modified_base 7: mod_base = OTHER; note = 2-O-methylribose adenine
  modified_base 8: mod_base = OTHER; note = 2-fluororibose guanine
  modified_base 9: mod_base = cm
  modified_base 10: mod_base = OTHER; note = 2-fluororibose adenine
  modified_base 10..11: mod_base = OTHER; note S-N-(1,3-dimethylimidazolidin-2-ylidene)phosphoramidate
  modified_base 11: mod_base = OTHER; note = 2-O-methylribose adenine
  modified_base 12: mod_base = gm
  modified_base 13: mod_base = OTHER; note = 2-O-methylribose adenine
  modified_base 14: mod_base = OTHER; note = 2-fluororibose adenine
  modified_base 15: mod_base = cm
  modified_base 16: mod_base = OTHER; note = 2-fluororibose adenine
  modified_base 17: mod_base = cm
  modified_base 18: mod_base = OTHER; note = 2-fluororibose uracil
  modified_base 19: mod_base = gm
  modified_base 19..20: mod_base = OTHER; note S-N-(1,3-dimethylimidazolidin-2-ylidene)phosphoramidate
  modified_base 20: mod_base = OTHER; note = 2-fluororibose uracil
  modified_base 21: mod_base = um
  modified_base 21..22: mod_base = OTHER; note = S-phosphorothioate
  modified_base 22: mod_base = um
  modified_base 22..23: mod_base = OTHER; note = S-phosphorothioate
  modified_base 23: mod_base = um
  source 1..23: mol_type = other RNA
ttatagagcaagaacactgtttt

SEQ ID NO: 208 - RNA, 23 nt, synthetic construct
  misc_feature 1..23: note = Synthetic: WV-46991
  misc_feature 1..23: note = Synthetic: SSR-0104716
  modified_base 1: mod_base = um
  modified_base 1..2: mod_base = OTHER; note = phosphorothioate
  modified_base 2: mod_base = OTHER; note = 2-fluororibose uracil
  modified_base 2..3: mod_base = OTHER; note = phosphorothioate
  modified_base 3: mod_base = OTHER; note = 2-O-methylribose adenine
  modified_base 4: mod_base = OTHER; note = 2-fluororibose uracil
  modified_base 5: mod_base = OTHER; note = 2-O-methylribose adenine
  modified_base 6: mod_base = OTHER; note = 2-fluororibose guanine
  modified_base 7: mod_base = OTHER; note = 2-O-methylribose adenine
  modified_base 8: mod_base = gm
  modified_base 9: mod_base = cm
  modified_base 10: mod_base = OTHER; note = 2-O-methylribose adenine
  modified_base 11: mod_base = OTHER; note = 2-fluororibose adenine
  modified_base 12: mod_base = gm
  modified_base 13: mod_base = OTHER; note = 2-O-methylribose adenine
  modified_base 14: mod_base = OTHER; note = 2-fluororibose adenine
  modified_base 15: mod_base = cm
  modified_base 16: mod_base = OTHER; note = 2-fluororibose adenine
  modified_base 17: mod_base = cm
  modified_base 18: mod_base = um
  modified_base 19: mod_base = gm
  modified_base 20: mod_base = OTHER; note = 2-fluororibose uracil
  modified_base 21: mod_base = um
  modified_base 21..22: mod_base = OTHER; note = phosphorothioate
  modified_base 22: mod_base = um
  modified_base 22..23: mod_base = OTHER; note = phosphorothioate
  modified_base 23: mod_base = um
  source 1..23: mol_type = other RNA
ttatagagcaagaacactgtttt

SEQ ID NO: 209 - RNA, 23 nt, synthetic construct
  misc_feature 1..23: note = Synthetic: WV-46992
  misc_feature 1..23: note = Synthetic: SSR-0104554
  modified_base 1: mod_base = um
  modified_base 1..2: mod_base = OTHER; note = S-phosphorothioate
  modified_base 2: mod_base = OTHER; note = 2-fluororibose uracil
  modified_base 2..3: mod_base = OTHER; note = R-phosphorothioate
  modified_base 3: mod_base = OTHER; note = 2-O-methylribose adenine
  modified_base 4: mod_base = OTHER; note = 2-fluororibose uracil
  modified_base 5: mod_base = OTHER; note = 2-O-methylribose adenine
  modified_base 6: mod_base = OTHER; note = 2-fluororibose guanine
  modified_base 7: mod_base = OTHER; note = 2-O-methylribose adenine
  modified_base 8: mod_base = gm
  modified_base 9: mod_base = cm
  modified_base 10: mod_base = OTHER; note = 2-O-methylribose adenine
  modified_base 11: mod_base = OTHER; note = 2-fluororibose adenine
  modified_base 12: mod_base = gm
  modified_base 13: mod_base = OTHER; note = 2-O-methylribose adenine
  modified_base 14: mod_base = OTHER; note = 2-fluororibose adenine
  modified_base 15: mod_base = cm
  modified_base 16: mod_base = OTHER; note = 2-fluororibose adenine
  modified_base 17: mod_base = cm
  modified_base 18: mod_base = um
  modified_base 19: mod_base = gm
  modified_base 20: mod_base = OTHER; note = 2-fluororibose uracil
  modified_base 21: mod_base = um
  modified_base 21..22: mod_base = OTHER; note = S-phosphorothioate
  modified_base 22: mod_base = um
  modified_base 22..23: mod_base = OTHER; note = S-phosphorothioate
  modified_base 23: mod_base = um
  source 1..23: mol_type = other RNA
ttatagagcaagaacactgtttt

SEQ ID NO: 210 - RNA, 23 nt, synthetic construct
  misc_feature 1..23: note = Synthetic: WV-46993
  misc_feature 1..23: note = Synthetic: SSR-0104221
  modified_base 1: mod_base = OTHER; note = deoxyribose thymine
  modified_base 1..2: mod_base = OTHER; note = S-phosphorothioate
  modified_base 2: mod_base = OTHER; note = 2-fluororibose uracil
  modified_base 2..3: mod_base = OTHER; note = R-phosphorothioate
  modified_base 3: mod_base = OTHER; note = 2-O-methylribose adenine
  modified_base 3..4: mod_base = OTHER; note S-N-(1,3-dimethylimidazolidin-2-ylidene)phosphoramidate
  modified_base 4: mod_base = OTHER; note = 2-fluororibose uracil
  modified_base 5: mod_base = OTHER; note = 2-O-methylribose adenine
  modified_base 6: mod_base = OTHER; note = 2-fluororibose guanine
  modified_base 7: mod_base = OTHER; note = 2-O-methylribose adenine
  modified_base 8: mod_base = gm
  modified_base 9: mod_base = cm
  modified_base 10: mod_base = OTHER; note = 2-O-methylribose adenine
  modified_base 10..11: mod_base = OTHER; note S-N-(1,3-dimethylimidazolidin-2-ylidene)phosphoramidate
  modified_base 11: mod_base = OTHER; note = 2-fluororibose adenine
  modified_base 12: mod_base = gm
  modified_base 13: mod_base = OTHER; note = 2-O-methylribose adenine
  modified_base 14: mod_base = OTHER; note = 2-fluororibose adenine
  modified_base 15: mod_base = cm
  modified_base 16: mod_base = OTHER; note = 2-fluororibose adenine
  modified_base 17: mod_base = cm
  modified_base 18: mod_base = um
  modified_base 19: mod_base = gm
  modified_base 19..20: mod_base = OTHER; note S-N-(1,3-dimethylimidazolidin-2-ylidene)phosphoramidate
  modified_base 20: mod_base = OTHER; note = 2-fluororibose uracil
  modified_base 21: mod_base = um
  modified_base 21..22: mod_base = OTHER; note = S-phosphorothioate
  modified_base 22: mod_base = um
  modified_base 22..23: mod_base = OTHER; note = S-phosphorothioate
  modified_base 23: mod_base = um
  source 1..23: mol_type = other RNA
ttatagagcaagaacactgtttt

SEQ ID NO: 211 - RNA, 23 nt, synthetic construct
  misc_feature 1..23: note = Synthetic: WV-46994
  misc_feature 1..23: note = Synthetic: SSR-0105679
  modified_base 1: mod_base = OTHER; note = phosphate linked to the 5' end of deoxyribose thymine
  modified_base 1..2: mod_base = OTHER; note = S-phosphorothioate
  modified_base 2: mod_base = OTHER; note = 2-fluororibose uracil
  modified_base 2..3: mod_base = OTHER; note = R-phosphorothioate
  modified_base 3: mod_base = OTHER; note = 2-O-methylribose adenine
  modified_base 3..4: mod_base = OTHER; note S-N-(1,3-dimethylimidazolidin-2-ylidene)phosphoramidate
  modified_base 4: mod_base = OTHER; note = 2-fluororibose uracil
  modified_base 5: mod_base = OTHER; note = 2-O-methylribose adenine
  modified_base 6: mod_base = OTHER; note = 2-fluororibose guanine
  modified_base 7: mod_base = OTHER; note = 2-O-methylribose adenine
  modified_base 8: mod_base = gm
  modified_base 9: mod_base = cm
  modified_base 10: mod_base = OTHER; note = 2-O-methylribose adenine
  modified_base 10..11: mod_base = OTHER; note S-N-(1,3-dimethylimidazolidin-2-ylidene)phosphoramidate
  modified_base 11: mod_base = OTHER; note = 2-fluororibose adenine
  modified_base 12: mod_base = gm
  modified_base 13: mod_base = OTHER; note = 2-O-methylribose adenine
  modified_base 14: mod_base = OTHER; note = 2-fluororibose adenine
  modified_base 15: mod_base = cm
  modified_base 16: mod_base = OTHER; note = 2-fluororibose adenine
  modified_base 17: mod_base = cm
  modified_base 18: mod_base = um
  modified_base 19: mod_base = gm
  modified_base 19..20: mod_base = OTHER; note S-N-(1,3-dimethylimidazolidin-2-ylidene)phosphoramidate
  modified_base 20: mod_base = OTHER; note = 2-fluororibose uracil
  modified_base 21: mod_base = um
  modified_base 21..22: mod_base = OTHER; note = S-phosphorothioate
  modified_base 22: mod_base = um
  modified_base 22..23: mod_base = OTHER; note = S-phosphorothioate
  modified_base 23: mod_base = um
  source 1..23: mol_type = other RNA
ttatagagcaagaacactgtttt

SEQ ID NO: 212 - RNA, 23 nt, synthetic construct
  misc_feature 1..23: note = Synthetic: WV-46995
  misc_feature 1..23: note = Synthetic: SSR-0105671
  modified_base 1: mod_base = OTHER; note = phosphate linked to the 5' end of S-5-methyl-deoxyribose thymine
  modified_base 1..2: mod_base = OTHER; note = S-phosphorothioate
  modified_base 2: mod_base = OTHER; note = 2-fluororibose uracil
  modified_base 2..3: mod_base = OTHER; note = R-phosphorothioate
  modified_base 3: mod_base = OTHER; note = 2-O-methylribose adenine
  modified_base 3..4: mod_base = OTHER; note S-N-(1,3-dimethylimidazolidin-2-ylidene)phosphoramidate
  modified_base 4: mod_base = OTHER; note = 2-fluororibose uracil
  modified_base 5: mod_base = OTHER; note = 2-O-methylribose adenine
  modified_base 6: mod_base = OTHER; note = 2-fluororibose guanine
  modified_base 7: mod_base = OTHER; note = 2-O-methylribose adenine
  modified_base 8: mod_base = gm
  modified_base 9: mod_base = cm
  modified_base 10: mod_base = OTHER; note = 2-O-methylribose adenine
  modified_base 10..11: mod_base = OTHER; note S-N-(1,3-dimethylimidazolidin-2-ylidene)phosphoramidate
  modified_base 11: mod_base = OTHER; note = 2-fluororibose adenine
  modified_base 12: mod_base = gm
  modified_base 13: mod_base = OTHER; note = 2-O-methylribose adenine
  modified_base 14: mod_base = OTHER; note = 2-fluororibose adenine
  modified_base 15: mod_base = cm
  modified_base 16: mod_base = OTHER; note = 2-fluororibose adenine
  modified_base 17: mod_base = cm
  modified_base 18: mod_base = um
  modified_base 19: mod_base = gm
  modified_base 19..20: mod_base = OTHER; note S-N-(1,3-dimethylimidazolidin-2-ylidene)phosphoramidate
  modified_base 20: mod_base = OTHER; note = 2-fluororibose uracil
  modified_base 21: mod_base = um
  modified_base 21..22: mod_base = OTHER; note = S-phosphorothioate
  modified_base 22: mod_base = um
  modified_base 22..23: mod_base = OTHER; note = S-phosphorothioate
  modified_base 23: mod_base = um
  source 1..23: mol_type = other RNA
ttatagagcaagaacactgtttt

SEQ ID NO: 213 - RNA, 23 nt, synthetic construct
  misc_feature 1..23: note = Synthetic: WV-46996
  misc_feature 1..23: note = Synthetic: SSR-0105663
  modified_base 1: mod_base = OTHER; note = phosphate linked to the 5' end of R-5-methyl-deoxyribose thymine
  modified_base 1..2: mod_base = OTHER; note = S-phosphorothioate
  modified_base 2: mod_base = OTHER; note = 2-fluororibose uracil
  modified_base 2..3: mod_base = OTHER; note = R-phosphorothioate
  modified_base 3: mod_base = OTHER; note = 2-O-methylribose adenine
  modified_base 3..4: mod_base = OTHER; note S-N-(1,3-dimethylimidazolidin-2-ylidene)phosphoramidate
  modified_base 4: mod_base = OTHER; note = 2-fluororibose uracil
  modified_base 5: mod_base = OTHER; note = 2-O-methylribose adenine
  modified_base 6: mod_base = OTHER; note = 2-fluororibose guanine
  modified_base 7: mod_base = OTHER; note = 2-O-methylribose adenine
  modified_base 8: mod_base = gm
  modified_base 9: mod_base = cm
  modified_base 10: mod_base = OTHER; note = 2-O-methylribose adenine
  modified_base 10..11: mod_base = OTHER; note S-N-(1,3-dimethylimidazolidin-2-ylidene)phosphoramidate
  modified_base 11: mod_base = OTHER; note = 2-fluororibose adenine
  modified_base 12: mod_base = gm
  modified_base 13: mod_base = OTHER; note = 2-O-methylribose adenine
  modified_base 14: mod_base = OTHER; note = 2-fluororibose adenine
  modified_base 15: mod_base = cm
  modified_base 16: mod_base = OTHER; note = 2-fluororibose adenine
  modified_base 17: mod_base = cm
  modified_base 18: mod_base = um
  modified_base 19: mod_base = gm
  modified_base 19..20: mod_base = OTHER; note S-N-(1,3-dimethylimidazolidin-2-ylidene)phosphoramidate
  modified_base 20: mod_base = OTHER; note = 2-fluororibose uracil
  modified_base 21: mod_base = um
  modified_base 21..22: mod_base = OTHER; note = S-phosphorothioate
  modified_base 22: mod_base = um
  modified_base 22..23: mod_base = OTHER; note = S-phosphorothioate
  modified_base 23: mod_base = um
  source 1..23: mol_type = other RNA
ttatagagcaagaacactgtttt

SEQ ID NO: 214 - RNA, 23 nt, synthetic construct
  misc_feature 1..23: note = Synthetic: WV-46997
  misc_feature 1..23: note = Synthetic: SSR-0104213
  modified_base 1: mod_base = OTHER; note = 5-(E)-vinylphosphonate-2,5-deoxyribose thymine
  modified_base 1..2: mod_base = OTHER; note = S-phosphorothioate
  modified_base 2: mod_base = OTHER; note = 2-fluororibose uracil
  modified_base 2..3: mod_base = OTHER; note = R-phosphorothioate
  modified_base 3: mod_base = OTHER; note = 2-O-methylribose adenine
  modified_base 3..4: mod_base = OTHER; note S-N-(1,3-dimethylimidazolidin-2-ylidene)phosphoramidate
  modified_base 4: mod_base = OTHER; note = 2-fluororibose uracil
  modified_base 5: mod_base = OTHER; note = 2-O-methylribose adenine
  modified_base 6: mod_base = OTHER; note = 2-fluororibose guanine
  modified_base 7: mod_base = OTHER; note = 2-O-methylribose adenine
  modified_base 8: mod_base = gm
  modified_base 9: mod_base = cm
  modified_base 10: mod_base = OTHER; note = 2-O-methylribose adenine
  modified_base 10..11: mod_base = OTHER; note S-N-(1,3-dimethylimidazolidin-2-ylidene)phosphoramidate
  modified_base 11: mod_base = OTHER; note = 2-fluororibose adenine
  modified_base 12: mod_base = gm
  modified_base 13: mod_base = OTHER; note = 2-O-methylribose adenine
  modified_base 14: mod_base = OTHER; note = 2-fluororibose adenine
  modified_base 15: mod_base = cm
  modified_base 16: mod_base = OTHER; note = 2-fluororibose adenine
  modified_base 17: mod_base = cm
  modified_base 18: mod_base = um
  modified_base 19: mod_base = gm
  modified_base 19..20: mod_base = OTHER; note S-N-(1,3-dimethylimidazolidin-2-ylidene)phosphoramidate
  modified_base 20: mod_base = OTHER; note = 2-fluororibose uracil
  modified_base 21: mod_base = um
  modified_base 21..22: mod_base = OTHER; note = S-phosphorothioate
  modified_base 22: mod_base = um
  modified_base 22..23: mod_base = OTHER; note = S-phosphorothioate
  modified_base 23: mod_base = um
  source 1..23: mol_type = other RNA
ttatagagcaagaacactgtttt

SEQ ID NO: 215 - RNA, 23 nt, synthetic construct
  misc_feature 1..23: note = Synthetic: WV-46998
  misc_feature 1..23: note = Synthetic: SSR-0104197
  modified_base 1: mod_base = OTHER; note = 5-(S)-methyl-2,5-deoxyribose thymine
  modified_base 1..2: mod_base = OTHER; note = S-phosphorothioate
  modified_base 2: mod_base = OTHER; note = 2-fluororibose uracil
  modified_base 2..3: mod_base = OTHER; note = R-phosphorothioate
  modified_base 3: mod_base = OTHER; note = 2-O-methylribose adenine
  modified_base 3..4: mod_base = OTHER; note S-N-(1,3-dimethylimidazolidin-2-ylidene)phosphoramidate
  modified_base 4: mod_base = OTHER; note = 2-fluororibose uracil
  modified_base 5: mod_base = OTHER; note = 2-O-methylribose adenine
  modified_base 6: mod_base = OTHER; note = 2-fluororibose guanine
  modified_base 7: mod_base = OTHER; note = 2-O-methylribose adenine
  modified_base 8: mod_base = gm
  modified_base 9: mod_base = cm
  modified_base 10: mod_base = OTHER; note = 2-O-methylribose adenine
  modified_base 10..11: mod_base = OTHER; note S-N-(1,3-dimethylimidazolidin-2-ylidene)phosphoramidate
  modified_base 11: mod_base = OTHER; note = 2-fluororibose adenine
  modified_base 12: mod_base = gm
  modified_base 13: mod_base = OTHER; note = 2-O-methylribose adenine
  modified_base 14: mod_base = OTHER; note = 2-fluororibose adenine
  modified_base 15: mod_base = cm
  modified_base 16: mod_base = OTHER; note = 2-fluororibose adenine
  modified_base 17: mod_base = cm
  modified_base 18: mod_base = um
  modified_base 19: mod_base = gm
  modified_base 19..20: mod_base = OTHER; note S-N-(1,3-dimethylimidazolidin-2-ylidene)phosphoramidate
  modified_base 20: mod_base = OTHER; note = 2-fluororibose uracil
  modified_base 21: mod_base = um
  modified_base 21..22: mod_base = OTHER; note = S-phosphorothioate
  modified_base 22: mod_base = um
  modified_base 22..23: mod_base = OTHER; note = S-phosphorothioate
  modified_base 23: mod_base = um
  source 1..23: mol_type = other RNA
ttatagagcaagaacactgtttt

SEQ ID NO: 216 - RNA, 23 nt, synthetic construct
  misc_feature 1..23: note = Synthetic: WV-46999
  misc_feature 1..23: note = Synthetic: SSR-0104183
  modified_base 1: mod_base = OTHER; note = 5-(R)-methyl-2,5-deoxyribose thymine
  modified_base 1..2: mod_base = OTHER; note = S-phosphorothioate
  modified_base 2: mod_base = OTHER; note = 2-fluororibose uracil
  modified_base 2..3: mod_base = OTHER; note = R-phosphorothioate
  modified_base 3: mod_base = OTHER; note = 2-O-methylribose adenine
  modified_base 3..4: mod_base = OTHER; note S-N-(1,3-dimethylimidazolidin-2-ylidene)phosphoramidate
  modified_base 4: mod_base = OTHER; note = 2-fluororibose uracil
  modified_base 5: mod_base = OTHER; note = 2-O-methylribose adenine
  modified_base 6: mod_base = OTHER; note = 2-fluororibose guanine
  modified_base 7: mod_base = OTHER; note = 2-O-methylribose adenine
  modified_base 8: mod_base = gm
  modified_base 9: mod_base = cm
  modified_base 10: mod_base = OTHER; note = 2-O-methylribose adenine
  modified_base 10..11: mod_base = OTHER; note S-N-(1,3-dimethylimidazolidin-2-ylidene)phosphoramidate
  modified_base 11: mod_base = OTHER; note = 2-fluororibose adenine
  modified_base 12: mod_base = gm
  modified_base 13: mod_base = OTHER; note = 2-O-methylribose adenine
  modified_base 14: mod_base = OTHER; note = 2-fluororibose adenine
  modified_base 15: mod_base = cm
  modified_base 16: mod_base = OTHER; note = 2-fluororibose adenine
  modified_base 17: mod_base = cm
  modified_base 18: mod_base = um
  modified_base 19: mod_base = gm
  modified_base 19..20: mod_base = OTHER; note S-N-(1,3-dimethylimidazolidin-2-ylidene)phosphoramidate
  modified_base 20: mod_base = OTHER; note = 2-fluororibose uracil
  modified_base 21: mod_base = um
  modified_base 21..22: mod_base = OTHER; note = S-phosphorothioate
  modified_base 22: mod_base = um
  modified_base 22..23: mod_base = OTHER; note = S-phosphorothioate
  modified_base 23: mod_base = um
  source 1..23: mol_type = other RNA
ttatagagcaagaacactgtttt

SEQ ID NO: 217 - RNA, 23 nt, synthetic construct
  misc_feature 1..23: note = Synthetic: WV-47000
  misc_feature 1..23: note = Synthetic: SSR-0104339
  modified_base 1: mod_base = um
  modified_base 1..2: mod_base = OTHER; note = R-phosphorothioate
  modified_base 2: mod_base = OTHER; note = 2-fluororibose uracil
  modified_base 2..3: mod_base = OTHER; note = S-phosphorothioate
  modified_base 3: mod_base = OTHER; note = 2-O-methylribose adenine
  modified_base 4: mod_base = OTHER; note = 2-fluororibose uracil
  modified_base 5: mod_base = OTHER; note = 2-O-methylribose adenine
  modified_base 6: mod_base = OTHER; note = 2-fluororibose guanine
  modified_base 7: mod_base = OTHER; note = 2-O-methylribose adenine
  modified_base 8: mod_base = gm
  modified_base 9: mod_base = cm
  modified_base 10: mod_base = OTHER; note = 2-O-methylribose adenine
  modified_base 11: mod_base = OTHER; note = 2-fluororibose adenine
  modified_base 12: mod_base = gm
  modified_base 13: mod_base = OTHER; note = 2-O-methylribose adenine
  modified_base 14: mod_base = OTHER; note = 2-fluororibose adenine
  modified_base 15: mod_base = cm
  modified_base 16: mod_base = OTHER; note = 2-fluororibose adenine
  modified_base 17: mod_base = cm
  modified_base 18: mod_base = um
  modified_base 19: mod_base = gm
  modified_base 20: mod_base = OTHER; note = 2-fluororibose uracil
  modified_base 21: mod_base = um
  modified_base 21..22: mod_base = OTHER; note = S-phosphorothioate
  modified_base 22: mod_base = um
  modified_base 22..23: mod_base = OTHER; note = S-phosphorothioate
  modified_base 23: mod_base = um
  source 1..23: mol_type = other RNA
ttatagagcaagaacactgtttt

SEQ ID NO: 218 - RNA, 23 nt, synthetic construct
  misc_feature 1..23: note = Synthetic: WV-47001
  misc_feature 1..23: note = Synthetic: SSR-0104279
  modified_base 1: mod_base = um
  modified_base 1..2: mod_base = OTHER; note = R-phosphorothioate
  modified_base 2: mod_base = OTHER; note = 2-fluororibose uracil
  modified_base 2..3: mod_base = OTHER; note = S-phosphorothioate
  modified_base 3: mod_base = OTHER; note = 2-O-methylribose adenine
  modified_base 3..4: mod_base = OTHER; note S-N-(1,3-dimethylimidazolidin-2-ylidene)phosphoramidate
  modified_base 4: mod_base = OTHER; note = 2-fluororibose uracil
  modified_base 5: mod_base = OTHER; note = 2-O-methylribose adenine
  modified_base 6: mod_base = OTHER; note = 2-fluororibose guanine
  modified_base 7: mod_base = OTHER; note = 2-O-methylribose adenine
  modified_base 8: mod_base = gm
  modified_base 9: mod_base = cm
  modified_base 10: mod_base = OTHER; note = 2-O-methylribose adenine
  modified_base 10..11: mod_base = OTHER; note S-N-(1,3-dimethylimidazolidin-2-ylidene)phosphoramidate
  modified_base 11: mod_base = OTHER; note = 2-fluororibose adenine
  modified_base 12: mod_base = gm
  modified_base 13: mod_base = OTHER; note = 2-O-methylribose adenine
  modified_base 14: mod_base = OTHER; note = 2-fluororibose adenine
  modified_base 15: mod_base = cm
  modified_base 16: mod_base = OTHER; note = 2-fluororibose adenine
  modified_base 17: mod_base = cm
  modified_base 18: mod_base = um
  modified_base 19: mod_base = gm
  modified_base 19..20: mod_base = OTHER; note S-N-(1,3-dimethylimidazolidin-2-ylidene)phosphoramidate
  modified_base 20: mod_base = OTHER; note = 2-fluororibose uracil
  modified_base 21: mod_base = um
  modified_base 21..22: mod_base = OTHER; note = S-phosphorothioate
  modified_base 22: mod_base = um
  modified_base 22..23: mod_base = OTHER; note = S-phosphorothioate
  modified_base 23: mod_base = um
  source 1..23: mol_type = other RNA
ttatagagcaagaacactgtttt

SEQ ID NO: 219 - RNA, 23 nt, synthetic construct
  misc_feature 1..23: note = Synthetic: WV-47002
  misc_feature 1..23: note = Synthetic: SSR-0104217
  modified_base 1: mod_base = OTHER; note = deoxyribose thymine
  modified_base 1..2: mod_base = OTHER; note = R-phosphorothioate
  modified_base 2: mod_base = OTHER; note = 2-fluororibose uracil
  modified_base 2..3: mod_base = OTHER; note = S-phosphorothioate
  modified_base 3: mod_base = OTHER; note = 2-O-methylribose adenine
  modified_base 3..4: mod_base = OTHER; note S-N-(1,3-dimethylimidazolidin-2-ylidene)phosphoramidate
  modified_base 4: mod_base = OTHER; note = 2-fluororibose uracil
  modified_base 5: mod_base = OTHER; note = 2-O-methylribose adenine
  modified_base 6: mod_base = OTHER; note = 2-fluororibose guanine
  modified_base 7: mod_base = OTHER; note = 2-O-methylribose adenine
  modified_base 8: mod_base = gm
  modified_base 9: mod_base = cm
  modified_base 10: mod_base = OTHER; note = 2-O-methylribose adenine
  modified_base 10..11: mod_base = OTHER; note S-N-(1,3-dimethylimidazolidin-2-ylidene)phosphoramidate
  modified_base 11: mod_base = OTHER; note = 2-fluororibose adenine
  modified_base 12: mod_base = gm
  modified_base 13: mod_base = OTHER; note = 2-O-methylribose adenine
  modified_base 14: mod_base = OTHER; note = 2-fluororibose adenine
  modified_base 15: mod_base = cm
  modified_base 16: mod_base = OTHER; note = 2-fluororibose adenine
  modified_base 17: mod_base = cm
  modified_base 18: mod_base = um
  modified_base 19: mod_base = gm
  modified_base 19..20: mod_base = OTHER; note S-N-(1,3-dimethylimidazolidin-2-ylidene)phosphoramidate
  modified_base 20: mod_base = OTHER; note = 2-fluororibose uracil
  modified_base 21: mod_base = um
  modified_base 21..22: mod_base = OTHER; note = S-phosphorothioate
  modified_base 22: mod_base = um
  modified_base 22..23: mod_base = OTHER; note = S-phosphorothioate
  modified_base 23: mod_base = um
  source 1..23: mol_type = other RNA
ttatagagcaagaacactgtttt

SEQ ID NO: 220 - RNA, 23 nt, synthetic construct
  misc_feature 1..23: note = Synthetic: WV-47003
  misc_feature 1..23: note = Synthetic: SSR-0105675
  modified_base 1: mod_base = OTHER; note = phosphate linked to the 5' end of deoxyribose thymine
  modified_base 1..2: mod_base = OTHER; note = R-phosphorothioate
  modified_base 2: mod_base = OTHER; note = 2-fluororibose uracil
  modified_base 2..3: mod_base = OTHER; note = S-phosphorothioate
  modified_base 3: mod_base = OTHER; note = 2-O-methylribose adenine
  modified_base 3..4: mod_base = OTHER; note S-N-(1,3-dimethylimidazolidin-2-ylidene)phosphoramidate
  modified_base 4: mod_base = OTHER; note = 2-fluororibose uracil
  modified_base 5: mod_base = OTHER; note = 2-O-methylribose adenine
  modified_base 6: mod_base = OTHER; note = 2-fluororibose guanine
  modified_base 7: mod_base = OTHER; note = 2-O-methylribose adenine
  modified_base 8: mod_base = gm
  modified_base 9: mod_base = cm
  modified_base 10: mod_base = OTHER; note = 2-O-methylribose adenine
  modified_base 10..11: mod_base = OTHER; note S-N-(1,3-dimethylimidazolidin-2-ylidene)phosphoramidate
  modified_base 11: mod_base = OTHER; note = 2-fluororibose adenine
  modified_base 12: mod_base = gm
  modified_base 13: mod_base = OTHER; note = 2-O-methylribose adenine
  modified_base 14: mod_base = OTHER; note = 2-fluororibose adenine
  modified_base 15: mod_base = cm
  modified_base 16: mod_base = OTHER; note = 2-fluororibose adenine
  modified_base 17: mod_base = cm
  modified_base 18: mod_base = um
  modified_base 19: mod_base = gm
  modified_base 19..20: mod_base = OTHER; note S-N-(1,3-dimethylimidazolidin-2-ylidene)phosphoramidate
  modified_base 20: mod_base = OTHER; note = 2-fluororibose uracil
  modified_base 21: mod_base = um
  modified_base 21..22: mod_base = OTHER; note = S-phosphorothioate
  modified_base 22: mod_base = um
  modified_base 22..23: mod_base = OTHER; note = S-phosphorothioate
  modified_base 23: mod_base = um
  source 1..23: mol_type = other RNA
ttatagagcaagaacactgtttt

SEQ ID NO: 221 - RNA, 23 nt, synthetic construct
  misc_feature 1..23: note = Synthetic: WV-47004
  misc_feature 1..23: note = Synthetic: SSR-0105667
  modified_base 1: mod_base = OTHER; note = phosphate linked to the 5' end of S-5-methyl-deoxyribose thymine
  modified_base 1..2: mod_base = OTHER; note = R-phosphorothioate
  modified_base 2: mod_base = OTHER; note = 2-fluororibose uracil
  modified_base 2..3: mod_base = OTHER; note = S-phosphorothioate
  modified_base 3: mod_base = OTHER; note = 2-O-methylribose adenine
  modified_base 3..4: mod_base = OTHER; note S-N-(1,3-dimethylimidazolidin-2-ylidene)phosphoramidate
  modified_base 4: mod_base = OTHER; note = 2-fluororibose uracil
  modified_base 5: mod_base = OTHER; note = 2-O-methylribose adenine
  modified_base 6: mod_base = OTHER; note = 2-fluororibose guanine
  modified_base 7: mod_base = OTHER; note = 2-O-methylribose adenine
  modified_base 8: mod_base = gm
  modified_base 9: mod_base = cm
  modified_base 10: mod_base = OTHER; note = 2-O-methylribose adenine
  modified_base 10..11: mod_base = OTHER; note S-N-(1,3-dimethylimidazolidin-2-ylidene)phosphoramidate
  modified_base 11: mod_base = OTHER; note = 2-fluororibose adenine
  modified_base 12: mod_base = gm
  modified_base 13: mod_base = OTHER; note = 2-O-methylribose adenine
  modified_base 14: mod_base = OTHER; note = 2-fluororibose adenine
  modified_base 15: mod_base = cm
  modified_base 16: mod_base = OTHER; note = 2-fluororibose adenine
  modified_base 17: mod_base = cm
  modified_base 18: mod_base = um
  modified_base 19: mod_base = gm
  modified_base 19..20: mod_base = OTHER; note S-N-(1,3-dimethylimidazolidin-2-ylidene)phosphoramidate
  modified_base 20: mod_base = OTHER; note = 2-fluororibose uracil
  modified_base 21: mod_base = um
  modified_base 21..22: mod_base = OTHER; note = S-phosphorothioate
  modified_base 22: mod_base = um
  modified_base 22..23: mod_base = OTHER; note = S-phosphorothioate
  modified_base 23: mod_base = um
  source 1..23: mol_type = other RNA
ttatagagcaagaacactgtttt

SEQ ID NO: 222 - RNA, 23 nt, synthetic construct
  misc_feature 1..23: note = Synthetic: WV-47005
  misc_feature 1..23: note = Synthetic: SSR-0105659
  modified_base 1: mod_base = OTHER; note = phosphate linked to the 5' end of R-5-methyl-deoxyribose thymine
  modified_base 1..2: mod_base = OTHER; note = R-phosphorothioate
  modified_base 2: mod_base = OTHER; note = 2-fluororibose uracil
  modified_base 2..3: mod_base = OTHER; note = S-phosphorothioate
  modified_base 3: mod_base = OTHER; note = 2-O-methylribose adenine
  modified_base 3..4: mod_base = OTHER; note S-N-(1,3-dimethylimidazolidin-2-ylidene)phosphoramidate
  modified_base 4: mod_base = OTHER; note = 2-fluororibose uracil
  modified_base 5: mod_base = OTHER; note = 2-O-methylribose adenine
  modified_base 6: mod_base = OTHER; note = 2-fluororibose guanine
  modified_base 7: mod_base = OTHER; note = 2-O-methylribose adenine
  modified_base 8: mod_base = gm
  modified_base 9: mod_base = cm
  modified_base 10: mod_base = OTHER; note = 2-O-methylribose adenine
  modified_base 10..11: mod_base = OTHER; note S-N-(1,3-dimethylimidazolidin-2-ylidene)phosphoramidate
  modified_base 11: mod_base = OTHER; note = 2-fluororibose adenine
  modified_base 12: mod_base = gm
  modified_base 13: mod_base = OTHER; note = 2-O-methylribose adenine
  modified_base 14: mod_base = OTHER; note = 2-fluororibose adenine
  modified_base 15: mod_base = cm
  modified_base 16: mod_base = OTHER; note = 2-fluororibose adenine
  modified_base 17: mod_base = cm
  modified_base 18: mod_base = um
  modified_base 19: mod_base = gm
  modified_base 19..20: mod_base = OTHER; note S-N-(1,3-dimethylimidazolidin-2-ylidene)phosphoramidate
  modified_base 20: mod_base = OTHER; note = 2-fluororibose uracil
  modified_base 21: mod_base = um
  modified_base 21..22: mod_base = OTHER; note = S-phosphorothioate
  modified_base 22: mod_base = um
  modified_base 22..23: mod_base = OTHER; note = S-phosphorothioate
  modified_base 23: mod_base = um
  source 1..23: mol_type = other RNA
ttatagagcaagaacactgtttt

SEQ ID NO: 223 - RNA, 23 nt, synthetic construct
  misc_feature 1..23: note = Synthetic: WV-47006
  misc_feature 1..23: note = Synthetic: SSR-0104209
  modified_base 1: mod_base = OTHER; note = 5-(E)-vinylphosphonate-2,5-deoxyribose thymine
  modified_base 1..2: mod_base = OTHER; note = R-phosphorothioate
  modified_base 2: mod_base = OTHER; note = 2-fluororibose uracil
  modified_base 2..3: mod_base = OTHER; note = S-phosphorothioate
  modified_base 3: mod_base = OTHER; note = 2-O-methylribose adenine
  modified_base 3..4: mod_base = OTHER; note S-N-(1,3-dimethylimidazolidin-2-ylidene)phosphoramidate
  modified_base 4: mod_base = OTHER; note = 2-fluororibose uracil
  modified_base 5: mod_base = OTHER; note = 2-O-methylribose adenine
  modified_base 6: mod_base = OTHER; note = 2-fluororibose guanine
  modified_base 7: mod_base = OTHER; note = 2-O-methylribose adenine
  modified_base 8: mod_base = gm
  modified_base 9: mod_base = cm
  modified_base 10: mod_base = OTHER; note = 2-O-methylribose adenine
  modified_base 10..11: mod_base = OTHER; note S-N-(1,3-dimethylimidazolidin-2-ylidene)phosphoramidate
  modified_base 11: mod_base = OTHER; note = 2-fluororibose adenine
  modified_base 12: mod_base = gm
  modified_base 13: mod_base = OTHER; note = 2-O-methylribose adenine
  modified_base 14: mod_base = OTHER; note = 2-fluororibose adenine
  modified_base 15: mod_base = cm
  modified_base 16: mod_base = OTHER; note = 2-fluororibose adenine
  modified_base 17: mod_base = cm
  modified_base 18: mod_base = um
  modified_base 19: mod_base = gm
  modified_base 19..20: mod_base = OTHER; note S-N-(1,3-dimethylimidazolidin-2-ylidene)phosphoramidate
  modified_base 20: mod_base = OTHER; note = 2-fluororibose uracil
  modified_base 21: mod_base = um
  modified_base 21..22: mod_base = OTHER; note = S-phosphorothioate
  modified_base 22: mod_base = um
  modified_base 22..23: mod_base = OTHER; note = S-phosphorothioate
  modified_base 23: mod_base = um
  source 1..23: mol_type = other RNA
ttatagagcaagaacactgtttt

SEQ ID NO: 224 - RNA, 23 nt, synthetic construct
  misc_feature 1..23: note = Synthetic: WV-47007
  misc_feature 1..23: note = Synthetic: SSR-0104193
  modified_base 1: mod_base = OTHER; note = 5-(S)-methyl-2,5-deoxyribose thymine
  modified_base 1..2: mod_base = OTHER; note = R-phosphorothioate
  modified_base 2: mod_base = OTHER; note = 2-fluororibose uracil
  modified_base 2..3: mod_base = OTHER; note = S-phosphorothioate
  modified_base 3: mod_base = OTHER; note = 2-O-methylribose adenine
  modified_base 3..4: mod_base = OTHER; note S-N-(1,3-dimethylimidazolidin-2-ylidene)phosphoramidate
  modified_base 4: mod_base = OTHER; note = 2-fluororibose uracil
  modified_base 5: mod_base = OTHER; note = 2-O-methylribose adenine
  modified_base 6: mod_base = OTHER; note = 2-fluororibose guanine
  modified_base 7: mod_base = OTHER; note = 2-O-methylribose adenine
  modified_base 8: mod_base = gm
  modified_base 9: mod_base = cm
  modified_base 10: mod_base = OTHER; note = 2-O-methylribose adenine
  modified_base 10..11: mod_base = OTHER; note S-N-(1,3-dimethylimidazolidin-2-ylidene)phosphoramidate
  modified_base 11: mod_base = OTHER; note = 2-fluororibose adenine
  modified_base 12: mod_base = gm
  modified_base 13: mod_base = OTHER; note = 2-O-methylribose adenine
  modified_base 14: mod_base = OTHER; note = 2-fluororibose adenine
  modified_base 15: mod_base = cm
  modified_base 16: mod_base = OTHER; note = 2-fluororibose adenine
  modified_base 17: mod_base = cm
  modified_base 18: mod_base = um
  modified_base 19: mod_base = gm
  modified_base 19..20: mod_base = OTHER; note S-N-(1,3-dimethylimidazolidin-2-ylidene)phosphoramidate
  modified_base 20: mod_base = OTHER; note = 2-fluororibose uracil
  modified_base 21: mod_base = um
  modified_base 21..22: mod_base = OTHER; note = S-phosphorothioate
  modified_base 22: mod_base = um
  modified_base 22..23: mod_base = OTHER; note = S-phosphorothioate
  modified_base 23: mod_base = um
  source 1..23: mol_type = other RNA
ttatagagcaagaacactgtttt

SEQ ID NO: 225 - RNA, 23 nt, synthetic construct
  misc_feature 1..23: note = Synthetic: WV-47008
  misc_feature 1..23: note = Synthetic: SSR-0104179
  modified_base 1: mod_base = OTHER; note = 5-(R)-methyl-2,5-deoxyribose thymine
  modified_base 1..2: mod_base = OTHER; note = R-phosphorothioate
  modified_base 2: mod_base = OTHER; note = 2-fluororibose uracil
  modified_base 2..3: mod_base = OTHER; note = S-phosphorothioate
  modified_base 3: mod_base = OTHER; note = 2-O-methylribose adenine
  modified_base 3..4: mod_base = OTHER; note S-N-(1,3-dimethylimidazolidin-2-ylidene)phosphoramidate
  modified_base 4: mod_base = OTHER; note = 2-fluororibose uracil
  modified_base 5: mod_base = OTHER; note = 2-O-methylribose adenine
  modified_base 6: mod_base = OTHER; note = 2-fluororibose guanine
  modified_base 7: mod_base = OTHER; note = 2-O-methylribose adenine
  modified_base 8: mod_base = gm
  modified_base 9: mod_base = cm
  modified_base 10: mod_base = OTHER; note = 2-O-methylribose adenine
  modified_base 10..11: mod_base = OTHER; note S-N-(1,3-dimethylimidazolidin-2-ylidene)phosphoramidate
  modified_base 11: mod_base = OTHER; note = 2-fluororibose adenine
  modified_base 12: mod_base = gm
  modified_base 13: mod_base = OTHER; note = 2-O-methylribose adenine
  modified_base 14: mod_base = OTHER; note = 2-fluororibose adenine
  modified_base 15: mod_base = cm
  modified_base 16: mod_base = OTHER; note = 2-fluororibose adenine
  modified_base 17: mod_base = cm
  modified_base 18: mod_base = um
  modified_base 19: mod_base = gm
  modified_base 19..20: mod_base = OTHER; note S-N-(1,3-dimethylimidazolidin-2-ylidene)phosphoramidate
  modified_base 20: mod_base = OTHER; note = 2-fluororibose uracil
  modified_base 21: mod_base = um
  modified_base 21..22: mod_base = OTHER; note = S-phosphorothioate
  modified_base 22: mod_base = um
  modified_base 22..23: mod_base = OTHER; note = S-phosphorothioate
  modified_base 23: mod_base = um
  source 1..23: mol_type = other RNA
ttatagagcaagaacactgtttt

SEQ ID NO: 226 - RNA, 23 nt, synthetic construct
  misc_feature 1..23: note = Synthetic: WV-47009
  misc_feature 1..23: note = Synthetic: SSR-0104715
  modified_base 1: mod_base = um
  modified_base 1..2: mod_base = OTHER; note = phosphorothioate
  modified_base 2: mod_base = OTHER; note = 2-fluororibose uracil
  modified_base 2..3: mod_base = OTHER; note = phosphorothioate
  modified_base 3: mod_base = OTHER; note = 2-O-methylribose adenine
  modified_base 4: mod_base = OTHER; note = 2-fluororibose uracil
  modified_base 5: mod_base = OTHER; note = 2-O-methylribose adenine
  modified_base 6: mod_base = OTHER; note = 2-fluororibose guanine
  modified_base 7: mod_base = OTHER; note = 2-O-methylribose adenine
  modified_base 8: mod_base = OTHER; note = 2-fluororibose guanine
  modified_base 9: mod_base = OTHER; note = 2-fluororibose cytosine
  modified_base 10: mod_base = OTHER; note = 2-O-methylribose adenine
  modified_base 11: mod_base = OTHER; note = 2-fluororibose adenine
  modified_base 12: mod_base = gm
  modified_base 13: mod_base = OTHER; note = 2-O-methylribose adenine
  modified_base 14: mod_base = OTHER; note = 2-fluororibose adenine
  modified_base 15: mod_base = cm
  modified_base 16: mod_base = OTHER; note = 2-fluororibose adenine
  modified_base 17: mod_base = cm
  modified_base 18: mod_base = um
  modified_base 19: mod_base = gm
  modified_base 20: mod_base = OTHER; note = 2-fluororibose uracil
  modified_base 21: mod_base = um
  modified_base 21..22: mod_base = OTHER; note = phosphorothioate
  modified_base 22: mod_base = um
  modified_base 22..23: mod_base = OTHER; note = phosphorothioate
  modified_base 23: mod_base = um
  source 1..23: mol_type = other RNA
ttatagagcaagaacactgtttt

SEQ ID NO: 227 - RNA, 23 nt, synthetic construct
  misc_feature 1..23: note = Synthetic: WV-47010
  misc_feature 1..23: note = Synthetic: SSR-0104525
  modified_base 1: mod_base = um
  modified_base 1..2: mod_base = OTHER; note = S-phosphorothioate
  modified_base 2: mod_base = OTHER; note = 2-fluororibose uracil
  modified_base 2..3: mod_base = OTHER; note = R-phosphorothioate
  modified_base 3: mod_base = OTHER; note = 2-O-methylribose adenine
  modified_base 4: mod_base = OTHER; note = 2-fluororibose uracil
  modified_base 5: mod_base = OTHER; note = 2-O-methylribose adenine
  modified_base 6: mod_base = OTHER; note = 2-fluororibose guanine
  modified_base 7: mod_base = OTHER; note = 2-O-methylribose adenine
  modified_base 8: mod_base = OTHER; note = 2-fluororibose guanine
  modified_base 9: mod_base = OTHER; note = 2-fluororibose cytosine
  modified_base 10: mod_base = OTHER; note = 2-O-methylribose adenine
  modified_base 11: mod_base = OTHER; note = 2-fluororibose adenine
  modified_base 12: mod_base = gm
  modified_base 13: mod_base = OTHER; note = 2-O-methylribose adenine
  modified_base 14: mod_base = OTHER; note = 2-fluororibose adenine
  modified_base 15: mod_base = cm
  modified_base 16: mod_base = OTHER; note = 2-fluororibose adenine
  modified_base 17: mod_base = cm
  modified_base 18: mod_base = um
  modified_base 19: mod_base = gm
  modified_base 20: mod_base = OTHER; note = 2-fluororibose uracil
  modified_base 21: mod_base = um
  modified_base 21..22: mod_base = OTHER; note = S-phosphorothioate
  modified_base 22: mod_base = um
  modified_base 22..23: mod_base = OTHER; note = S-phosphorothioate
  modified_base 23: mod_base = um
  source 1..23: mol_type = other RNA
ttatagagcaagaacactgtttt

SEQ ID NO: 228 - RNA, 23 nt, synthetic construct
  misc_feature 1..23: note = Synthetic: WV-47011
  misc_feature 1..23: note = Synthetic: SSR-0104220
  modified_base 1: mod_base = OTHER; note = deoxyribose thymine
  modified_base 1..2: mod_base = OTHER; note = S-phosphorothioate
  modified_base 2: mod_base = OTHER; note = 2-fluororibose uracil
  modified_base 2..3: mod_base = OTHER; note = R-phosphorothioate
  modified_base 3: mod_base = OTHER; note = 2-O-methylribose adenine
  modified_base 3..4: mod_base = OTHER; note S-N-(1,3-dimethylimidazolidin-2-ylidene)phosphoramidate
  modified_base 4: mod_base = OTHER; note = 2-fluororibose uracil
  modified_base 5: mod_base = OTHER; note = 2-O-methylribose adenine
  modified_base 6: mod_base = OTHER; note = 2-fluororibose guanine
  modified_base 7: mod_base = OTHER; note = 2-O-methylribose adenine
  modified_base 8: mod_base = OTHER; note = 2-fluororibose guanine
  modified_base 9: mod_base = OTHER; note = 2-fluororibose cytosine
  modified_base 10: mod_base = OTHER; note = 2-O-methylribose adenine
  modified_base 10..11: mod_base = OTHER; note S-N-(1,3-dimethylimidazolidin-2-ylidene)phosphoramidate
  modified_base 11: mod_base = OTHER; note = 2-fluororibose adenine
  modified_base 12: mod_base = gm
  modified_base 13: mod_base = OTHER; note = 2-O-methylribose adenine
  modified_base 14: mod_base = OTHER; note = 2-fluororibose adenine
  modified_base 15: mod_base = cm
  modified_base 16: mod_base = OTHER; note = 2-fluororibose adenine
  modified_base 17: mod_base = cm
  modified_base 18: mod_base = um
  modified_base 19: mod_base = gm
  modified_base 19..20: mod_base = OTHER; note S-N-(1,3-dimethylimidazolidin-2-ylidene)phosphoramidate
  modified_base 20: mod_base = OTHER; note = 2-fluororibose uracil
  modified_base 21: mod_base = um
  modified_base 21..22: mod_base = OTHER; note = S-phosphorothioate
  modified_base 22: mod_base = um
  modified_base 22..23: mod_base = OTHER; note = S-phosphorothioate
  modified_base 23: mod_base = um
  source 1..23: mol_type = other RNA
ttatagagcaagaacactgtttt

SEQ ID NO: 229 - RNA, 23 nt, synthetic construct
  misc_feature 1..23: note = Synthetic: WV-47012
  misc_feature 1..23: note = Synthetic: SSR-0105678
  modified_base 1: mod_base = OTHER; note = phosphate linked to the 5' end of deoxyribose thymine
  modified_base 1..2: mod_base = OTHER; note = S-phosphorothioate
  modified_base 2: mod_base = OTHER; note = 2-fluororibose uracil
  modified_base 2..3: mod_base = OTHER; note = R-phosphorothioate
  modified_base 3: mod_base = OTHER; note = 2-O-methylribose adenine
  modified_base 3..4: mod_base = OTHER; note S-N-(1,3-dimethylimidazolidin-2-ylidene)phosphoramidate
  modified_base 4: mod_base = OTHER; note = 2-fluororibose uracil
  modified_base 5: mod_base = OTHER; note = 2-O-methylribose adenine
  modified_base 6: mod_base = OTHER; note = 2-fluororibose guanine
  modified_base 7: mod_base = OTHER; note = 2-O-methylribose adenine
  modified_base 8: mod_base = OTHER; note = 2-fluororibose guanine
  modified_base 9: mod_base = OTHER; note = 2-fluororibose cytosine
  modified_base 10: mod_base = OTHER; note = 2-O-methylribose adenine
  modified_base 10..11: mod_base = OTHER; note S-N-(1,3-dimethylimidazolidin-2-ylidene)phosphoramidate
  modified_base 11: mod_base = OTHER; note = 2-fluororibose adenine
  modified_base 12: mod_base = gm
  modified_base 13: mod_base = OTHER; note = 2-O-methylribose adenine
  modified_base 14: mod_base = OTHER; note = 2-fluororibose adenine
  modified_base 15: mod_base = cm
  modified_base 16: mod_base = OTHER; note = 2-fluororibose adenine
  modified_base 17: mod_base = cm
  modified_base 18: mod_base = um
  modified_base 19: mod_base = gm
  modified_base 19..20: mod_base = OTHER; note S-N-(1,3-dimethylimidazolidin-2-ylidene)phosphoramidate
  modified_base 20: mod_base = OTHER; note = 2-fluororibose uracil
  modified_base 21: mod_base = um
  modified_base 21..22: mod_base = OTHER; note = S-phosphorothioate
  modified_base 22: mod_base = um
  modified_base 22..23: mod_base = OTHER; note = S-phosphorothioate
  modified_base 23: mod_base = um
  source 1..23: mol_type = other RNA
ttatagagcaagaacactgtttt

SEQ ID NO: 230 - RNA, 23 nt, synthetic construct
  misc_feature 1..23: note = Synthetic: WV-47013
  misc_feature 1..23: note = Synthetic: SSR-0105670
  modified_base 1: mod_base = OTHER; note = phosphate linked to the 5' end of S-5-methyl-deoxyribose thymine
  modified_base 1..2: mod_base = OTHER; note = S-phosphorothioate
  modified_base 2: mod_base = OTHER; note = 2-fluororibose uracil
  modified_base 2..3: mod_base = OTHER; note = R-phosphorothioate
  modified_base 3: mod_base = OTHER; note = 2-O-methylribose adenine
  modified_base 3..4: mod_base = OTHER; note S-N-(1,3-dimethylimidazolidin-2-ylidene)phosphoramidate
  modified_base 4: mod_base = OTHER; note = 2-fluororibose uracil
  modified_base 5: mod_base = OTHER; note = 2-O-methylribose adenine
  modified_base 6: mod_base = OTHER; note = 2-fluororibose guanine
  modified_base 7: mod_base = OTHER; note = 2-O-methylribose adenine
  modified_base 8: mod_base = OTHER; note = 2-fluororibose guanine
  modified_base 9: mod_base = OTHER; note = 2-fluororibose cytosine
  modified_base 10: mod_base = OTHER; note = 2-O-methylribose adenine
  modified_base 10..11: mod_base = OTHER; note S-N-(1,3-dimethylimidazolidin-2-ylidene)phosphoramidate
  modified_base 11: mod_base = OTHER; note = 2-fluororibose adenine
  modified_base 12: mod_base = gm
  modified_base 13: mod_base = OTHER; note = 2-O-methylribose adenine
  modified_base 14: mod_base = OTHER; note = 2-fluororibose adenine
  modified_base 15: mod_base = cm
  modified_base 16: mod_base = OTHER; note = 2-fluororibose adenine
  modified_base 17: mod_base = cm
  modified_base 18: mod_base = um
  modified_base 19: mod_base = gm
  modified_base 19..20: mod_base = OTHER; note S-N-(1,3-dimethylimidazolidin-2-ylidene)phosphoramidate
  modified_base 20: mod_base = OTHER; note = 2-fluororibose uracil
  modified_base 21: mod_base = um
  modified_base 21..22: mod_base = OTHER; note = S-phosphorothioate
  modified_base 22: mod_base = um
  modified_base 22..23: mod_base = OTHER; note = S-phosphorothioate
  modified_base 23: mod_base = um
  source 1..23: mol_type = other RNA
ttatagagcaagaacactgtttt

SEQ ID NO: 231 - RNA, 23 nt, synthetic construct
  misc_feature 1..23: note = Synthetic: WV-47014
  misc_feature 1..23: note = Synthetic: SSR-0105662
  modified_base 1: mod_base = OTHER; note = phosphate linked to the 5' end of R-5-methyl-deoxyribose thymine
  modified_base 1..2: mod_base = OTHER; note = S-phosphorothioate
  modified_base 2: mod_base = OTHER; note = 2-fluororibose uracil
  modified_base 2..3: mod_base = OTHER; note = R-phosphorothioate
  modified_base 3: mod_base = OTHER; note = 2-O-methylribose adenine
  modified_base 3..4: mod_base = OTHER; note S-N-(1,3-dimethylimidazolidin-2-ylidene)phosphoramidate
  modified_base 4: mod_base = OTHER; note = 2-fluororibose uracil
  modified_base 5: mod_base = OTHER; note = 2-O-methylribose adenine
  modified_base 6: mod_base = OTHER; note = 2-fluororibose guanine
  modified_base 7: mod_base = OTHER; note = 2-O-methylribose adenine
  modified_base 8: mod_base = OTHER; note = 2-fluororibose guanine
  modified_base 9: mod_base = OTHER; note = 2-fluororibose cytosine
  modified_base 10: mod_base = OTHER; note = 2-O-methylribose adenine
  modified_base 10..11: mod_base = OTHER; note S-N-(1,3-dimethylimidazolidin-2-ylidene)phosphoramidate
  modified_base 11: mod_base = OTHER; note = 2-fluororibose adenine
  modified_base 12: mod_base = gm
  modified_base 13: mod_base = OTHER; note = 2-O-methylribose adenine
  modified_base 14: mod_base = OTHER; note = 2-fluororibose adenine
  modified_base 15: mod_base = cm
  modified_base 16: mod_base = OTHER; note = 2-fluororibose adenine
  modified_base 17: mod_base = cm
  modified_base 18: mod_base = um
  modified_base 19: mod_base = gm
  modified_base 19..20: mod_base = OTHER; note S-N-(1,3-dimethylimidazolidin-2-ylidene)phosphoramidate
  modified_base 20: mod_base = OTHER; note = 2-fluororibose uracil
  modified_base 21: mod_base = um
  modified_base 21..22: mod_base = OTHER; note = S-phosphorothioate
  modified_base 22: mod_base = um
  modified_base 22..23: mod_base = OTHER; note = S-phosphorothioate
  modified_base 23: mod_base = um
  source 1..23: mol_type = other RNA
ttatagagcaagaacactgtttt

SEQ ID NO: 232 - RNA, 23 nt, synthetic construct
  misc_feature 1..23: note = Synthetic: WV-47015
  misc_feature 1..23: note = Synthetic: SSR-0104212
  modified_base 1: mod_base = OTHER; note = 5-(E)-vinylphosphonate-2,5-deoxyribose thymine
  modified_base 1..2: mod_base = OTHER; note = S-phosphorothioate
  modified_base 2: mod_base = OTHER; note = 2-fluororibose uracil
  modified_base 2..3: mod_base = OTHER; note = R-phosphorothioate
  modified_base 3: mod_base = OTHER; note = 2-O-methylribose adenine
  modified_base 3..4: mod_base = OTHER; note S-N-(1,3-dimethylimidazolidin-2-ylidene)phosphoramidate
  modified_base 4: mod_base = OTHER; note = 2-fluororibose uracil
  modified_base 5: mod_base = OTHER; note = 2-O-methylribose adenine
  modified_base 6: mod_base = OTHER; note = 2-fluororibose guanine
  modified_base 7: mod_base = OTHER; note = 2-O-methylribose adenine
  modified_base 8: mod_base = OTHER; note = 2-fluororibose guanine
  modified_base 9: mod_base = OTHER; note = 2-fluororibose cytosine
  modified_base 10: mod_base = OTHER; note = 2-O-methylribose adenine
  modified_base 10..11: mod_base = OTHER; note S-N-(1,3-dimethylimidazolidin-2-ylidene)phosphoramidate
  modified_base 11: mod_base = OTHER; note = 2-fluororibose adenine
  modified_base 12: mod_base = gm
  modified_base 13: mod_base = OTHER; note = 2-O-methylribose adenine
  modified_base 14: mod_base = OTHER; note = 2-fluororibose adenine
  modified_base 15: mod_base = cm
  modified_base 16: mod_base = OTHER; note = 2-fluororibose adenine
  modified_base 17: mod_base = cm
  modified_base 18: mod_base = um
  modified_base 19: mod_base = gm
  modified_base 19..20: mod_base = OTHER; note S-N-(1,3-dimethylimidazolidin-2-ylidene)phosphoramidate
  modified_base 20: mod_base = OTHER; note = 2-fluororibose uracil
  modified_base 21: mod_base = um
  modified_base 21..22: mod_base = OTHER; note = S-phosphorothioate
  modified_base 22: mod_base = um
  modified_base 22..23: mod_base = OTHER; note = S-phosphorothioate
  modified_base 23: mod_base = um
  source 1..23: mol_type = other RNA
ttatagagcaagaacactgtttt

SEQ ID NO: 233 - RNA, 23 nt, synthetic construct
  misc_feature 1..23: note = Synthetic: WV-47016
  misc_feature 1..23: note = Synthetic: SSR-0104196
  modified_base 1: mod_base = OTHER; note = 5-(S)-methyl-2,5-deoxyribose thymine
  modified_base 1..2: mod_base = OTHER; note = S-phosphorothioate
  modified_base 2: mod_base = OTHER; note = 2-fluororibose uracil
  modified_base 2..3: mod_base = OTHER; note = R-phosphorothioate
  modified_base 3: mod_base = OTHER; note = 2-O-methylribose adenine
  modified_base 3..4: mod_base = OTHER; note S-N-(1,3-dimethylimidazolidin-2-ylidene)phosphoramidate
  modified_base 4: mod_base = OTHER; note = 2-fluororibose uracil
  modified_base 5: mod_base = OTHER; note = 2-O-methylribose adenine
  modified_base 6: mod_base = OTHER; note = 2-fluororibose guanine
  modified_base 7: mod_base = OTHER; note = 2-O-methylribose adenine
  modified_base 8: mod_base = OTHER; note = 2-fluororibose guanine
  modified_base 9: mod_base = OTHER; note = 2-fluororibose cytosine
  modified_base 10: mod_base = OTHER; note = 2-O-methylribose adenine
  modified_base 10..11: mod_base = OTHER; note S-N-(1,3-dimethylimidazolidin-2-ylidene)phosphoramidate
  modified_base 11: mod_base = OTHER; note = 2-fluororibose adenine
  modified_base 12: mod_base = gm
  modified_base 13: mod_base = OTHER; note = 2-O-methylribose adenine
  modified_base 14: mod_base = OTHER; note = 2-fluororibose adenine
  modified_base 15: mod_base = cm
  modified_base 16: mod_base = OTHER; note = 2-fluororibose adenine
  modified_base 17: mod_base = cm
  modified_base 18: mod_base = um
  modified_base 19: mod_base = gm
  modified_base 19..20: mod_base = OTHER; note S-N-(1,3-dimethylimidazolidin-2-ylidene)phosphoramidate
  modified_base 20: mod_base = OTHER; note = 2-fluororibose uracil
  modified_base 21: mod_base = um
  modified_base 21..22: mod_base = OTHER; note = S-phosphorothioate
  modified_base 22: mod_base = um
  modified_base 22..23: mod_base = OTHER; note = S-phosphorothioate
  modified_base 23: mod_base = um
  source 1..23: mol_type = other RNA
ttatagagcaagaacactgtttt

SEQ ID NO: 234 - RNA, 23 nt, synthetic construct
  misc_feature 1..23: note = Synthetic: WV-47017
  misc_feature 1..23: note = Synthetic: SSR-0104182
  modified_base 1: mod_base = OTHER; note = 5-(R)-methyl-2,5-deoxyribose thymine
  modified_base 1..2: mod_base = OTHER; note = S-phosphorothioate
  modified_base 2: mod_base = OTHER; note = 2-fluororibose uracil
  modified_base 2..3: mod_base = OTHER; note = R-phosphorothioate
  modified_base 3: mod_base = OTHER; note = 2-O-methylribose adenine
  modified_base 3..4: mod_base = OTHER; note S-N-(1,3-dimethylimidazolidin-2-ylidene)phosphoramidate
  modified_base 4: mod_base = OTHER; note = 2-fluororibose uracil
  modified_base 5: mod_base = OTHER; note = 2-O-methylribose adenine
  modified_base 6: mod_base = OTHER; note = 2-fluororibose guanine
  modified_base 7: mod_base = OTHER; note = 2-O-methylribose adenine
  modified_base 8: mod_base = OTHER; note = 2-fluororibose guanine
  modified_base 9: mod_base = OTHER; note = 2-fluororibose cytosine
  modified_base 10: mod_base = OTHER; note = 2-O-methylribose adenine
  modified_base 10..11: mod_base = OTHER; note S-N-(1,3-dimethylimidazolidin-2-ylidene)phosphoramidate
  modified_base 11: mod_base = OTHER; note = 2-fluororibose adenine
  modified_base 12: mod_base = gm
  modified_base 13: mod_base = OTHER; note = 2-O-methylribose adenine
  modified_base 14: mod_base = OTHER; note = 2-fluororibose adenine
  modified_base 15: mod_base = cm
  modified_base 16: mod_base = OTHER; note = 2-fluororibose adenine
  modified_base 17: mod_base = cm
  modified_base 18: mod_base = um
  modified_base 19: mod_base = gm
  modified_base 19..20: mod_base = OTHER; note S-N-(1,3-dimethylimidazolidin-2-ylidene)phosphoramidate
  modified_base 20: mod_base = OTHER; note = 2-fluororibose uracil
  modified_base 21: mod_base = um
  modified_base 21..22: mod_base = OTHER; note = S-phosphorothioate
  modified_base 22: mod_base = um
  modified_base 22..23: mod_base = OTHER; note = S-phosphorothioate
  modified_base 23: mod_base = um
  source 1..23: mol_type = other RNA
ttatagagcaagaacactgtttt

SEQ ID NO: 235 - RNA, 23 nt, synthetic construct
  misc_feature 1..23: note = Synthetic: WV-47018
  misc_feature 1..23: note = Synthetic: SSR-0104310
  modified_base 1: mod_base = um
  modified_base 1..2: mod_base = OTHER; note = R-phosphorothioate
  modified_base 2: mod_base = OTHER; note = 2-fluororibose uracil
  modified_base 2..3: mod_base = OTHER; note = S-phosphorothioate
  modified_base 3: mod_base = OTHER; note = 2-O-methylribose adenine
  modified_base 4: mod_base = OTHER; note = 2-fluororibose uracil
  modified_base 5: mod_base = OTHER; note = 2-O-methylribose adenine
  modified_base 6: mod_base = OTHER; note = 2-fluororibose guanine
  modified_base 7: mod_base = OTHER; note = 2-O-methylribose adenine
  modified_base 8: mod_base = OTHER; note = 2-fluororibose guanine
  modified_base 9: mod_base = OTHER; note = 2-fluororibose cytosine
  modified_base 10: mod_base = OTHER; note = 2-O-methylribose adenine
  modified_base 11: mod_base = OTHER; note = 2-fluororibose adenine
  modified_base 12: mod_base = gm
  modified_base 13: mod_base = OTHER; note = 2-O-methylribose adenine
  modified_base 14: mod_base = OTHER; note = 2-fluororibose adenine
  modified_base 15: mod_base = cm
  modified_base 16: mod_base = OTHER; note = 2-fluororibose adenine
  modified_base 17: mod_base = cm
  modified_base 18: mod_base = um
  modified_base 19: mod_base = gm
  modified_base 20: mod_base = OTHER; note = 2-fluororibose uracil
  modified_base 21: mod_base = um
  modified_base 21..22: mod_base = OTHER; note = S-phosphorothioate
  modified_base 22: mod_base = um
  modified_base 22..23: mod_base = OTHER; note = S-phosphorothioate
  modified_base 23: mod_base = um
  source 1..23: mol_type = other RNA
ttatagagcaagaacactgtttt

SEQ ID NO: 236 - RNA, 23 nt, synthetic construct
  misc_feature 1..23: note = Synthetic: WV-47019
  misc_feature 1..23: note = Synthetic: SSR-0104270
  modified_base 1: mod_base = um
  modified_base 1..2: mod_base = OTHER; note = R-phosphorothioate
  modified_base 2: mod_base = OTHER; note = 2-fluororibose uracil
  modified_base 2..3: mod_base = OTHER; note = S-phosphorothioate
  modified_base 3: mod_base = OTHER; note = 2-O-methylribose adenine
  modified_base 3..4: mod_base = OTHER; note S-N-(1,3-dimethylimidazolidin-2-ylidene)phosphoramidate
  modified_base 4: mod_base = OTHER; note = 2-fluororibose uracil
  modified_base 5: mod_base = OTHER; note = 2-O-methylribose adenine
  modified_base 6: mod_base = OTHER; note = 2-fluororibose guanine
  modified_base 7: mod_base = OTHER; note = 2-O-methylribose adenine
  modified_base 8: mod_base = OTHER; note = 2-fluororibose guanine
  modified_base 9: mod_base = OTHER; note = 2-fluororibose cytosine
  modified_base 10: mod_base = OTHER; note = 2-O-methylribose adenine
  modified_base 10..11: mod_base = OTHER; note S-N-(1,3-dimethylimidazolidin-2-ylidene)phosphoramidate
  modified_base 11: mod_base = OTHER; note = 2-fluororibose adenine
  modified_base 12: mod_base = gm
  modified_base 13: mod_base = OTHER; note = 2-O-methylribose adenine
  modified_base 14: mod_base = OTHER; note = 2-fluororibose adenine
  modified_base 15: mod_base = cm
  modified_base 16: mod_base = OTHER; note = 2-fluororibose adenine
  modified_base 17: mod_base = cm
  modified_base 18: mod_base = um
  modified_base 19: mod_base = gm
  modified_base 19..20: mod_base = OTHER; note S-N-(1,3-dimethylimidazolidin-2-ylidene)phosphoramidate
  modified_base 20: mod_base = OTHER; note = 2-fluororibose uracil
  modified_base 21: mod_base = um
  modified_base 21..22: mod_base = OTHER; note = S-phosphorothioate
  modified_base 22: mod_base = um
  modified_base 22..23: mod_base = OTHER; note = S-phosphorothioate
  modified_base 23: mod_base = um
  source 1..23: mol_type = other RNA
ttatagagcaagaacactgtttt

SEQ ID NO: 237 - RNA, 23 nt, synthetic construct
  misc_feature 1..23: note = Synthetic: WV-47020
  misc_feature 1..23: note = Synthetic: SSR-0104216
  modified_base 1: mod_base = OTHER; note = deoxyribose thymine
  modified_base 1..2: mod_base = OTHER; note = R-phosphorothioate
  modified_base 2: mod_base = OTHER; note = 2-fluororibose uracil
  modified_base 2..3: mod_base = OTHER; note = S-phosphorothioate
  modified_base 3: mod_base = OTHER; note = 2-O-methylribose adenine
  modified_base 3..4: mod_base = OTHER; note S-N-(1,3-dimethylimidazolidin-2-ylidene)phosphoramidate
  modified_base 4: mod_base = OTHER; note = 2-fluororibose uracil
  modified_base 5: mod_base = OTHER; note = 2-O-methylribose adenine
  modified_base 6: mod_base = OTHER; note = 2-fluororibose guanine
  modified_base 7: mod_base = OTHER; note = 2-O-methylribose adenine
  modified_base 8: mod_base = OTHER; note = 2-fluororibose guanine
  modified_base 9: mod_base = OTHER; note = 2-fluororibose cytosine
  modified_base 10: mod_base = OTHER; note = 2-O-methylribose adenine
  modified_base 10..11: mod_base = OTHER; note S-N-(1,3-dimethylimidazolidin-2-ylidene)phosphoramidate
  modified_base 11: mod_base = OTHER; note = 2-fluororibose adenine
  modified_base 12: mod_base = gm
  modified_base 13: mod_base = OTHER; note = 2-O-methylribose adenine
  modified_base 14: mod_base = OTHER; note = 2-fluororibose adenine
  modified_base 15: mod_base = cm
  modified_base 16: mod_base = OTHER; note = 2-fluororibose adenine
  modified_base 17: mod_base = cm
  modified_base 18: mod_base = um
  modified_base 19: mod_base = gm
  modified_base 19..20: mod_base = OTHER; note S-N-(1,3-dimethylimidazolidin-2-ylidene)phosphoramidate
  modified_base 20: mod_base = OTHER; note = 2-fluororibose uracil
  modified_base 21: mod_base = um
  modified_base 21..22: mod_base = OTHER; note = S-phosphorothioate
  modified_base 22: mod_base = um
  modified_base 22..23: mod_base = OTHER; note = S-phosphorothioate
  modified_base 23: mod_base = um
  source 1..23: mol_type = other RNA
ttatagagcaagaacactgtttt

SEQ ID NO: 238 - RNA, 23 nt, synthetic construct
  misc_feature 1..23: note = Synthetic: WV-47021
  misc_feature 1..23: note = Synthetic: SSR-0105674
  modified_base 1: mod_base = OTHER; note = phosphate linked to the 5' end of deoxyribose thymine
  modified_base 1..2: mod_base = OTHER; note = R-phosphorothioate
  modified_base 2: mod_base = OTHER; note = 2-fluororibose uracil
  modified_base 2..3: mod_base = OTHER; note = S-phosphorothioate
  modified_base 3: mod_base = OTHER; note = 2-O-methylribose adenine
  modified_base 3..4: mod_base = OTHER; note S-N-(1,3-dimethylimidazolidin-2-ylidene)phosphoramidate
  modified_base 4: mod_base = OTHER; note = 2-fluororibose uracil
  modified_base 5: mod_base = OTHER; note = 2-O-methylribose adenine
  modified_base 6: mod_base = OTHER; note = 2-fluororibose guanine
  modified_base 7: mod_base = OTHER; note = 2-O-methylribose adenine
  modified_base 8: mod_base = OTHER; note = 2-fluororibose guanine
  modified_base 9: mod_base = OTHER; note = 2-fluororibose cytosine
  modified_base 10: mod_base = OTHER; note = 2-O-methylribose adenine
  modified_base 10..11: mod_base = OTHER; note S-N-(1,3-dimethylimidazolidin-2-ylidene)phosphoramidate
  modified_base 11: mod_base = OTHER; note = 2-fluororibose adenine
  modified_base 12: mod_base = gm
  modified_base 13: mod_base = OTHER; note = 2-O-methylribose adenine
  modified_base 14: mod_base = OTHER; note = 2-fluororibose adenine
  modified_base 15: mod_base = cm
  modified_base 16: mod_base = OTHER; note = 2-fluororibose adenine
  modified_base 17: mod_base = cm
  modified_base 18: mod_base = um
  modified_base 19: mod_base = gm
  modified_base 19..20: mod_base = OTHER; note S-N-(1,3-dimethylimidazolidin-2-ylidene)phosphoramidate
  modified_base 20: mod_base = OTHER; note = 2-fluororibose uracil
  modified_base 21: mod_base = um
  modified_base 21..22: mod_base = OTHER; note = S-phosphorothioate
  modified_base 22: mod_base = um
  modified_base 22..23: mod_base = OTHER; note = S-phosphorothioate
  modified_base 23: mod_base = um
  source 1..23: mol_type = other RNA
ttatagagcaagaacactgtttt

SEQ ID NO: 239 - RNA, 23 nt, synthetic construct
  misc_feature 1..23: note = Synthetic: WV-47022
  misc_feature 1..23: note = Synthetic: SSR-0105666
  modified_base 1: mod_base = OTHER; note = phosphate linked to the 5' end of S-5-methyl-deoxyribose thymine
  modified_base 1..2: mod_base = OTHER; note = R-phosphorothioate
  modified_base 2: mod_base = OTHER; note = 2-fluororibose uracil
  modified_base 2..3: mod_base = OTHER; note = S-phosphorothioate
  modified_base 3: mod_base = OTHER; note = 2-O-methylribose adenine
  modified_base 3..4: mod_base = OTHER; note S-N-(1,3-dimethylimidazolidin-2-ylidene)phosphoramidate
  modified_base 4: mod_base = OTHER; note = 2-fluororibose uracil
  modified_base 5: mod_base = OTHER; note = 2-O-methylribose adenine
  modified_base 6: mod_base = OTHER; note = 2-fluororibose guanine
  modified_base 7: mod_base = OTHER; note = 2-O-methylribose adenine
  modified_base 8: mod_base = OTHER; note = 2-fluororibose guanine
  modified_base 9: mod_base = OTHER; note = 2-fluororibose cytosine
  modified_base 10: mod_base = OTHER; note = 2-O-methylribose adenine
  modified_base 10..11: mod_base = OTHER; note S-N-(1,3-dimethylimidazolidin-2-ylidene)phosphoramidate
  modified_base 11: mod_base = OTHER; note = 2-fluororibose adenine
  modified_base 12: mod_base = gm
  modified_base 13: mod_base = OTHER; note = 2-O-methylribose adenine
  modified_base 14: mod_base = OTHER; note = 2-fluororibose adenine
  modified_base 15: mod_base = cm
  modified_base 16: mod_base = OTHER; note = 2-fluororibose adenine
  modified_base 17: mod_base = cm
  modified_base 18: mod_base = um
  modified_base 19: mod_base = gm
  modified_base 19..20: mod_base = OTHER; note S-N-(1,3-dimethylimidazolidin-2-ylidene)phosphoramidate
  modified_base 20: mod_base = OTHER; note = 2-fluororibose uracil
  modified_base 21: mod_base = um
  modified_base 21..22: mod_base = OTHER; note = S-phosphorothioate
  modified_base 22: mod_base = um
  modified_base 22..23: mod_base = OTHER; note = S-phosphorothioate
  modified_base 23: mod_base = um
  source 1..23: mol_type = other RNA
ttatagagcaagaacactgtttt

SEQ ID NO: 240 - RNA, 23 nt, synthetic construct
  misc_feature 1..23: note = Synthetic: WV-47023
  misc_feature 1..23: note = Synthetic: SSR-0105658
  modified_base 1: mod_base = OTHER; note = phosphate linked to the 5' end of R-5-methyl-deoxyribose thymine
  modified_base 1..2: mod_base = OTHER; note = R-phosphorothioate
  modified_base 2: mod_base = OTHER; note = 2-fluororibose uracil
  modified_base 2..3: mod_base = OTHER; note = S-phosphorothioate
  modified_base 3: mod_base = OTHER; note = 2-O-methylribose adenine
  modified_base 3..4: mod_base = OTHER; note S-N-(1,3-dimethylimidazolidin-2-ylidene)phosphoramidate
  modified_base 4: mod_base = OTHER; note = 2-fluororibose uracil
  modified_base 5: mod_base = OTHER; note = 2-O-methylribose adenine
  modified_base 6: mod_base = OTHER; note = 2-fluororibose guanine
  modified_base 7: mod_base = OTHER; note = 2-O-methylribose adenine
  modified_base 8: mod_base = OTHER; note = 2-fluororibose guanine
  modified_base 9: mod_base = OTHER; note = 2-fluororibose cytosine
  modified_base 10: mod_base = OTHER; note = 2-O-methylribose adenine
  modified_base 10..11: mod_base = OTHER; note S-N-(1,3-dimethylimidazolidin-2-ylidene)phosphoramidate
  modified_base 11: mod_base = OTHER; note = 2-fluororibose adenine
  modified_base 12: mod_base = gm
  modified_base 13: mod_base = OTHER; note = 2-O-methylribose adenine
  modified_base 14: mod_base = OTHER; note = 2-fluororibose adenine
  modified_base 15: mod_base = cm
  modified_base 16: mod_base = OTHER; note = 2-fluororibose adenine
  modified_base 17: mod_base = cm
  modified_base 18: mod_base = um
  modified_base 19: mod_base = gm
  modified_base 19..20: mod_base = OTHER; note S-N-(1,3-dimethylimidazolidin-2-ylidene)phosphoramidate
  modified_base 20: mod_base = OTHER; note = 2-fluororibose uracil
  modified_base 21: mod_base = um
  modified_base 21..22: mod_base = OTHER; note = S-phosphorothioate
  modified_base 22: mod_base = um
  modified_base 22..23: mod_base = OTHER; note = S-phosphorothioate
  modified_base 23: mod_base = um
  source 1..23: mol_type = other RNA
ttatagagcaagaacactgtttt

SEQ ID NO: 241 - RNA, 23 nt, synthetic construct
  source 1..23: mol_type = other RNA
aacagtgttcttgctctataatt

SEQ ID NO: 242 - RNA, 23 nt, synthetic construct
  misc_feature 1..23: note = Synthetic: WV-20171
  misc_feature 1..23: note = Synthetic: SSR-0102776
  modified_base 1: mod_base = um
  modified_base 1..2: mod_base = OTHER; note = S-phosphorothioate
  modified_base 2: mod_base = OTHER; note = 2-fluororibose uracil
  modified_base 2..3: mod_base = OTHER; note = R-phosphorothioate
  modified_base 3: mod_base = OTHER; note = 2-O-methylribose adenine
  modified_base 4: mod_base = OTHER; note = 2-fluororibose uracil
  modified_base 5: mod_base = OTHER; note = 2-O-methylribose adenine
  modified_base 6: mod_base = OTHER; note = 2-fluororibose guanine
  modified_base 7: mod_base = OTHER; note = 2-O-methylribose adenine
  modified_base 8: mod_base = OTHER; note = 2-fluororibose guanine
  modified_base 9: mod_base = cm
  modified_base 10: mod_base = OTHER; note = 2-fluororibose adenine
  modified_base 11: mod_base = OTHER; note = 2-O-methylribose adenine
  modified_base 12: mod_base = gm
  modified_base 13: mod_base = OTHER; note = 2-O-methylribose adenine
  modified_base 14: mod_base = OTHER; note = 2-fluororibose adenine
  modified_base 15: mod_base = cm
  modified_base 16: mod_base = OTHER; note = 2-fluororibose adenine
  modified_base 17: mod_base = cm
  modified_base 18: mod_base = OTHER; note = 2-fluororibose uracil
  modified_base 19: mod_base = gm
  modified_base 20: mod_base = OTHER; note = 2-fluororibose uracil
  modified_base 21: mod_base = um
  modified_base 21..22: mod_base = OTHER; note = S-phosphorothioate
  modified_base 22: mod_base = um
  modified_base 22..23: mod_base = OTHER; note = S-phosphorothioate
  modified_base 23: mod_base = um
  source 1..23: mol_type = other RNA
ttatagagcaagaacactgtttt

SEQ ID NO: 243 - RNA, 23 nt, synthetic construct
  misc_feature 1..23: note = Synthetic: WV-20172
  misc_feature 1..23: note = Synthetic: SSR-0102768
  modified_base 1: mod_base = um
  modified_base 1..2: mod_base = OTHER; note = R-phosphorothioate
  modified_base 2: mod_base = OTHER; note = 2-fluororibose uracil
  modified_base 2..3: mod_base = OTHER; note = R-phosphorothioate
  modified_base 3: mod_base = OTHER; note = 2-O-methylribose adenine
  modified_base 4: mod_base = OTHER; note = 2-fluororibose uracil
  modified_base 5: mod_base = OTHER; note = 2-O-methylribose adenine
  modified_base 6: mod_base = OTHER; note = 2-fluororibose guanine
  modified_base 7: mod_base = OTHER; note = 2-O-methylribose adenine
  modified_base 8: mod_base = OTHER; note = 2-fluororibose guanine
  modified_base 9: mod_base = cm
  modified_base 10: mod_base = OTHER; note = 2-fluororibose adenine
  modified_base 11: mod_base = OTHER; note = 2-O-methylribose adenine
  modified_base 12: mod_base = gm
  modified_base 13: mod_base = OTHER; note = 2-O-methylribose adenine
  modified_base 14: mod_base = OTHER; note = 2-fluororibose adenine
  modified_base 15: mod_base = cm
  modified_base 16: mod_base = OTHER; note = 2-fluororibose adenine
  modified_base 17: mod_base = cm
  modified_base 18: mod_base = OTHER; note = 2-fluororibose uracil
  modified_base 19: mod_base = gm
  modified_base 20: mod_base = OTHER; note = 2-fluororibose uracil
  modified_base 21: mod_base = um
  modified_base 21..22: mod_base = OTHER; note = S-phosphorothioate
  modified_base 22: mod_base = um
  modified_base 22..23: mod_base = OTHER; note = S-phosphorothioate
  modified_base 23: mod_base = um
  source 1..23: mol_type = other RNA
ttatagagcaagaacactgtttt

SEQ ID NO: 244 - RNA, 23 nt, synthetic construct
  misc_feature 1..23: note = Synthetic: WV-20183
  misc_feature 1..23: note = Synthetic: SSR-0102773
  modified_base 1: mod_base = um
  modified_base 1..2: mod_base = OTHER; note = S-phosphorothioate
  modified_base 2: mod_base = OTHER; note = 2-fluororibose uracil
  modified_base 2..3: mod_base = OTHER; note = R-phosphorothioate
  modified_base 3: mod_base = OTHER; note = 2-O-methylribose adenine
  modified_base 4: mod_base = OTHER; note = 2-fluororibose uracil
  modified_base 5: mod_base = OTHER; note = 2-O-methylribose adenine
  modified_base 6: mod_base = OTHER; note = 2-fluororibose guanine
  modified_base 7: mod_base = OTHER; note = 2-O-methylribose adenine
  modified_base 8: mod_base = OTHER; note = 2-fluororibose guanine
  modified_base 9: mod_base = cm
  modified_base 10: mod_base = OTHER; note = 2-fluororibose adenine
  modified_base 11: mod_base = OTHER; note = 2-O-methylribose adenine
  modified_base 12: mod_base = gm
  modified_base 13: mod_base = OTHER; note = 2-O-methylribose adenine
  modified_base 14: mod_base = OTHER; note = 2-fluororibose adenine
  modified_base 15: mod_base = cm
  modified_base 16: mod_base = OTHER; note = 2-fluororibose adenine
  modified_base 17: mod_base = cm
  modified_base 18: mod_base = OTHER; note = 2-fluororibose uracil
  modified_base 19: mod_base = gm
  modified_base 20: mod_base = OTHER; note = 2-fluororibose uracil
  modified_base 21: mod_base = um
  modified_base 21..22: mod_base = OTHER; note = R-phosphorothioate
  modified_base 22: mod_base = um
  modified_base 22..23: mod_base = OTHER; note = R-phosphorothioate
  modified_base 23: mod_base = um
  source 1..23: mol_type = other RNA
ttatagagcaagaacactgtttt

SEQ ID NO: 245 - RNA, 23 nt, synthetic construct
  misc_feature 1..23: note = Synthetic: WV-36836
  misc_feature 1..23: note = Synthetic: SSR-0103371
  modified_base 1: mod_base = um
  modified_base 1..2: mod_base = OTHER; note = N-(1,3-dimethylimidazolidin-2-ylidene)phosphoramidate
  modified_base 2: mod_base = OTHER; note = 2-fluororibose uracil
  modified_base 2..3: mod_base = OTHER; note = phosphorothioate
  modified_base 3: mod_base = OTHER; note = 2-O-methylribose adenine
  modified_base 4: mod_base = OTHER; note = 2-fluororibose uracil
  modified_base 5: mod_base = OTHER; note = 2-O-methylribose adenine
  modified_base 6: mod_base = OTHER; note = 2-fluororibose guanine
  modified_base 7: mod_base = OTHER; note = 2-O-methylribose adenine
  modified_base 8: mod_base = OTHER; note = 2-fluororibose guanine
  modified_base 9: mod_base = cm
  modified_base 10: mod_base = OTHER; note = 2-fluororibose adenine
  modified_base 11: mod_base = OTHER; note = 2-O-methylribose adenine
  modified_base 12: mod_base = gm
  modified_base 13: mod_base = OTHER; note = 2-O-methylribose adenine
  modified_base 14: mod_base = OTHER; note = 2-fluororibose adenine
  modified_base 15: mod_base = cm
  modified_base 16: mod_base = OTHER; note = 2-fluororibose adenine
  modified_base 17: mod_base = cm
  modified_base 18: mod_base = OTHER; note = 2-fluororibose uracil
  modified_base 19: mod_base = gm
  modified_base 20: mod_base = OTHER; note = 2-fluororibose uracil
  modified_base 21: mod_base = um
  modified_base 21..22: mod_base = OTHER; note = phosphorothioate
  modified_base 22: mod_base = um
  modified_base 22..23: mod_base = OTHER; note = phosphorothioate
  modified_base 23: mod_base = um
  source 1..23: mol_type = other RNA
ttatagagcaagaacactgtttt

SEQ ID NO: 246 - RNA, 23 nt, synthetic construct
  misc_feature 1..23: note = Synthetic: WV-36837
  misc_feature 1..23: note = Synthetic: SSR-0103376
  modified_base 1: mod_base = um
  modified_base 1..2: mod_base = OTHER; note = phosphorothioate
  modified_base 2: mod_base = OTHER; note = 2-fluororibose uracil
  modified_base 2..3: mod_base = OTHER; note = N-(1,3-dimethylimidazolidin-2-ylidene)phosphoramidate
  modified_base 3: mod_base = OTHER; note = 2-O-methylribose adenine
  modified_base 4: mod_base = OTHER; note = 2-fluororibose uracil
  modified_base 5: mod_base = OTHER; note = 2-O-methylribose adenine
  modified_base 6: mod_base = OTHER; note = 2-fluororibose guanine
  modified_base 7: mod_base = OTHER; note = 2-O-methylribose adenine
  modified_base 8: mod_base = OTHER; note = 2-fluororibose guanine
  modified_base 9: mod_base = cm
  modified_base 10: mod_base = OTHER; note = 2-fluororibose adenine
  modified_base 11: mod_base = OTHER; note = 2-O-methylribose adenine
  modified_base 12: mod_base = gm
  modified_base 13: mod_base = OTHER; note = 2-O-methylribose adenine
  modified_base 14: mod_base = OTHER; note = 2-fluororibose adenine
  modified_base 15: mod_base = cm
  modified_base 16: mod_base = OTHER; note = 2-fluororibose adenine
  modified_base 17: mod_base = cm
  modified_base 18: mod_base = OTHER; note = 2-fluororibose uracil
  modified_base 19: mod_base = gm
  modified_base 20: mod_base = OTHER; note = 2-fluororibose uracil
  modified_base 21: mod_base = um
  modified_base 21..22: mod_base = OTHER; note = phosphorothioate
  modified_base 22: mod_base = um
  modified_base 22..23: mod_base = OTHER; note = phosphorothioate
  modified_base 23: mod_base = um
  source 1..23: mol_type = other RNA
ttatagagcaagaacactgtttt

SEQ ID NO: 247 - RNA, 23 nt, synthetic construct
  misc_feature 1..23: note = Synthetic: WV-36838
  misc_feature 1..23: note = Synthetic: SSR-0103396
  modified_base 1: mod_base = um
  modified_base 1..2: mod_base = OTHER; note = phosphorothioate
  modified_base 2: mod_base = OTHER; note = 2-fluororibose uracil
  modified_base 2..3: mod_base = OTHER; note = phosphorothioate
  modified_base 3: mod_base = OTHER; note = 2-O-methylribose adenine
  modified_base 3..4: mod_base = OTHER; note = N-(1,3-dimethylimidazolidin-2-ylidene)phosphoramidate
  modified_base 4: mod_base = OTHER; note = 2-fluororibose uracil
  modified_base 5: mod_base = OTHER; note = 2-O-methylribose adenine
  modified_base 6: mod_base = OTHER; note = 2-fluororibose guanine
  modified_base 7: mod_base = OTHER; note = 2-O-methylribose adenine
  modified_base 8: mod_base = OTHER; note = 2-fluororibose guanine
  modified_base 9: mod_base = cm
  modified_base 10: mod_base = OTHER; note = 2-fluororibose adenine
  modified_base 11: mod_base = OTHER; note = 2-O-methylribose adenine
  modified_base 12: mod_base = gm
  modified_base 13: mod_base = OTHER; note = 2-O-methylribose adenine
  modified_base 14: mod_base = OTHER; note = 2-fluororibose adenine
  modified_base 15: mod_base = cm
  modified_base 16: mod_base = OTHER; note = 2-fluororibose adenine
  modified_base 17: mod_base = cm
  modified_base 18: mod_base = OTHER; note = 2-fluororibose uracil
  modified_base 19: mod_base = gm
  modified_base 20: mod_base = OTHER; note = 2-fluororibose uracil
  modified_base 21: mod_base = um
  modified_base 21..22: mod_base = OTHER; note = phosphorothioate
  modified_base 22: mod_base = um
  modified_base 22..23: mod_base = OTHER; note = phosphorothioate
  modified_base 23: mod_base = um
  source 1..23: mol_type = other RNA
ttatagagcaagaacactgtttt

SEQ ID NO: 248 - RNA, 23 nt, synthetic construct
  misc_feature 1..23: note = Synthetic: WV-36839
  misc_feature 1..23: note = Synthetic: SSR-0103399
  modified_base 1: mod_base = um
  modified_base 1..2: mod_base = OTHER; note = phosphorothioate
  modified_base 2: mod_base = OTHER; note = 2-fluororibose uracil
  modified_base 2..3: mod_base = OTHER; note = phosphorothioate
  modified_base 3: mod_base = OTHER; note = 2-O-methylribose adenine
  modified_base 4: mod_base = OTHER; note = 2-fluororibose uracil
  modified_base 4..5: mod_base = OTHER; note = N-(1,3-dimethylimidazolidin-2-ylidene)phosphoramidate
  modified_base 5: mod_base = OTHER; note = 2-O-methylribose adenine
  modified_base 6: mod_base = OTHER; note = 2-fluororibose guanine
  modified_base 7: mod_base = OTHER; note = 2-O-methylribose adenine
  modified_base 8: mod_base = OTHER; note = 2-fluororibose guanine
  modified_base 9: mod_base = cm
  modified_base 10: mod_base = OTHER; note = 2-fluororibose adenine
  modified_base 11: mod_base = OTHER; note = 2-O-methylribose adenine
  modified_base 12: mod_base = gm
  modified_base 13: mod_base = OTHER; note = 2-O-methylribose adenine
  modified_base 14: mod_base = OTHER; note = 2-fluororibose adenine
  modified_base 15: mod_base = cm
  modified_base 16: mod_base = OTHER; note = 2-fluororibose adenine
  modified_base 17: mod_base = cm
  modified_base 18: mod_base = OTHER; note = 2-fluororibose uracil
  modified_base 19: mod_base = gm
  modified_base 20: mod_base = OTHER; note = 2-fluororibose uracil
  modified_base 21: mod_base = um
  modified_base 21..22: mod_base = OTHER; note = phosphorothioate
  modified_base 22: mod_base = um
  modified_base 22..23: mod_base = OTHER; note = phosphorothioate
  modified_base 23: mod_base = um
  source 1..23: mol_type = other RNA
ttatagagcaagaacactgtttt

SEQ ID NO: 249 - RNA, 23 nt, synthetic construct
  misc_feature 1..23: note = Synthetic: WV-36840
  misc_feature 1..23: note = Synthetic: SSR-0103400
  modified_base 1: mod_base = um
  modified_base 1..2: mod_base = OTHER; note = phosphorothioate
  modified_base 2: mod_base = OTHER; note = 2-fluororibose uracil
  modified_base 2..3: mod_base = OTHER; note = phosphorothioate
  modified_base 3: mod_base = OTHER; note = 2-O-methylribose adenine
  modified_base 4: mod_base = OTHER; note = 2-fluororibose uracil
  modified_base 5: mod_base = OTHER; note = 2-O-methylribose adenine
  modified_base 5..6: mod_base = OTHER; note = N-(1,3-dimethylimidazolidin-2-ylidene)phosphoramidate
  modified_base 6: mod_base = OTHER; note = 2-fluororibose guanine
  modified_base 7: mod_base = OTHER; note = 2-O-methylribose adenine
  modified_base 8: mod_base = OTHER; note = 2-fluororibose guanine
  modified_base 9: mod_base = cm
  modified_base 10: mod_base = OTHER; note = 2-fluororibose adenine
  modified_base 11: mod_base = OTHER; note = 2-O-methylribose adenine
  modified_base 12: mod_base = gm
  modified_base 13: mod_base = OTHER; note = 2-O-methylribose adenine
  modified_base 14: mod_base = OTHER; note = 2-fluororibose adenine
  modified_base 15: mod_base = cm
  modified_base 16: mod_base = OTHER; note = 2-fluororibose adenine
  modified_base 17: mod_base = cm
  modified_base 18: mod_base = OTHER; note = 2-fluororibose uracil
  modified_base 19: mod_base = gm
  modified_base 20: mod_base = OTHER; note = 2-fluororibose uracil
  modified_base 21: mod_base = um
  modified_base 21..22: mod_base = OTHER; note = phosphorothioate
  modified_base 22: mod_base = um
  modified_base 22..23: mod_base = OTHER; note = phosphorothioate
  modified_base 23: mod_base = um
  source 1..23: mol_type = other RNA
ttatagagcaagaacactgtttt

SEQ ID NO: 250 - RNA, 23 nt, synthetic construct
  misc_feature 1..23: note = Synthetic: WV-36841
  misc_feature 1..23: note = Synthetic: SSR-0103401
  modified_base 1: mod_base = um
  modified_base 1..2: mod_base = OTHER; note = phosphorothioate
  modified_base 2: mod_base = OTHER; note = 2-fluororibose uracil
  modified_base 2..3: mod_base = OTHER; note = phosphorothioate
  modified_base 3: mod_base = OTHER; note = 2-O-methylribose adenine
  modified_base 4: mod_base = OTHER; note = 2-fluororibose uracil
  modified_base 5: mod_base = OTHER; note = 2-O-methylribose adenine
  modified_base 6: mod_base = OTHER; note = 2-fluororibose guanine
  modified_base 6..7: mod_base = OTHER; note = N-(1,3-dimethylimidazolidin-2-ylidene)phosphoramidate
  modified_base 7: mod_base = OTHER; note = 2-O-methylribose adenine
  modified_base 8: mod_base = OTHER; note = 2-fluororibose guanine
  modified_base 9: mod_base = cm
  modified_base 10: mod_base = OTHER; note = 2-fluororibose adenine
  modified_base 11: mod_base = OTHER; note = 2-O-methylribose adenine
  modified_base 12: mod_base = gm
  modified_base 13: mod_base = OTHER; note = 2-O-methylribose adenine
  modified_base 14: mod_base = OTHER; note = 2-fluororibose adenine
  modified_base 15: mod_base = cm
  modified_base 16: mod_base = OTHER; note = 2-fluororibose adenine
  modified_base 17: mod_base = cm
  modified_base 18: mod_base = OTHER; note = 2-fluororibose uracil
  modified_base 19: mod_base = gm
  modified_base 20: mod_base = OTHER; note = 2-fluororibose uracil
  modified_base 21: mod_base = um
  modified_base 21..22: mod_base = OTHER; note = phosphorothioate
  modified_base 22: mod_base = um
  modified_base 22..23: mod_base = OTHER; note = phosphorothioate
  modified_base 23: mod_base = um
  source 1..23: mol_type = other RNA
ttatagagcaagaacactgtttt

SEQ ID NO: 251 - RNA, 23 nt, synthetic construct
  misc_feature 1..23: note = Synthetic: WV-36842
  misc_feature 1..23: note = Synthetic: SSR-0103402
  modified_base 1: mod_base = um
  modified_base 1..2: mod_base = OTHER; note = phosphorothioate
  modified_base 2: mod_base = OTHER; note = 2-fluororibose uracil
  modified_base 2..3: mod_base = OTHER; note = phosphorothioate
  modified_base 3: mod_base = OTHER; note = 2-O-methylribose adenine
  modified_base 4: mod_base = OTHER; note = 2-fluororibose uracil
  modified_base 5: mod_base = OTHER; note = 2-O-methylribose adenine
  modified_base 6: mod_base = OTHER; note = 2-fluororibose guanine
  modified_base 7: mod_base = OTHER; note = 2-O-methylribose adenine
  modified_base 7..8: mod_base = OTHER; note = N-(1,3-dimethylimidazolidin-2-ylidene)phosphoramidate
  modified_base 8: mod_base = OTHER; note = 2-fluororibose guanine
  modified_base 9: mod_base = cm
  modified_base 10: mod_base = OTHER; note = 2-fluororibose adenine
  modified_base 11: mod_base = OTHER; note = 2-O-methylribose adenine
  modified_base 12: mod_base = gm
  modified_base 13: mod_base = OTHER; note = 2-O-methylribose adenine
  modified_base 14: mod_base = OTHER; note = 2-fluororibose adenine
  modified_base 15: mod_base = cm
  modified_base 16: mod_base = OTHER; note = 2-fluororibose adenine
  modified_base 17: mod_base = cm
  modified_base 18: mod_base = OTHER; note = 2-fluororibose uracil
  modified_base 19: mod_base = gm
  modified_base 20: mod_base = OTHER; note = 2-fluororibose uracil
  modified_base 21: mod_base = um
  modified_base 21..22: mod_base = OTHER; note = phosphorothioate
  modified_base 22: mod_base = um
  modified_base 22..23: mod_base = OTHER; note = phosphorothioate
  modified_base 23: mod_base = um
  source 1..23: mol_type = other RNA
ttatagagcaagaacactgtttt

SEQ ID NO: 252 - RNA, 23 nt, synthetic construct
  misc_feature 1..23: note = Synthetic: WV-36843
  misc_feature 1..23: note = Synthetic: SSR-0103403
  modified_base 1: mod_base = um
  modified_base 1..2: mod_base = OTHER; note = phosphorothioate
  modified_base 2: mod_base = OTHER; note = 2-fluororibose uracil
  modified_base 2..3: mod_base = OTHER; note = phosphorothioate
  modified_base 3: mod_base = OTHER; note = 2-O-methylribose adenine
  modified_base 4: mod_base = OTHER; note = 2-fluororibose uracil
  modified_base 5: mod_base = OTHER; note = 2-O-methylribose adenine
  modified_base 6: mod_base = OTHER; note = 2-fluororibose guanine
  modified_base 7: mod_base = OTHER; note = 2-O-methylribose adenine
  modified_base 8: mod_base = OTHER; note = 2-fluororibose guanine
  modified_base 8..9: mod_base = OTHER; note = N-(1,3-dimethylimidazolidin-2-ylidene)phosphoramidate
  modified_base 9: mod_base = cm
  modified_base 10: mod_base = OTHER; note = 2-fluororibose adenine
  modified_base 11: mod_base = OTHER; note = 2-O-methylribose adenine
  modified_base 12: mod_base = gm
  modified_base 13: mod_base = OTHER; note = 2-O-methylribose adenine
  modified_base 14: mod_base = OTHER; note = 2-fluororibose adenine
  modified_base 15: mod_base = cm
  modified_base 16: mod_base = OTHER; note = 2-fluororibose adenine
  modified_base 17: mod_base = cm
  modified_base 18: mod_base = OTHER; note = 2-fluororibose uracil
  modified_base 19: mod_base = gm
  modified_base 20: mod_base = OTHER; note = 2-fluororibose uracil
  modified_base 21: mod_base = um
  modified_base 21..22: mod_base = OTHER; note = phosphorothioate
  modified_base 22: mod_base = um
  modified_base 22..23: mod_base = OTHER; note = phosphorothioate
  modified_base 23: mod_base = um
  source 1..23: mol_type = other RNA
ttatagagcaagaacactgtttt

SEQ ID NO: 253 - RNA, 23 nt, synthetic construct
  misc_feature 1..23: note = Synthetic: WV-36844
  misc_feature 1..23: note = Synthetic: SSR-0103404
  modified_base 1: mod_base = um
  modified_base 1..2: mod_base = OTHER; note = phosphorothioate
  modified_base 2: mod_base = OTHER; note = 2-fluororibose uracil
  modified_base 2..3: mod_base = OTHER; note = phosphorothioate
  modified_base 3: mod_base = OTHER; note = 2-O-methylribose adenine
  modified_base 4: mod_base = OTHER; note = 2-fluororibose uracil
  modified_base 5: mod_base = OTHER; note = 2-O-methylribose adenine
  modified_base 6: mod_base = OTHER; note = 2-fluororibose guanine
  modified_base 7: mod_base = OTHER; note = 2-O-methylribose adenine
  modified_base 8: mod_base = OTHER; note = 2-fluororibose guanine
  modified_base 9: mod_base = cm
  modified_base 9..10: mod_base = OTHER; note = N-(1,3-dimethylimidazolidin-2-ylidene)phosphoramidate
  modified_base 10: mod_base = OTHER; note = 2-fluororibose adenine
  modified_base 11: mod_base = OTHER; note = 2-O-methylribose adenine
  modified_base 12: mod_base = gm
  modified_base 13: mod_base = OTHER; note = 2-O-methylribose adenine
  modified_base 14: mod_base = OTHER; note = 2-fluororibose adenine
  modified_base 15: mod_base = cm
  modified_base 16: mod_base = OTHER; note = 2-fluororibose adenine
  modified_base 17: mod_base = cm
  modified_base 18: mod_base = OTHER; note = 2-fluororibose uracil
  modified_base 19: mod_base = gm
  modified_base 20: mod_base = OTHER; note = 2-fluororibose uracil
  modified_base 21: mod_base = um
  modified_base 21..22: mod_base = OTHER; note = phosphorothioate
  modified_base 22: mod_base = um
  modified_base 22..23: mod_base = OTHER; note = phosphorothioate
  modified_base 23: mod_base = um
  source 1..23: mol_type = other RNA
ttatagagcaagaacactgtttt

SEQ ID NO: 254 - RNA, 23 nt, synthetic construct
  misc_feature 1..23: note = Synthetic: WV-36845
  misc_feature 1..23: note = Synthetic: SSR-0103405
  modified_base 1: mod_base = um
  modified_base 1..2: mod_base = OTHER; note = phosphorothioate
  modified_base 2: mod_base = OTHER; note = 2-fluororibose uracil
  modified_base 2..3: mod_base = OTHER; note = phosphorothioate
  modified_base 3: mod_base = OTHER; note = 2-O-methylribose adenine
  modified_base 4: mod_base = OTHER; note = 2-fluororibose uracil
  modified_base 5: mod_base = OTHER; note = 2-O-methylribose adenine
  modified_base 6: mod_base = OTHER; note = 2-fluororibose guanine
  modified_base 7: mod_base = OTHER; note = 2-O-methylribose adenine
  modified_base 8: mod_base = OTHER; note = 2-fluororibose guanine
  modified_base 9: mod_base = cm
  modified_base 10: mod_base = OTHER; note = 2-fluororibose adenine
  modified_base 10..11: mod_base = OTHER; note = N-(1,3-dimethylimidazolidin-2-ylidene)phosphoramidate
  modified_base 11: mod_base = OTHER; note = 2-O-methylribose adenine
  modified_base 12: mod_base = gm
  modified_base 13: mod_base = OTHER; note = 2-O-methylribose adenine
  modified_base 14: mod_base = OTHER; note = 2-fluororibose adenine
  modified_base 15: mod_base = cm
  modified_base 16: mod_base = OTHER; note = 2-fluororibose adenine
  modified_base 17: mod_base = cm
  modified_base 18: mod_base = OTHER; note = 2-fluororibose uracil
  modified_base 19: mod_base = gm
  modified_base 20: mod_base = OTHER; note = 2-fluororibose uracil
  modified_base 21: mod_base = um
  modified_base 21..22: mod_base = OTHER; note = phosphorothioate
  modified_base 22: mod_base = um
  modified_base 22..23: mod_base = OTHER; note = phosphorothioate
  modified_base 23: mod_base = um
  source 1..23: mol_type = other RNA
ttatagagcaagaacactgtttt

SEQ ID NO: 255 - RNA, 23 nt, synthetic construct
  misc_feature 1..23: note = Synthetic: WV-36846
  misc_feature 1..23: note = Synthetic: SSR-0103406
  modified_base 1: mod_base = um
  modified_base 1..2: mod_base = OTHER; note = phosphorothioate
  modified_base 2: mod_base = OTHER; note = 2-fluororibose uracil
  modified_base 2..3: mod_base = OTHER; note = phosphorothioate
  modified_base 3: mod_base = OTHER; note = 2-O-methylribose adenine
  modified_base 4: mod_base = OTHER; note = 2-fluororibose uracil
  modified_base 5: mod_base = OTHER; note = 2-O-methylribose adenine
  modified_base 6: mod_base = OTHER; note = 2-fluororibose guanine
  modified_base 7: mod_base = OTHER; note = 2-O-methylribose adenine
  modified_base 8: mod_base = OTHER; note = 2-fluororibose guanine
  modified_base 9: mod_base = cm
  modified_base 10: mod_base = OTHER; note = 2-fluororibose adenine
  modified_base 11: mod_base = OTHER; note = 2-O-methylribose adenine
  modified_base 11..12: mod_base = OTHER; note = N-(1,3-dimethylimidazolidin-2-ylidene)phosphoramidate
  modified_base 12: mod_base = gm
  modified_base 13: mod_base = OTHER; note = 2-O-methylribose adenine
  modified_base 14: mod_base = OTHER; note = 2-fluororibose adenine
  modified_base 15: mod_base = cm
  modified_base 16: mod_base = OTHER; note = 2-fluororibose adenine
  modified_base 17: mod_base = cm
  modified_base 18: mod_base = OTHER; note = 2-fluororibose uracil
  modified_base 19: mod_base = gm
  modified_base 20: mod_base = OTHER; note = 2-fluororibose uracil
  modified_base 21: mod_base = um
  modified_base 21..22: mod_base = OTHER; note = phosphorothioate
  modified_base 22: mod_base = um
  modified_base 22..23: mod_base = OTHER; note = phosphorothioate
  modified_base 23: mod_base = um
  source 1..23: mol_type = other RNA
ttatagagcaagaacactgtttt

SEQ ID NO: 256 - RNA, 23 nt, synthetic construct
  misc_feature 1..23: note = Synthetic: WV-36847
  misc_feature 1..23: note = Synthetic: SSR-0103407
  modified_base 1: mod_base = um
  modified_base 1..2: mod_base = OTHER; note = phosphorothioate
  modified_base 2: mod_base = OTHER; note = 2-fluororibose uracil
  modified_base 2..3: mod_base = OTHER; note = phosphorothioate
  modified_base 3: mod_base = OTHER; note = 2-O-methylribose adenine
  modified_base 4: mod_base = OTHER; note = 2-fluororibose uracil
  modified_base 5: mod_base = OTHER; note = 2-O-methylribose adenine
  modified_base 6: mod_base = OTHER; note = 2-fluororibose guanine
  modified_base 7: mod_base = OTHER; note = 2-O-methylribose adenine
  modified_base 8: mod_base = OTHER; note = 2-fluororibose guanine
  modified_base 9: mod_base = cm
  modified_base 10: mod_base = OTHER; note = 2-fluororibose adenine
  modified_base 11: mod_base = OTHER; note = 2-O-methylribose adenine
  modified_base 12: mod_base = gm
  modified_base 12..13: mod_base = OTHER; note = N-(1,3-dimethylimidazolidin-2-ylidene)phosphoramidate
  modified_base 13: mod_base = OTHER; note = 2-O-methylribose adenine
  modified_base 14: mod_base = OTHER; note = 2-fluororibose adenine
  modified_base 15: mod_base = cm
  modified_base 16: mod_base = OTHER; note = 2-fluororibose adenine
  modified_base 17: mod_base = cm
  modified_base 18: mod_base = OTHER; note = 2-fluororibose uracil
  modified_base 19: mod_base = gm
  modified_base 20: mod_base = OTHER; note = 2-fluororibose uracil
  modified_base 21: mod_base = um
  modified_base 21..22: mod_base = OTHER; note = phosphorothioate
  modified_base 22: mod_base = um
  modified_base 22..23: mod_base = OTHER; note = phosphorothioate
  modified_base 23: mod_base = um
  source 1..23: mol_type = other RNA
ttatagagcaagaacactgtttt

SEQ ID NO: 257 - RNA, 23 nt, synthetic construct
  misc_feature 1..23: note = Synthetic: WV-36848
  misc_feature 1..23: note = Synthetic: SSR-0103408
  modified_base 1: mod_base = um
  modified_base 1..2: mod_base = OTHER; note = phosphorothioate
  modified_base 2: mod_base = OTHER; note = 2-fluororibose uracil
  modified_base 2..3: mod_base = OTHER; note = phosphorothioate
  modified_base 3: mod_base = OTHER; note = 2-O-methylribose adenine
  modified_base 4: mod_base = OTHER; note = 2-fluororibose uracil
  modified_base 5: mod_base = OTHER; note = 2-O-methylribose adenine
  modified_base 6: mod_base = OTHER; note = 2-fluororibose guanine
  modified_base 7: mod_base = OTHER; note = 2-O-methylribose adenine
  modified_base 8: mod_base = OTHER; note = 2-fluororibose guanine
  modified_base 9: mod_base = cm
  modified_base 10: mod_base = OTHER; note = 2-fluororibose adenine
  modified_base 11: mod_base = OTHER; note = 2-O-methylribose adenine
  modified_base 12: mod_base = gm
  modified_base 13: mod_base = OTHER; note = 2-O-methylribose adenine
  modified_base 13..14: mod_base = OTHER; note = N-(1,3-dimethylimidazolidin-2-ylidene)phosphoramidate
  modified_base 14: mod_base = OTHER; note = 2-fluororibose adenine
  modified_base 15: mod_base = cm
  modified_base 16: mod_base = OTHER; note = 2-fluororibose adenine
  modified_base 17: mod_base = cm
  modified_base 18: mod_base = OTHER; note = 2-fluororibose uracil
  modified_base 19: mod_base = gm
  modified_base 20: mod_base = OTHER; note = 2-fluororibose uracil
  modified_base 21: mod_base = um
  modified_base 21..22: mod_base = OTHER; note = phosphorothioate
  modified_base 22: mod_base = um
  modified_base 22..23: mod_base = OTHER; note = phosphorothioate
  modified_base 23: mod_base = um
  source 1..23: mol_type = other RNA
ttatagagcaagaacactgtttt

SEQ ID NO: 258 - RNA, 23 nt, synthetic construct
  misc_feature 1..23: note = Synthetic: WV-36849
  misc_feature 1..23: note = Synthetic: SSR-0103409
  modified_base 1: mod_base = um
  modified_base 1..2: mod_base = OTHER; note = phosphorothioate
  modified_base 2: mod_base = OTHER; note = 2-fluororibose uracil
  modified_base 2..3: mod_base = OTHER; note = phosphorothioate
  modified_base 3: mod_base = OTHER; note = 2-O-methylribose adenine
  modified_base 4: mod_base = OTHER; note = 2-fluororibose uracil
  modified_base 5: mod_base = OTHER; note = 2-O-methylribose adenine
  modified_base 6: mod_base = OTHER; note = 2-fluororibose guanine
  modified_base 7: mod_base = OTHER; note = 2-O-methylribose adenine
  modified_base 8: mod_base = OTHER; note = 2-fluororibose guanine
  modified_base 9: mod_base = cm
  modified_base 10: mod_base = OTHER; note = 2-fluororibose adenine
  modified_base 11: mod_base = OTHER; note = 2-O-methylribose adenine
  modified_base 12: mod_base = gm
  modified_base 13: mod_base = OTHER; note = 2-O-methylribose adenine
  modified_base 14: mod_base = OTHER; note = 2-fluororibose adenine
  modified_base 14..15: mod_base = OTHER; note = N-(1,3-dimethylimidazolidin-2-ylidene)phosphoramidate
  modified_base 15: mod_base = cm
  modified_base 16: mod_base = OTHER; note = 2-fluororibose adenine
  modified_base 17: mod_base = cm
  modified_base 18: mod_base = OTHER; note = 2-fluororibose uracil
  modified_base 19: mod_base = gm
  modified_base 20: mod_base = OTHER; note = 2-fluororibose uracil
  modified_base 21: mod_base = um
  modified_base 21..22: mod_base = OTHER; note = phosphorothioate
  modified_base 22: mod_base = um
  modified_base 22..23: mod_base = OTHER; note = phosphorothioate
  modified_base 23: mod_base = um
  source 1..23: mol_type = other RNA
ttatagagcaagaacactgtttt

SEQ ID NO: 259 - RNA, 23 nt, synthetic construct
  misc_feature 1..23: note = Synthetic: WV-36850
  misc_feature 1..23: note = Synthetic: SSR-0103410
  modified_base 1: mod_base = um
  modified_base 1..2: mod_base = OTHER; note = phosphorothioate
  modified_base 2: mod_base = OTHER; note = 2-fluororibose uracil
  modified_base 2..3: mod_base = OTHER; note = phosphorothioate
  modified_base 3: mod_base = OTHER; note = 2-O-methylribose adenine
  modified_base 4: mod_base = OTHER; note = 2-fluororibose uracil
  modified_base 5: mod_base = OTHER; note = 2-O-methylribose adenine
  modified_base 6: mod_base = OTHER; note = 2-fluororibose guanine
  modified_base 7: mod_base = OTHER; note = 2-O-methylribose adenine
  modified_base 8: mod_base = OTHER; note = 2-fluororibose guanine
  modified_base 9: mod_base = cm
  modified_base 10: mod_base = OTHER; note = 2-fluororibose adenine
  modified_base 11: mod_base = OTHER; note = 2-O-methylribose adenine
  modified_base 12: mod_base = gm
  modified_base 13: mod_base = OTHER; note = 2-O-methylribose adenine
  modified_base 14: mod_base = OTHER; note = 2-fluororibose adenine
  modified_base 15: mod_base = cm
  modified_base 15..16: mod_base = OTHER; note = N-(1,3-dimethylimidazolidin-2-ylidene)phosphoramidate
  modified_base 16: mod_base = OTHER; note = 2-fluororibose adenine
  modified_base 17: mod_base = cm
  modified_base 18: mod_base = OTHER; note = 2-fluororibose uracil
  modified_base 19: mod_base = gm
  modified_base 20: mod_base = OTHER; note = 2-fluororibose uracil
  modified_base 21: mod_base = um
  modified_base 21..22: mod_base = OTHER; note = phosphorothioate
  modified_base 22: mod_base = um
  modified_base 22..23: mod_base = OTHER; note = phosphorothioate
  modified_base 23: mod_base = um
  source 1..23: mol_type = other RNA
ttatagagcaagaacactgtttt

SEQ ID NO: 260 - RNA, 23 nt, synthetic construct
  misc_feature 1..23: note = Synthetic: WV-36851
  misc_feature 1..23: note = Synthetic: SSR-0103411
  modified_base 1: mod_base = um
  modified_base 1..2: mod_base = OTHER; note = phosphorothioate
  modified_base 2: mod_base = OTHER; note = 2-fluororibose uracil
  modified_base 2..3: mod_base = OTHER; note = phosphorothioate
  modified_base 3: mod_base = OTHER; note = 2-O-methylribose adenine
  modified_base 4: mod_base = OTHER; note = 2-fluororibose uracil
  modified_base 5: mod_base = OTHER; note = 2-O-methylribose adenine
  modified_base 6: mod_base = OTHER; note = 2-fluororibose guanine
  modified_base 7: mod_base = OTHER; note = 2-O-methylribose adenine
  modified_base 8: mod_base = OTHER; note = 2-fluororibose guanine
  modified_base 9: mod_base = cm
  modified_base 10: mod_base = OTHER; note = 2-fluororibose adenine
  modified_base 11: mod_base = OTHER; note = 2-O-methylribose adenine
  modified_base 12: mod_base = gm
  modified_base 13: mod_base = OTHER; note = 2-O-methylribose adenine
  modified_base 14: mod_base = OTHER; note = 2-fluororibose adenine
  modified_base 15: mod_base = cm
  modified_base 16: mod_base = OTHER; note = 2-fluororibose adenine
  modified_base 16..17: mod_base = OTHER; note = N-(1,3-dimethylimidazolidin-2-ylidene)phosphoramidate
  modified_base 17: mod_base = cm
  modified_base 18: mod_base = OTHER; note = 2-fluororibose uracil
  modified_base 19: mod_base = gm
  modified_base 20: mod_base = OTHER; note = 2-fluororibose uracil
  modified_base 21: mod_base = um
  modified_base 21..22: mod_base = OTHER; note = phosphorothioate
  modified_base 22: mod_base = um
  modified_base 22..23: mod_base = OTHER; note = phosphorothioate
  modified_base 23: mod_base = um
  source 1..23: mol_type = other RNA
ttatagagcaagaacactgtttt

SEQ ID NO: 261 - RNA, 23 nt, synthetic construct
  misc_feature 1..23: note = Synthetic: WV-36852
  misc_feature 1..23: note = Synthetic: SSR-0103412
  modified_base 1: mod_base = um
  modified_base 1..2: mod_base = OTHER; note = phosphorothioate
  modified_base 2: mod_base = OTHER; note = 2-fluororibose uracil
  modified_base 2..3: mod_base = OTHER; note = phosphorothioate
  modified_base 3: mod_base = OTHER; note = 2-O-methylribose adenine
  modified_base 4: mod_base = OTHER; note = 2-fluororibose uracil
  modified_base 5: mod_base = OTHER; note = 2-O-methylribose adenine
  modified_base 6: mod_base = OTHER; note = 2-fluororibose guanine
  modified_base 7: mod_base = OTHER; note = 2-O-methylribose adenine
  modified_base 8: mod_base = OTHER; note = 2-fluororibose guanine
  modified_base 9: mod_base = cm
  modified_base 10: mod_base = OTHER; note = 2-fluororibose adenine
  modified_base 11: mod_base = OTHER; note = 2-O-methylribose adenine
  modified_base 12: mod_base = gm
  modified_base 13: mod_base = OTHER; note = 2-O-methylribose adenine
  modified_base 14: mod_base = OTHER; note = 2-fluororibose adenine
  modified_base 15: mod_base = cm
  modified_base 16: mod_base = OTHER; note = 2-fluororibose adenine
  modified_base 17: mod_base = cm
  modified_base 17..18: mod_base = OTHER; note = N-(1,3-dimethylimidazolidin-2-ylidene)phosphoramidate
  modified_base 18: mod_base = OTHER; note = 2-fluororibose uracil
  modified_base 19: mod_base = gm
  modified_base 20: mod_base = OTHER; note = 2-fluororibose uracil
  modified_base 21: mod_base = um
  modified_base 21..22: mod_base = OTHER; note = phosphorothioate
  modified_base 22: mod_base = um
  modified_base 22..23: mod_base = OTHER; note = phosphorothioate
  modified_base 23: mod_base = um
  source 1..23: mol_type = other RNA
ttatagagcaagaacactgtttt

SEQ ID NO: 262 - RNA, 23 nt, synthetic construct
  misc_feature 1..23: note = Synthetic: WV-36853
  misc_feature 1..23: note = Synthetic: SSR-0103413
  modified_base 1: mod_base = um
  modified_base 1..2: mod_base = OTHER; note = phosphorothioate
  modified_base 2: mod_base = OTHER; note = 2-fluororibose uracil
  modified_base 2..3: mod_base = OTHER; note = phosphorothioate
  modified_base 3: mod_base = OTHER; note = 2-O-methylribose adenine
  modified_base 4: mod_base = OTHER; note = 2-fluororibose uracil
  modified_base 5: mod_base = OTHER; note = 2-O-methylribose adenine
  modified_base 6: mod_base = OTHER; note = 2-fluororibose guanine
  modified_base 7: mod_base = OTHER; note = 2-O-methylribose adenine
  modified_base 8: mod_base = OTHER; note = 2-fluororibose guanine
  modified_base 9: mod_base = cm
  modified_base 10: mod_base = OTHER; note = 2-fluororibose adenine
  modified_base 11: mod_base = OTHER; note = 2-O-methylribose adenine
  modified_base 12: mod_base = gm
  modified_base 13: mod_base = OTHER; note = 2-O-methylribose adenine
  modified_base 14: mod_base = OTHER; note = 2-fluororibose adenine
  modified_base 15: mod_base = cm
  modified_base 16: mod_base = OTHER; note = 2-fluororibose adenine
  modified_base 17: mod_base = cm
  modified_base 18: mod_base = OTHER; note = 2-fluororibose uracil
  modified_base 18..19: mod_base = OTHER; note = N-(1,3-dimethylimidazolidin-2-ylidene)phosphoramidate
  modified_base 19: mod_base = gm
  modified_base 20: mod_base = OTHER; note = 2-fluororibose uracil
  modified_base 21: mod_base = um
  modified_base 21..22: mod_base = OTHER; note = phosphorothioate
  modified_base 22: mod_base = um
  modified_base 22..23: mod_base = OTHER; note = phosphorothioate
  modified_base 23: mod_base = um
  source 1..23: mol_type = other RNA
ttatagagcaagaacactgtttt

SEQ ID NO: 263 - RNA, 23 nt, synthetic construct
  misc_feature 1..23: note = Synthetic: WV-36854
  misc_feature 1..23: note = Synthetic: SSR-0103414
  modified_base 1: mod_base = um
  modified_base 1..2: mod_base = OTHER; note = phosphorothioate
  modified_base 2: mod_base = OTHER; note = 2-fluororibose uracil
  modified_base 2..3: mod_base = OTHER; note = phosphorothioate
  modified_base 3: mod_base = OTHER; note = 2-O-methylribose adenine
  modified_base 4: mod_base = OTHER; note = 2-fluororibose uracil
  modified_base 5: mod_base = OTHER; note = 2-O-methylribose adenine
  modified_base 6: mod_base = OTHER; note = 2-fluororibose guanine
  modified_base 7: mod_base = OTHER; note = 2-O-methylribose adenine
  modified_base 8: mod_base = OTHER; note = 2-fluororibose guanine
  modified_base 9: mod_base = cm
  modified_base 10: mod_base = OTHER; note = 2-fluororibose adenine
  modified_base 11: mod_base = OTHER; note = 2-O-methylribose adenine
  modified_base 12: mod_base = gm
  modified_base 13: mod_base = OTHER; note = 2-O-methylribose adenine
  modified_base 14: mod_base = OTHER; note = 2-fluororibose adenine
  modified_base 15: mod_base = cm
  modified_base 16: mod_base = OTHER; note = 2-fluororibose adenine
  modified_base 17: mod_base = cm
  modified_base 18: mod_base = OTHER; note = 2-fluororibose uracil
  modified_base 19: mod_base = gm
  modified_base 19..20: mod_base = OTHER; note = N-(1,3-dimethylimidazolidin-2-ylidene)phosphoramidate
  modified_base 20: mod_base = OTHER; note = 2-fluororibose uracil
  modified_base 21: mod_base = um
  modified_base 21..22: mod_base = OTHER; note = phosphorothioate
  modified_base 22: mod_base = um
  modified_base 22..23: mod_base = OTHER; note = phosphorothioate
  modified_base 23: mod_base = um
  source 1..23: mol_type = other RNA
ttatagagcaagaacactgtttt

SEQ ID NO: 264 - RNA, 23 nt, synthetic construct
  misc_feature 1..23: note = Synthetic: WV-36855
  misc_feature 1..23: note = Synthetic: SSR-0103415
  modified_base 1: mod_base = um
  modified_base 1..2: mod_base = OTHER; note = phosphorothioate
  modified_base 2: mod_base = OTHER; note = 2-fluororibose uracil
  modified_base 2..3: mod_base = OTHER; note = phosphorothioate
  modified_base 3: mod_base = OTHER; note = 2-O-methylribose adenine
  modified_base 4: mod_base = OTHER; note = 2-fluororibose uracil
  modified_base 5: mod_base = OTHER; note = 2-O-methylribose adenine
  modified_base 6: mod_base = OTHER; note = 2-fluororibose guanine
  modified_base 7: mod_base = OTHER; note = 2-O-methylribose adenine
  modified_base 8: mod_base = OTHER; note = 2-fluororibose guanine
  modified_base 9: mod_base = cm
  modified_base 10: mod_base = OTHER; note = 2-fluororibose adenine
  modified_base 11: mod_base = OTHER; note = 2-O-methylribose adenine
  modified_base 12: mod_base = gm
  modified_base 13: mod_base = OTHER; note = 2-O-methylribose adenine
  modified_base 14: mod_base = OTHER; note = 2-fluororibose adenine
  modified_base 15: mod_base = cm
  modified_base 16: mod_base = OTHER; note = 2-fluororibose adenine
  modified_base 17: mod_base = cm
  modified_base 18: mod_base = OTHER; note = 2-fluororibose uracil
  modified_base 19: mod_base = gm
  modified_base 20: mod_base = OTHER; note = 2-fluororibose uracil
  modified_base 20..21: mod_base = OTHER; note = N-(1,3-dimethylimidazolidin-2-ylidene)phosphoramidate
  modified_base 21: mod_base = um
  modified_base 21..22: mod_base = OTHER; note = phosphorothioate
  modified_base 22: mod_base = um
  modified_base 22..23: mod_base = OTHER; note = phosphorothioate
  modified_base 23: mod_base = um
  source 1..23: mol_type = other RNA
ttatagagcaagaacactgtttt

SEQ ID NO: 265 - RNA, 23 nt, synthetic construct
  misc_feature 1..23: note = Synthetic: WV-36856
  misc_feature 1..23: note = Synthetic: SSR-0103417
  modified_base 1: mod_base = um
  modified_base 1..2: mod_base = OTHER; note = phosphorothioate
  modified_base 2: mod_base = OTHER; note = 2-fluororibose uracil
  modified_base 2..3: mod_base = OTHER; note = phosphorothioate
  modified_base 3: mod_base = OTHER; note = 2-O-methylribose adenine
  modified_base 4: mod_base = OTHER; note = 2-fluororibose uracil
  modified_base 5: mod_base = OTHER; note = 2-O-methylribose adenine
  modified_base 6: mod_base = OTHER; note = 2-fluororibose guanine
  modified_base 7: mod_base = OTHER; note = 2-O-methylribose adenine
  modified_base 8: mod_base = OTHER; note = 2-fluororibose guanine
  modified_base 9: mod_base = cm
  modified_base 10: mod_base = OTHER; note = 2-fluororibose adenine
  modified_base 11: mod_base = OTHER; note = 2-O-methylribose adenine
  modified_base 12: mod_base = gm
  modified_base 13: mod_base = OTHER; note = 2-O-methylribose adenine
  modified_base 14: mod_base = OTHER; note = 2-fluororibose adenine
  modified_base 15: mod_base = cm
  modified_base 16: mod_base = OTHER; note = 2-fluororibose adenine
  modified_base 17: mod_base = cm
  modified_base 18: mod_base = OTHER; note = 2-fluororibose uracil
  modified_base 19: mod_base = gm
  modified_base 20: mod_base = OTHER; note = 2-fluororibose uracil
  modified_base 21: mod_base = um
  modified_base 21..22: mod_base = OTHER; note = N-(1,3-dimethylimidazolidin-2-ylidene)phosphoramidate
  modified_base 22: mod_base = um
  modified_base 22..23: mod_base = OTHER; note = phosphorothioate
  modified_base 23: mod_base = um
  source 1..23: mol_type = other RNA
ttatagagcaagaacactgtttt

SEQ ID NO: 266 - RNA, 23 nt, synthetic construct
  misc_feature 1..23: note = Synthetic: WV-36857
  misc_feature 1..23: note = Synthetic: SSR-0103418
  modified_base 1: mod_base = um
  modified_base 1..2: mod_base = OTHER; note = phosphorothioate
  modified_base 2: mod_base = OTHER; note = 2-fluororibose uracil
  modified_base 2..3: mod_base = OTHER; note = phosphorothioate
  modified_base 3: mod_base = OTHER; note = 2-O-methylribose adenine
  modified_base 4: mod_base = OTHER; note = 2-fluororibose uracil
  modified_base 5: mod_base = OTHER; note = 2-O-methylribose adenine
  modified_base 6: mod_base = OTHER; note = 2-fluororibose guanine
  modified_base 7: mod_base = OTHER; note = 2-O-methylribose adenine
  modified_base 8: mod_base = OTHER; note = 2-fluororibose guanine
  modified_base 9: mod_base = cm
  modified_base 10: mod_base = OTHER; note = 2-fluororibose adenine
  modified_base 11: mod_base = OTHER; note = 2-O-methylribose adenine
  modified_base 12: mod_base = gm
  modified_base 13: mod_base = OTHER; note = 2-O-methylribose adenine
  modified_base 14: mod_base = OTHER; note = 2-fluororibose adenine
  modified_base 15: mod_base = cm
  modified_base 16: mod_base = OTHER; note = 2-fluororibose adenine
  modified_base 17: mod_base = cm
  modified_base 18: mod_base = OTHER; note = 2-fluororibose uracil
  modified_base 19: mod_base = gm
  modified_base 20: mod_base = OTHER; note = 2-fluororibose uracil
  modified_base 21: mod_base = um
  modified_base 21..22: mod_base = OTHER; note = phosphorothioate
  modified_base 22: mod_base = um
  modified_base 22..23: mod_base = OTHER; note = N-(1,3-dimethylimidazolidin-2-ylidene)phosphoramidate
  modified_base 23: mod_base = um
  source 1..23: mol_type = other RNA
ttatagagcaagaacactgtttt

SEQ ID NO: 267 - RNA, 23 nt, synthetic construct
  misc_feature 1..23: note = Synthetic: WV-36980
  misc_feature 1..23: note = Synthetic: SSR-0102992
  modified_base 1: mod_base = um
  modified_base 1..2: mod_base = OTHER; note = R-phosphorothioate
  modified_base 2: mod_base = OTHER; note = 2-fluororibose uracil
  modified_base 2..3: mod_base = OTHER; note = R-phosphorothioate
  modified_base 3: mod_base = OTHER; note = 2-O-methylribose adenine
  modified_base 3..4: mod_base = OTHER; note = R-phosphorothioate
  modified_base 4: mod_base = OTHER; note = 2-fluororibose uracil
  modified_base 4..5: mod_base = OTHER; note = R-phosphorothioate
  modified_base 5: mod_base = OTHER; note = 2-O-methylribose adenine
  modified_base 5..6: mod_base = OTHER; note = R-phosphorothioate
  modified_base 6: mod_base = OTHER; note = 2-fluororibose guanine
  modified_base 6..7: mod_base = OTHER; note = R-phosphorothioate
  modified_base 7: mod_base = OTHER; note = 2-O-methylribose adenine
  modified_base 7..8: mod_base = OTHER; note = R-phosphorothioate
  modified_base 8: mod_base = OTHER; note = 2-fluororibose guanine
  modified_base 8..9: mod_base = OTHER; note = S-phosphorothioate
  modified_base 9: mod_base = cm
  modified_base 10: mod_base = OTHER; note = 2-fluororibose adenine
  modified_base 11: mod_base = OTHER; note = 2-O-methylribose adenine
  modified_base 12: mod_base = gm
  modified_base 13: mod_base = OTHER; note = 2-O-methylribose adenine
  modified_base 14: mod_base = OTHER; note = 2-fluororibose adenine
  modified_base 15: mod_base = cm
  modified_base 16: mod_base = OTHER; note = 2-fluororibose adenine
  modified_base 17: mod_base = cm
  modified_base 18: mod_base = OTHER; note = 2-fluororibose uracil
  modified_base 19: mod_base = gm
  modified_base 20: mod_base = OTHER; note = 2-fluororibose uracil
  modified_base 21: mod_base = um
  modified_base 21..22: mod_base = OTHER; note = S-phosphorothioate
  modified_base 22: mod_base = um
  modified_base 22..23: mod_base = OTHER; note = S-phosphorothioate
  modified_base 23: mod_base = um
  source 1..23: mol_type = other RNA
ttatagagcaagaacactgtttt

SEQ ID NO: 268 - RNA, 23 nt, synthetic construct
  misc_feature 1..23: note = Synthetic: WV-36981
  misc_feature 1..23: note = Synthetic: SSR-0102993
  modified_base 1: mod_base = um
  modified_base 1..2: mod_base = OTHER; note = R-phosphorothioate
  modified_base 2: mod_base = OTHER; note = 2-fluororibose uracil
  modified_base 2..3: mod_base = OTHER; note = R-phosphorothioate
  modified_base 3: mod_base = OTHER; note = 2-O-methylribose adenine
  modified_base 3..4: mod_base = OTHER; note = R-phosphorothioate
  modified_base 4: mod_base = OTHER; note = 2-fluororibose uracil
  modified_base 4..5: mod_base = OTHER; note = R-phosphorothioate
  modified_base 5: mod_base = OTHER; note = 2-O-methylribose adenine
  modified_base 5..6: mod_base = OTHER; note = R-phosphorothioate
  modified_base 6: mod_base = OTHER; note = 2-fluororibose guanine
  modified_base 6..7: mod_base = OTHER; note = R-phosphorothioate
  modified_base 7: mod_base = OTHER; note = 2-O-methylribose adenine
  modified_base 7..8: mod_base = OTHER; note = S-phosphorothioate
  modified_base 8: mod_base = OTHER; note = 2-fluororibose guanine
  modified_base 8..9: mod_base = OTHER; note = R-phosphorothioate
  modified_base 9: mod_base = cm
  modified_base 10: mod_base = OTHER; note = 2-fluororibose adenine
  modified_base 11: mod_base = OTHER; note = 2-O-methylribose adenine
  modified_base 12: mod_base = gm
  modified_base 13: mod_base = OTHER; note = 2-O-methylribose adenine
  modified_base 14: mod_base = OTHER; note = 2-fluororibose adenine
  modified_base 15: mod_base = cm
  modified_base 16: mod_base = OTHER; note = 2-fluororibose adenine
  modified_base 17: mod_base = cm
  modified_base 18: mod_base = OTHER; note = 2-fluororibose uracil
  modified_base 19: mod_base = gm
  modified_base 20: mod_base = OTHER; note = 2-fluororibose uracil
  modified_base 21: mod_base = um
  modified_base 21..22: mod_base = OTHER; note = S-phosphorothioate
  modified_base 22: mod_base = um
  modified_base 22..23: mod_base = OTHER; note = S-phosphorothioate
  modified_base 23: mod_base = um
  source 1..23: mol_type = other RNA
ttatagagcaagaacactgtttt

SEQ ID NO: 269 - RNA, 23 nt, synthetic construct
  misc_feature 1..23: note = Synthetic: WV-36982
  misc_feature 1..23: note = Synthetic: SSR-0102994
  modified_base 1: mod_base = um
  modified_base 1..2: mod_base = OTHER; note = R-phosphorothioate
  modified_base 2: mod_base = OTHER; note = 2-fluororibose uracil
  modified_base 2..3: mod_base = OTHER; note = R-phosphorothioate
  modified_base 3: mod_base = OTHER; note = 2-O-methylribose adenine
  modified_base 3..4: mod_base = OTHER; note = R-phosphorothioate
  modified_base 4: mod_base = OTHER; note = 2-fluororibose uracil
  modified_base 4..5: mod_base = OTHER; note = R-phosphorothioate
  modified_base 5: mod_base = OTHER; note = 2-O-methylribose adenine
  modified_base 5..6: mod_base = OTHER; note = R-phosphorothioate
  modified_base 6: mod_base = OTHER; note = 2-fluororibose guanine
  modified_base 6..7: mod_base = OTHER; note = R-phosphorothioate
  modified_base 7: mod_base = OTHER; note = 2-O-methylribose adenine
  modified_base 7..8: mod_base = OTHER; note = S-phosphorothioate
  modified_base 8: mod_base = OTHER; note = 2-fluororibose guanine
  modified_base 8..9: mod_base = OTHER; note = S-phosphorothioate
  modified_base 9: mod_base = cm
  modified_base 10: mod_base = OTHER; note = 2-fluororibose adenine
  modified_base 11: mod_base = OTHER; note = 2-O-methylribose adenine
  modified_base 12: mod_base = gm
  modified_base 13: mod_base = OTHER; note = 2-O-methylribose adenine
  modified_base 14: mod_base = OTHER; note = 2-fluororibose adenine
  modified_base 15: mod_base = cm
  modified_base 16: mod_base = OTHER; note = 2-fluororibose adenine
  modified_base 17: mod_base = cm
  modified_base 18: mod_base = OTHER; note = 2-fluororibose uracil
  modified_base 19: mod_base = gm
  modified_base 20: mod_base = OTHER; note = 2-fluororibose uracil
  modified_base 21: mod_base = um
  modified_base 21..22: mod_base = OTHER; note = S-phosphorothioate
  modified_base 22: mod_base = um
  modified_base 22..23: mod_base = OTHER; note = S-phosphorothioate
  modified_base 23: mod_base = um
  source 1..23: mol_type = other RNA
ttatagagcaagaacactgtttt

SEQ ID NO: 270 - RNA, 23 nt, synthetic construct
  misc_feature 1..23: note = Synthetic: WV-36983
  misc_feature 1..23: note = Synthetic: SSR-0102995
  modified_base 1: mod_base = um
  modified_base 1..2: mod_base = OTHER; note = R-phosphorothioate
  modified_base 2: mod_base = OTHER; note = 2-fluororibose uracil
  modified_base 2..3: mod_base = OTHER; note = R-phosphorothioate
  modified_base 3: mod_base = OTHER; note = 2-O-methylribose adenine
  modified_base 3..4: mod_base = OTHER; note = R-phosphorothioate
  modified_base 4: mod_base = OTHER; note = 2-fluororibose uracil
  modified_base 4..5: mod_base = OTHER; note = R-phosphorothioate
  modified_base 5: mod_base = OTHER; note = 2-O-methylribose adenine
  modified_base 5..6: mod_base = OTHER; note = R-phosphorothioate
  modified_base 6: mod_base = OTHER; note = 2-fluororibose guanine
  modified_base 6..7: mod_base = OTHER; note = S-phosphorothioate
  modified_base 7: mod_base = OTHER; note = 2-O-methylribose adenine
  modified_base 7..8: mod_base = OTHER; note = R-phosphorothioate
  modified_base 8: mod_base = OTHER; note = 2-fluororibose guanine
  modified_base 8..9: mod_base = OTHER; note = R-phosphorothioate
  modified_base 9: mod_base = cm
  modified_base 10: mod_base = OTHER; note = 2-fluororibose adenine
  modified_base 11: mod_base = OTHER; note = 2-O-methylribose adenine
  modified_base 12: mod_base = gm
  modified_base 13: mod_base = OTHER; note = 2-O-methylribose adenine
  modified_base 14: mod_base = OTHER; note = 2-fluororibose adenine
  modified_base 15: mod_base = cm
  modified_base 16: mod_base = OTHER; note = 2-fluororibose adenine
  modified_base 17: mod_base = cm
  modified_base 18: mod_base = OTHER; note = 2-fluororibose uracil
  modified_base 19: mod_base = gm
  modified_base 20: mod_base = OTHER; note = 2-fluororibose uracil
  modified_base 21: mod_base = um
  modified_base 21..22: mod_base = OTHER; note = S-phosphorothioate
  modified_base 22: mod_base = um
  modified_base 22..23: mod_base = OTHER; note = S-phosphorothioate
  modified_base 23: mod_base = um
  source 1..23: mol_type = other RNA
ttatagagcaagaacactgtttt

SEQ ID NO: 271 - RNA, 23 nt, synthetic construct
  misc_feature 1..23: note = Synthetic: WV-36984
  misc_feature 1..23: note = Synthetic: SSR-0102996
  modified_base 1: mod_base = um
  modified_base 1..2: mod_base = OTHER; note = R-phosphorothioate
  modified_base 2: mod_base = OTHER; note = 2-fluororibose uracil
  modified_base 2..3: mod_base = OTHER; note = R-phosphorothioate
  modified_base 3: mod_base = OTHER; note = 2-O-methylribose adenine
  modified_base 3..4: mod_base = OTHER; note = R-phosphorothioate
  modified_base 4: mod_base = OTHER; note = 2-fluororibose uracil
  modified_base 4..5: mod_base = OTHER; note = R-phosphorothioate
  modified_base 5: mod_base = OTHER; note = 2-O-methylribose adenine
  modified_base 5..6: mod_base = OTHER; note = R-phosphorothioate
  modified_base 6: mod_base = OTHER; note = 2-fluororibose guanine
  modified_base 6..7: mod_base = OTHER; note = S-phosphorothioate
  modified_base 7: mod_base = OTHER; note = 2-O-methylribose adenine
  modified_base 7..8: mod_base = OTHER; note = R-phosphorothioate
  modified_base 8: mod_base = OTHER; note = 2-fluororibose guanine
  modified_base 8..9: mod_base = OTHER; note = S-phosphorothioate
  modified_base 9: mod_base = cm
  modified_base 10: mod_base = OTHER; note = 2-fluororibose adenine
  modified_base 11: mod_base = OTHER; note = 2-O-methylribose adenine
  modified_base 12: mod_base = gm
  modified_base 13: mod_base = OTHER; note = 2-O-methylribose adenine
  modified_base 14: mod_base = OTHER; note = 2-fluororibose adenine
  modified_base 15: mod_base = cm
  modified_base 16: mod_base = OTHER; note = 2-fluororibose adenine
  modified_base 17: mod_base = cm
  modified_base 18: mod_base = OTHER; note = 2-fluororibose uracil
  modified_base 19: mod_base = gm
  modified_base 20: mod_base = OTHER; note = 2-fluororibose uracil
  modified_base 21: mod_base = um
  modified_base 21..22: mod_base = OTHER; note = S-phosphorothioate
  modified_base 22: mod_base = um
  modified_base 22..23: mod_base = OTHER; note = S-phosphorothioate
  modified_base 23: mod_base = um
  source 1..23: mol_type = other RNA
ttatagagcaagaacactgtttt

SEQ ID NO: 272 - RNA, 23 nt, synthetic construct
  misc_feature 1..23: note = Synthetic: WV-36985
  misc_feature 1..23: note = Synthetic: SSR-0102997
  modified_base 1: mod_base = um
  modified_base 1..2: mod_base = OTHER; note = R-phosphorothioate
  modified_base 2: mod_base = OTHER; note = 2-fluororibose uracil
  modified_base 2..3: mod_base = OTHER; note = R-phosphorothioate
  modified_base 3: mod_base = OTHER; note = 2-O-methylribose adenine
  modified_base 3..4: mod_base = OTHER; note = R-phosphorothioate
  modified_base 4: mod_base = OTHER; note = 2-fluororibose uracil
  modified_base 4..5: mod_base = OTHER; note = R-phosphorothioate
  modified_base 5: mod_base = OTHER; note = 2-O-methylribose adenine
  modified_base 5..6: mod_base = OTHER; note = R-phosphorothioate
  modified_base 6: mod_base = OTHER; note = 2-fluororibose guanine
  modified_base 6..7: mod_base = OTHER; note = S-phosphorothioate
  modified_base 7: mod_base = OTHER; note = 2-O-methylribose adenine
  modified_base 7..8: mod_base = OTHER; note = S-phosphorothioate
  modified_base 8: mod_base = OTHER; note = 2-fluororibose guanine
  modified_base 8..9: mod_base = OTHER; note = R-phosphorothioate
  modified_base 9: mod_base = cm
  modified_base 10: mod_base = OTHER; note = 2-fluororibose adenine
  modified_base 11: mod_base = OTHER; note = 2-O-methylribose adenine
  modified_base 12: mod_base = gm
  modified_base 13: mod_base = OTHER; note = 2-O-methylribose adenine
  modified_base 14: mod_base = OTHER; note = 2-fluororibose adenine
  modified_base 15: mod_base = cm
  modified_base 16: mod_base = OTHER; note = 2-fluororibose adenine
  modified_base 17: mod_base = cm
  modified_base 18: mod_base = OTHER; note = 2-fluororibose uracil
  modified_base 19: mod_base = gm
  modified_base 20: mod_base = OTHER; note = 2-fluororibose uracil
  modified_base 21: mod_base = um
  modified_base 21..22: mod_base = OTHER; note = S-phosphorothioate
  modified_base 22: mod_base = um
  modified_base 22..23: mod_base = OTHER; note = S-phosphorothioate
  modified_base 23: mod_base = um
  source 1..23: mol_type = other RNA
ttatagagcaagaacactgtttt

SEQ ID NO: 273 - RNA, 23 nt, synthetic construct
  misc_feature 1..23: note = Synthetic: WV-36986
  misc_feature 1..23: note = Synthetic: SSR-0102998
  modified_base 1: mod_base = um
  modified_base 1..2: mod_base = OTHER; note = R-phosphorothioate
  modified_base 2: mod_base = OTHER; note = 2-fluororibose uracil
  modified_base 2..3: mod_base = OTHER; note = R-phosphorothioate
  modified_base 3: mod_base = OTHER; note = 2-O-methylribose adenine
  modified_base 3..4: mod_base = OTHER; note = R-phosphorothioate
  modified_base 4: mod_base = OTHER; note = 2-fluororibose uracil
  modified_base 4..5: mod_base = OTHER; note = R-phosphorothioate
  modified_base 5: mod_base = OTHER; note = 2-O-methylribose adenine
  modified_base 5..6: mod_base = OTHER; note = R-phosphorothioate
  modified_base 6: mod_base = OTHER; note = 2-fluororibose guanine
  modified_base 6..7: mod_base = OTHER; note = S-phosphorothioate
  modified_base 7: mod_base = OTHER; note = 2-O-methylribose adenine
  modified_base 7..8: mod_base = OTHER; note = S-phosphorothioate
  modified_base 8: mod_base = OTHER; note = 2-fluororibose guanine
  modified_base 8..9: mod_base = OTHER; note = S-phosphorothioate
  modified_base 9: mod_base = cm
  modified_base 10: mod_base = OTHER; note = 2-fluororibose adenine
  modified_base 11: mod_base = OTHER; note = 2-O-methylribose adenine
  modified_base 12: mod_base = gm
  modified_base 13: mod_base = OTHER; note = 2-O-methylribose adenine
  modified_base 14: mod_base = OTHER; note = 2-fluororibose adenine
  modified_base 15: mod_base = cm
  modified_base 16: mod_base = OTHER; note = 2-fluororibose adenine
  modified_base 17: mod_base = cm
  modified_base 18: mod_base = OTHER; note = 2-fluororibose uracil
  modified_base 19: mod_base = gm
  modified_base 20: mod_base = OTHER; note = 2-fluororibose uracil
  modified_base 21: mod_base = um
  modified_base 21..22: mod_base = OTHER; note = S-phosphorothioate
  modified_base 22: mod_base = um
  modified_base 22..23: mod_base = OTHER; note = S-phosphorothioate
  modified_base 23: mod_base = um
  source 1..23: mol_type = other RNA
ttatagagcaagaacactgtttt

SEQ ID NO: 274 - RNA, 23 nt, synthetic construct
  misc_feature 1..23: note = Synthetic: WV-36987
  misc_feature 1..23: note = Synthetic: SSR-0102999
  modified_base 1: mod_base = um
  modified_base 1..2: mod_base = OTHER; note = R-phosphorothioate
  modified_base 2: mod_base = OTHER; note = 2-fluororibose uracil
  modified_base 2..3: mod_base = OTHER; note = R-phosphorothioate
  modified_base 3: mod_base = OTHER; note = 2-O-methylribose adenine
  modified_base 3..4: mod_base = OTHER; note = R-phosphorothioate
  modified_base 4: mod_base = OTHER; note = 2-fluororibose uracil
  modified_base 4..5: mod_base = OTHER; note = R-phosphorothioate
  modified_base 5: mod_base = OTHER; note = 2-O-methylribose adenine
  modified_base 5..6: mod_base = OTHER; note = S-phosphorothioate
  modified_base 6: mod_base = OTHER; note = 2-fluororibose guanine
  modified_base 6..7: mod_base = OTHER; note = R-phosphorothioate
  modified_base 7: mod_base = OTHER; note = 2-O-methylribose adenine
  modified_base 7..8: mod_base = OTHER; note = R-phosphorothioate
  modified_base 8: mod_base = OTHER; note = 2-fluororibose guanine
  modified_base 8..9: mod_base = OTHER; note = R-phosphorothioate
  modified_base 9: mod_base = cm
  modified_base 10: mod_base = OTHER; note = 2-fluororibose adenine
  modified_base 11: mod_base = OTHER; note = 2-O-methylribose adenine
  modified_base 12: mod_base = gm
  modified_base 13: mod_base = OTHER; note = 2-O-methylribose adenine
  modified_base 14: mod_base = OTHER; note = 2-fluororibose adenine
  modified_base 15: mod_base = cm
  modified_base 16: mod_base = OTHER; note = 2-fluororibose adenine
  modified_base 17: mod_base = cm
  modified_base 18: mod_base = OTHER; note = 2-fluororibose uracil
  modified_base 19: mod_base = gm
  modified_base 20: mod_base = OTHER; note = 2-fluororibose uracil
  modified_base 21: mod_base = um
  modified_base 21..22: mod_base = OTHER; note = S-phosphorothioate
  modified_base 22: mod_base = um
  modified_base 22..23: mod_base = OTHER; note = S-phosphorothioate
  modified_base 23: mod_base = um
  source 1..23: mol_type = other RNA
ttatagagcaagaacactgtttt

SEQ ID NO: 275 - RNA, 23 nt, synthetic construct
  misc_feature 1..23: note = Synthetic: WV-36988
  misc_feature 1..23: note = Synthetic: SSR-0103000
  modified_base 1: mod_base = um
  modified_base 1..2: mod_base = OTHER; note = R-phosphorothioate
  modified_base 2: mod_base = OTHER; note = 2-fluororibose uracil
  modified_base 2..3: mod_base = OTHER; note = R-phosphorothioate
  modified_base 3: mod_base = OTHER; note = 2-O-methylribose adenine
  modified_base 3..4: mod_base = OTHER; note = R-phosphorothioate
  modified_base 4: mod_base = OTHER; note = 2-fluororibose uracil
  modified_base 4..5: mod_base = OTHER; note = R-phosphorothioate
  modified_base 5: mod_base = OTHER; note = 2-O-methylribose adenine
  modified_base 5..6: mod_base = OTHER; note = S-phosphorothioate
  modified_base 6: mod_base = OTHER; note = 2-fluororibose guanine
  modified_base 6..7: mod_base = OTHER; note = R-phosphorothioate
  modified_base 7: mod_base = OTHER; note = 2-O-methylribose adenine
  modified_base 7..8: mod_base = OTHER; note = R-phosphorothioate
  modified_base 8: mod_base = OTHER; note = 2-fluororibose guanine
  modified_base 8..9: mod_base = OTHER; note = S-phosphorothioate
  modified_base 9: mod_base = cm
  modified_base 10: mod_base = OTHER; note = 2-fluororibose adenine
  modified_base 11: mod_base = OTHER; note = 2-O-methylribose adenine
  modified_base 12: mod_base = gm
  modified_base 13: mod_base = OTHER; note = 2-O-methylribose adenine
  modified_base 14: mod_base = OTHER; note = 2-fluororibose adenine
  modified_base 15: mod_base = cm
  modified_base 16: mod_base = OTHER; note = 2-fluororibose adenine
  modified_base 17: mod_base = cm
  modified_base 18: mod_base = OTHER; note = 2-fluororibose uracil
  modified_base 19: mod_base = gm
  modified_base 20: mod_base = OTHER; note = 2-fluororibose uracil
  modified_base 21: mod_base = um
  modified_base 21..22: mod_base = OTHER; note = S-phosphorothioate
  modified_base 22: mod_base = um
  modified_base 22..23: mod_base = OTHER; note = S-phosphorothioate
  modified_base 23: mod_base = um
  source 1..23: mol_type = other RNA
ttatagagcaagaacactgtttt

SEQ ID NO: 276 - RNA, 23 nt, synthetic construct
  misc_feature 1..23: note = Synthetic: WV-36989
  misc_feature 1..23: note = Synthetic: SSR-0103001
  modified_base 1: mod_base = um
  modified_base 1..2: mod_base = OTHER; note = R-phosphorothioate
  modified_base 2: mod_base = OTHER; note = 2-fluororibose uracil
  modified_base 2..3: mod_base = OTHER; note = R-phosphorothioate
  modified_base 3: mod_base = OTHER; note = 2-O-methylribose adenine
  modified_base 3..4: mod_base = OTHER; note = R-phosphorothioate
  modified_base 4: mod_base = OTHER; note = 2-fluororibose uracil
  modified_base 4..5: mod_base = OTHER; note = R-phosphorothioate
  modified_base 5: mod_base = OTHER; note = 2-O-methylribose adenine
  modified_base 5..6: mod_base = OTHER; note = S-phosphorothioate
  modified_base 6: mod_base = OTHER; note = 2-fluororibose guanine
  modified_base 6..7: mod_base = OTHER; note = R-phosphorothioate
  modified_base 7: mod_base = OTHER; note = 2-O-methylribose adenine
  modified_base 7..8: mod_base = OTHER; note = S-phosphorothioate
  modified_base 8: mod_base = OTHER; note = 2-fluororibose guanine
  modified_base 8..9: mod_base = OTHER; note = R-phosphorothioate
  modified_base 9: mod_base = cm
  modified_base 10: mod_base = OTHER; note = 2-fluororibose adenine
  modified_base 11: mod_base = OTHER; note = 2-O-methylribose adenine
  modified_base 12: mod_base = gm
  modified_base 13: mod_base = OTHER; note = 2-O-methylribose adenine
  modified_base 14: mod_base = OTHER; note = 2-fluororibose adenine
  modified_base 15: mod_base = cm
  modified_base 16: mod_base = OTHER; note = 2-fluororibose adenine
  modified_base 17: mod_base = cm
  modified_base 18: mod_base = OTHER; note = 2-fluororibose uracil
  modified_base 19: mod_base = gm
  modified_base 20: mod_base = OTHER; note = 2-fluororibose uracil
  modified_base 21: mod_base = um
  modified_base 21..22: mod_base = OTHER; note = S-phosphorothioate
  modified_base 22: mod_base = um
  modified_base 22..23: mod_base = OTHER; note = S-phosphorothioate
  modified_base 23: mod_base = um
  source 1..23: mol_type = other RNA
ttatagagcaagaacactgtttt

SEQ ID NO: 277 - RNA, 23 nt, synthetic construct
  misc_feature 1..23: note = Synthetic: WV-36990
  misc_feature 1..23: note = Synthetic: SSR-0103002
  modified_base 1: mod_base = um
  modified_base 1..2: mod_base = OTHER; note = R-phosphorothioate
  modified_base 2: mod_base = OTHER; note = 2-fluororibose uracil
  modified_base 2..3: mod_base = OTHER; note = R-phosphorothioate
  modified_base 3: mod_base = OTHER; note = 2-O-methylribose adenine
  modified_base 3..4: mod_base = OTHER; note = R-phosphorothioate
  modified_base 4: mod_base = OTHER; note = 2-fluororibose uracil
  modified_base 4..5: mod_base = OTHER; note = R-phosphorothioate
  modified_base 5: mod_base = OTHER; note = 2-O-methylribose adenine
  modified_base 5..6: mod_base = OTHER; note = S-phosphorothioate
  modified_base 6: mod_base = OTHER; note = 2-fluororibose guanine
  modified_base 6..7: mod_base = OTHER; note = R-phosphorothioate
  modified_base 7: mod_base = OTHER; note = 2-O-methylribose adenine
  modified_base 7..8: mod_base = OTHER; note = S-phosphorothioate
  modified_base 8: mod_base = OTHER; note = 2-fluororibose guanine
  modified_base 8..9: mod_base = OTHER; note = S-phosphorothioate
  modified_base 9: mod_base = cm
  modified_base 10: mod_base = OTHER; note = 2-fluororibose adenine
  modified_base 11: mod_base = OTHER; note = 2-O-methylribose adenine
  modified_base 12: mod_base = gm
  modified_base 13: mod_base = OTHER; note = 2-O-methylribose adenine
  modified_base 14: mod_base = OTHER; note = 2-fluororibose adenine
  modified_base 15: mod_base = cm
  modified_base 16: mod_base = OTHER; note = 2-fluororibose adenine
  modified_base 17: mod_base = cm
  modified_base 18: mod_base = OTHER; note = 2-fluororibose uracil
  modified_base 19: mod_base = gm
  modified_base 20: mod_base = OTHER; note = 2-fluororibose uracil
  modified_base 21: mod_base = um
  modified_base 21..22: mod_base = OTHER; note = S-phosphorothioate
  modified_base 22: mod_base = um
  modified_base 22..23: mod_base = OTHER; note = S-phosphorothioate
  modified_base 23: mod_base = um
  source 1..23: mol_type = other RNA
ttatagagcaagaacactgtttt

SEQ ID NO: 278 - RNA, 23 nt, synthetic construct
  misc_feature 1..23: note = Synthetic: WV-36991
  misc_feature 1..23: note = Synthetic: SSR-0103003
  modified_base 1: mod_base = um
  modified_base 1..2: mod_base = OTHER; note = R-phosphorothioate
  modified_base 2: mod_base = OTHER; note = 2-fluororibose uracil
  modified_base 2..3: mod_base = OTHER; note = R-phosphorothioate
  modified_base 3: mod_base = OTHER; note = 2-O-methylribose adenine
  modified_base 3..4: mod_base = OTHER; note = R-phosphorothioate
  modified_base 4: mod_base = OTHER; note = 2-fluororibose uracil
  modified_base 4..5: mod_base = OTHER; note = R-phosphorothioate
  modified_base 5: mod_base = OTHER; note = 2-O-methylribose adenine
  modified_base 5..6: mod_base = OTHER; note = S-phosphorothioate
  modified_base 6: mod_base = OTHER; note = 2-fluororibose guanine
  modified_base 6..7: mod_base = OTHER; note = S-phosphorothioate
  modified_base 7: mod_base = OTHER; note = 2-O-methylribose adenine
  modified_base 7..8: mod_base = OTHER; note = R-phosphorothioate
  modified_base 8: mod_base = OTHER; note = 2-fluororibose guanine
  modified_base 8..9: mod_base = OTHER; note = R-phosphorothioate
  modified_base 9: mod_base = cm
  modified_base 10: mod_base = OTHER; note = 2-fluororibose adenine
  modified_base 11: mod_base = OTHER; note = 2-O-methylribose adenine
  modified_base 12: mod_base = gm
  modified_base 13: mod_base = OTHER; note = 2-O-methylribose adenine
  modified_base 14: mod_base = OTHER; note = 2-fluororibose adenine
  modified_base 15: mod_base = cm
  modified_base 16: mod_base = OTHER; note = 2-fluororibose adenine
  modified_base 17: mod_base = cm
  modified_base 18: mod_base = OTHER; note = 2-fluororibose uracil
  modified_base 19: mod_base = gm
  modified_base 20: mod_base = OTHER; note = 2-fluororibose uracil
  modified_base 21: mod_base = um
  modified_base 21..22: mod_base = OTHER; note = S-phosphorothioate
  modified_base 22: mod_base = um
  modified_base 22..23: mod_base = OTHER; note = S-phosphorothioate
  modified_base 23: mod_base = um
  source 1..23: mol_type = other RNA
ttatagagcaagaacactgtttt

SEQ ID NO: 279 - RNA, 23 nt, synthetic construct
  misc_feature 1..23: note = Synthetic: WV-36992
  misc_feature 1..23: note = Synthetic: SSR-0103004
  modified_base 1: mod_base = um
  modified_base 1..2: mod_base = OTHER; note = R-phosphorothioate
  modified_base 2: mod_base = OTHER; note = 2-fluororibose uracil
  modified_base 2..3: mod_base = OTHER; note = R-phosphorothioate
  modified_base 3: mod_base = OTHER; note = 2-O-methylribose adenine
  modified_base 3..4: mod_base = OTHER; note = R-phosphorothioate
  modified_base 4: mod_base = OTHER; note = 2-fluororibose uracil
  modified_base 4..5: mod_base = OTHER; note = R-phosphorothioate
  modified_base 5: mod_base = OTHER; note = 2-O-methylribose adenine
  modified_base 5..6: mod_base = OTHER; note = S-phosphorothioate
  modified_base 6: mod_base = OTHER; note = 2-fluororibose guanine
  modified_base 6..7: mod_base = OTHER; note = S-phosphorothioate
  modified_base 7: mod_base = OTHER; note = 2-O-methylribose adenine
  modified_base 7..8: mod_base = OTHER; note = R-phosphorothioate
  modified_base 8: mod_base = OTHER; note = 2-fluororibose guanine
  modified_base 8..9: mod_base = OTHER; note = S-phosphorothioate
  modified_base 9: mod_base = cm
  modified_base 10: mod_base = OTHER; note = 2-fluororibose adenine
  modified_base 11: mod_base = OTHER; note = 2-O-methylribose adenine
  modified_base 12: mod_base = gm
  modified_base 13: mod_base = OTHER; note = 2-O-methylribose adenine
  modified_base 14: mod_base = OTHER; note = 2-fluororibose adenine
  modified_base 15: mod_base = cm
  modified_base 16: mod_base = OTHER; note = 2-fluororibose adenine
  modified_base 17: mod_base = cm
  modified_base 18: mod_base = OTHER; note = 2-fluororibose uracil
  modified_base 19: mod_base = gm
  modified_base 20: mod_base = OTHER; note = 2-fluororibose uracil
  modified_base 21: mod_base = um
  modified_base 21..22: mod_base = OTHER; note = S-phosphorothioate
  modified_base 22: mod_base = um
  modified_base 22..23: mod_base = OTHER; note = S-phosphorothioate
  modified_base 23: mod_base = um
  source 1..23: mol_type = other RNA
ttatagagcaagaacactgtttt

SEQ ID NO: 280 - RNA, 23 nt, synthetic construct
  misc_feature 1..23: note = Synthetic: WV-36993
  misc_feature 1..23: note = Synthetic: SSR-0103005
  modified_base 1: mod_base = um
  modified_base 1..2: mod_base = OTHER; note = R-phosphorothioate
  modified_base 2: mod_base = OTHER; note = 2-fluororibose uracil
  modified_base 2..3: mod_base = OTHER; note = R-phosphorothioate
  modified_base 3: mod_base = OTHER; note = 2-O-methylribose adenine
  modified_base 3..4: mod_base = OTHER; note = R-phosphorothioate
  modified_base 4: mod_base = OTHER; note = 2-fluororibose uracil
  modified_base 4..5: mod_base = OTHER; note = R-phosphorothioate
  modified_base 5: mod_base = OTHER; note = 2-O-methylribose adenine
  modified_base 5..6: mod_base = OTHER; note = S-phosphorothioate
  modified_base 6: mod_base = OTHER; note = 2-fluororibose guanine
  modified_base 6..7: mod_base = OTHER; note = S-phosphorothioate
  modified_base 7: mod_base = OTHER; note = 2-O-methylribose adenine
  modified_base 7..8: mod_base = OTHER; note = S-phosphorothioate
  modified_base 8: mod_base = OTHER; note = 2-fluororibose guanine
  modified_base 8..9: mod_base = OTHER; note = R-phosphorothioate
  modified_base 9: mod_base = cm
  modified_base 10: mod_base = OTHER; note = 2-fluororibose adenine
  modified_base 11: mod_base = OTHER; note = 2-O-methylribose adenine
  modified_base 12: mod_base = gm
  modified_base 13: mod_base = OTHER; note = 2-O-methylribose adenine
  modified_base 14: mod_base = OTHER; note = 2-fluororibose adenine
  modified_base 15: mod_base = cm
  modified_base 16: mod_base = OTHER; note = 2-fluororibose adenine
  modified_base 17: mod_base = cm
  modified_base 18: mod_base = OTHER; note = 2-fluororibose uracil
  modified_base 19: mod_base = gm
  modified_base 20: mod_base = OTHER; note = 2-fluororibose uracil
  modified_base 21: mod_base = um
  modified_base 21..22: mod_base = OTHER; note = S-phosphorothioate
  modified_base 22: mod_base = um
  modified_base 22..23: mod_base = OTHER; note = S-phosphorothioate
  modified_base 23: mod_base = um
  source 1..23: mol_type = other RNA
ttatagagcaagaacactgtttt

SEQ ID NO: 281 - RNA, 23 nt, synthetic construct
  misc_feature 1..23: note = Synthetic: WV-36994
  misc_feature 1..23: note = Synthetic: SSR-0103006
  modified_base 1: mod_base = um
  modified_base 1..2: mod_base = OTHER; note = R-phosphorothioate
  modified_base 2: mod_base = OTHER; note = 2-fluororibose uracil
  modified_base 2..3: mod_base = OTHER; note = R-phosphorothioate
  modified_base 3: mod_base = OTHER; note = 2-O-methylribose adenine
  modified_base 3..4: mod_base = OTHER; note = R-phosphorothioate
  modified_base 4: mod_base = OTHER; note = 2-fluororibose uracil
  modified_base 4..5: mod_base = OTHER; note = R-phosphorothioate
  modified_base 5: mod_base = OTHER; note = 2-O-methylribose adenine
  modified_base 5..6: mod_base = OTHER; note = S-phosphorothioate
  modified_base 6: mod_base = OTHER; note = 2-fluororibose guanine
  modified_base 6..7: mod_base = OTHER; note = S-phosphorothioate
  modified_base 7: mod_base = OTHER; note = 2-O-methylribose adenine
  modified_base 7..8: mod_base = OTHER; note = S-phosphorothioate
  modified_base 8: mod_base = OTHER; note = 2-fluororibose guanine
  modified_base 8..9: mod_base = OTHER; note = S-phosphorothioate
  modified_base 9: mod_base = cm
  modified_base 10: mod_base = OTHER; note = 2-fluororibose adenine
  modified_base 11: mod_base = OTHER; note = 2-O-methylribose adenine
  modified_base 12: mod_base = gm
  modified_base 13: mod_base = OTHER; note = 2-O-methylribose adenine
  modified_base 14: mod_base = OTHER; note = 2-fluororibose adenine
  modified_base 15: mod_base = cm
  modified_base 16: mod_base = OTHER; note = 2-fluororibose adenine
  modified_base 17: mod_base = cm
  modified_base 18: mod_base = OTHER; note = 2-fluororibose uracil
  modified_base 19: mod_base = gm
  modified_base 20: mod_base = OTHER; note = 2-fluororibose uracil
  modified_base 21: mod_base = um
  modified_base 21..22: mod_base = OTHER; note = S-phosphorothioate
  modified_base 22: mod_base = um
  modified_base 22..23: mod_base = OTHER; note = S-phosphorothioate
  modified_base 23: mod_base = um
  source 1..23: mol_type = other RNA
ttatagagcaagaacactgtttt

SEQ ID NO: 282 - RNA, 23 nt, synthetic construct
  misc_feature 1..23: note = Synthetic: WV-36995
  misc_feature 1..23: note = Synthetic: SSR-0103007
  modified_base 1: mod_base = um
  modified_base 1..2: mod_base = OTHER; note = R-phosphorothioate
  modified_base 2: mod_base = OTHER; note = 2-fluororibose uracil
  modified_base 2..3: mod_base = OTHER; note = R-phosphorothioate
  modified_base 3: mod_base = OTHER; note = 2-O-methylribose adenine
  modified_base 3..4: mod_base = OTHER; note = R-phosphorothioate
  modified_base 4: mod_base = OTHER; note = 2-fluororibose uracil
  modified_base 4..5: mod_base = OTHER; note = S-phosphorothioate
  modified_base 5: mod_base = OTHER; note = 2-O-methylribose adenine
  modified_base 5..6: mod_base = OTHER; note = R-phosphorothioate
  modified_base 6: mod_base = OTHER; note = 2-fluororibose guanine
  modified_base 6..7: mod_base = OTHER; note = R-phosphorothioate
  modified_base 7: mod_base = OTHER; note = 2-O-methylribose adenine
  modified_base 7..8: mod_base = OTHER; note = R-phosphorothioate
  modified_base 8: mod_base = OTHER; note = 2-fluororibose guanine
  modified_base 8..9: mod_base = OTHER; note = R-phosphorothioate
  modified_base 9: mod_base = cm
  modified_base 10: mod_base = OTHER; note = 2-fluororibose adenine
  modified_base 11: mod_base = OTHER; note = 2-O-methylribose adenine
  modified_base 12: mod_base = gm
  modified_base 13: mod_base = OTHER; note = 2-O-methylribose adenine
  modified_base 14: mod_base = OTHER; note = 2-fluororibose adenine
  modified_base 15: mod_base = cm
  modified_base 16: mod_base = OTHER; note = 2-fluororibose adenine
  modified_base 17: mod_base = cm
  modified_base 18: mod_base = OTHER; note = 2-fluororibose uracil
  modified_base 19: mod_base = gm
  modified_base 20: mod_base = OTHER; note = 2-fluororibose uracil
  modified_base 21: mod_base = um
  modified_base 21..22: mod_base = OTHER; note = S-phosphorothioate
  modified_base 22: mod_base = um
  modified_base 22..23: mod_base = OTHER; note = S-phosphorothioate
  modified_base 23: mod_base = um
  source 1..23: mol_type = other RNA
ttatagagcaagaacactgtttt

SEQ ID NO: 283 - RNA, 23 nt, synthetic construct
  misc_feature 1..23: note = Synthetic: WV-36996
  misc_feature 1..23: note = Synthetic: SSR-0103008
  modified_base 1: mod_base = um
  modified_base 1..2: mod_base = OTHER; note = R-phosphorothioate
  modified_base 2: mod_base = OTHER; note = 2-fluororibose uracil
  modified_base 2..3: mod_base = OTHER; note = R-phosphorothioate
  modified_base 3: mod_base = OTHER; note = 2-O-methylribose adenine
  modified_base 3..4: mod_base = OTHER; note = R-phosphorothioate
  modified_base 4: mod_base = OTHER; note = 2-fluororibose uracil
  modified_base 4..5: mod_base = OTHER; note = S-phosphorothioate
  modified_base 5: mod_base = OTHER; note = 2-O-methylribose adenine
  modified_base 5..6: mod_base = OTHER; note = R-phosphorothioate
  modified_base 6: mod_base = OTHER; note = 2-fluororibose guanine
  modified_base 6..7: mod_base = OTHER; note = R-phosphorothioate
  modified_base 7: mod_base = OTHER; note = 2-O-methylribose adenine
  modified_base 7..8: mod_base = OTHER; note = R-phosphorothioate
  modified_base 8: mod_base = OTHER; note = 2-fluororibose guanine
  modified_base 8..9: mod_base = OTHER; note = S-phosphorothioate
  modified_base 9: mod_base = cm
  modified_base 10: mod_base = OTHER; note = 2-fluororibose adenine
  modified_base 11: mod_base = OTHER; note = 2-O-methylribose adenine
  modified_base 12: mod_base = gm
  modified_base 13: mod_base = OTHER; note = 2-O-methylribose adenine
  modified_base 14: mod_base = OTHER; note = 2-fluororibose adenine
  modified_base 15: mod_base = cm
  modified_base 16: mod_base = OTHER; note = 2-fluororibose adenine
  modified_base 17: mod_base = cm
  modified_base 18: mod_base = OTHER; note = 2-fluororibose uracil
  modified_base 19: mod_base = gm
  modified_base 20: mod_base = OTHER; note = 2-fluororibose uracil
  modified_base 21: mod_base = um
  modified_base 21..22: mod_base = OTHER; note = S-phosphorothioate
  modified_base 22: mod_base = um
  modified_base 22..23: mod_base = OTHER; note = S-phosphorothioate
  modified_base 23: mod_base = um
  source 1..23: mol_type = other RNA
ttatagagcaagaacactgtttt

SEQ ID NO: 284 - RNA, 23 nt, synthetic construct
  misc_feature 1..23: note = Synthetic: WV-36997
  misc_feature 1..23: note = Synthetic: SSR-0103009
  modified_base 1: mod_base = um
  modified_base 1..2: mod_base = OTHER; note = R-phosphorothioate
  modified_base 2: mod_base = OTHER; note = 2-fluororibose uracil
  modified_base 2..3: mod_base = OTHER; note = R-phosphorothioate
  modified_base 3: mod_base = OTHER; note = 2-O-methylribose adenine
  modified_base 3..4: mod_base = OTHER; note = R-phosphorothioate
  modified_base 4: mod_base = OTHER; note = 2-fluororibose uracil
  modified_base 4..5: mod_base = OTHER; note = S-phosphorothioate
  modified_base 5: mod_base = OTHER; note = 2-O-methylribose adenine
  modified_base 5..6: mod_base = OTHER; note = R-phosphorothioate
  modified_base 6: mod_base = OTHER; note = 2-fluororibose guanine
  modified_base 6..7: mod_base = OTHER; note = R-phosphorothioate
  modified_base 7: mod_base = OTHER; note = 2-O-methylribose adenine
  modified_base 7..8: mod_base = OTHER; note = S-phosphorothioate
  modified_base 8: mod_base = OTHER; note = 2-fluororibose guanine
  modified_base 8..9: mod_base = OTHER; note = R-phosphorothioate
  modified_base 9: mod_base = cm
  modified_base 10: mod_base = OTHER; note = 2-fluororibose adenine
  modified_base 11: mod_base = OTHER; note = 2-O-methylribose adenine
  modified_base 12: mod_base = gm
  modified_base 13: mod_base = OTHER; note = 2-O-methylribose adenine
  modified_base 14: mod_base = OTHER; note = 2-fluororibose adenine
  modified_base 15: mod_base = cm
  modified_base 16: mod_base = OTHER; note = 2-fluororibose adenine
  modified_base 17: mod_base = cm
  modified_base 18: mod_base = OTHER; note = 2-fluororibose uracil
  modified_base 19: mod_base = gm
  modified_base 20: mod_base = OTHER; note = 2-fluororibose uracil
  modified_base 21: mod_base = um
  modified_base 21..22: mod_base = OTHER; note = S-phosphorothioate
  modified_base 22: mod_base = um
  modified_base 22..23: mod_base = OTHER; note = S-phosphorothioate
  modified_base 23: mod_base = um
  source 1..23: mol_type = other RNA
ttatagagcaagaacactgtttt

SEQ ID NO: 285 - RNA, 23 nt, synthetic construct
  misc_feature 1..23: note = Synthetic: WV-36998
  misc_feature 1..23: note = Synthetic: SSR-0103010
  modified_base 1: mod_base = um
  modified_base 1..2: mod_base = OTHER; note = R-phosphorothioate
  modified_base 2: mod_base = OTHER; note = 2-fluororibose uracil
  modified_base 2..3: mod_base = OTHER; note = R-phosphorothioate
  modified_base 3: mod_base = OTHER; note = 2-O-methylribose adenine
  modified_base 3..4: mod_base = OTHER; note = R-phosphorothioate
  modified_base 4: mod_base = OTHER; note = 2-fluororibose uracil
  modified_base 4..5: mod_base = OTHER; note = S-phosphorothioate
  modified_base 5: mod_base = OTHER; note = 2-O-methylribose adenine
  modified_base 5..6: mod_base = OTHER; note = R-phosphorothioate
  modified_base 6: mod_base = OTHER; note = 2-fluororibose guanine
  modified_base 6..7: mod_base = OTHER; note = R-phosphorothioate
  modified_base 7: mod_base = OTHER; note = 2-O-methylribose adenine
  modified_base 7..8: mod_base = OTHER; note = S-phosphorothioate
  modified_base 8: mod_base = OTHER; note = 2-fluororibose guanine
  modified_base 8..9: mod_base = OTHER; note = S-phosphorothioate
  modified_base 9: mod_base = cm
  modified_base 10: mod_base = OTHER; note = 2-fluororibose adenine
  modified_base 11: mod_base = OTHER; note = 2-O-methylribose adenine
  modified_base 12: mod_base = gm
  modified_base 13: mod_base = OTHER; note = 2-O-methylribose adenine
  modified_base 14: mod_base = OTHER; note = 2-fluororibose adenine
  modified_base 15: mod_base = cm
  modified_base 16: mod_base = OTHER; note = 2-fluororibose adenine
  modified_base 17: mod_base = cm
  modified_base 18: mod_base = OTHER; note = 2-fluororibose uracil
  modified_base 19: mod_base = gm
  modified_base 20: mod_base = OTHER; note = 2-fluororibose uracil
  modified_base 21: mod_base = um
  modified_base 21..22: mod_base = OTHER; note = S-phosphorothioate
  modified_base 22: mod_base = um
  modified_base 22..23: mod_base = OTHER; note = S-phosphorothioate
  modified_base 23: mod_base = um
  source 1..23: mol_type = other RNA
ttatagagcaagaacactgtttt

SEQ ID NO: 286 - RNA, 23 nt, synthetic construct
  misc_feature 1..23: note = Synthetic: WV-36999
  misc_feature 1..23: note = Synthetic: SSR-0103011
  modified_base 1: mod_base = um
  modified_base 1..2: mod_base = OTHER; note = R-phosphorothioate
  modified_base 2: mod_base = OTHER; note = 2-fluororibose uracil
  modified_base 2..3: mod_base = OTHER; note = R-phosphorothioate
  modified_base 3: mod_base = OTHER; note = 2-O-methylribose adenine
  modified_base 3..4: mod_base = OTHER; note = R-phosphorothioate
  modified_base 4: mod_base = OTHER; note = 2-fluororibose uracil
  modified_base 4..5: mod_base = OTHER; note = S-phosphorothioate
  modified_base 5: mod_base = OTHER; note = 2-O-methylribose adenine
  modified_base 5..6: mod_base = OTHER; note = R-phosphorothioate
  modified_base 6: mod_base = OTHER; note = 2-fluororibose guanine
  modified_base 6..7: mod_base = OTHER; note = S-phosphorothioate
  modified_base 7: mod_base = OTHER; note = 2-O-methylribose adenine
  modified_base 7..8: mod_base = OTHER; note = R-phosphorothioate
  modified_base 8: mod_base = OTHER; note = 2-fluororibose guanine
  modified_base 8..9: mod_base = OTHER; note = R-phosphorothioate
  modified_base 9: mod_base = cm
  modified_base 10: mod_base = OTHER; note = 2-fluororibose adenine
  modified_base 11: mod_base = OTHER; note = 2-O-methylribose adenine
  modified_base 12: mod_base = gm
  modified_base 13: mod_base = OTHER; note = 2-O-methylribose adenine
  modified_base 14: mod_base = OTHER; note = 2-fluororibose adenine
  modified_base 15: mod_base = cm
  modified_base 16: mod_base = OTHER; note = 2-fluororibose adenine
  modified_base 17: mod_base = cm
  modified_base 18: mod_base = OTHER; note = 2-fluororibose uracil
  modified_base 19: mod_base = gm
  modified_base 20: mod_base = OTHER; note = 2-fluororibose uracil
  modified_base 21: mod_base = um
  modified_base 21..22: mod_base = OTHER; note = S-phosphorothioate
  modified_base 22: mod_base = um
  modified_base 22..23: mod_base = OTHER; note = S-phosphorothioate
  modified_base 23: mod_base = um
  source 1..23: mol_type = other RNA
ttatagagcaagaacactgtttt

SEQ ID NO: 287 - RNA, 23 nt, synthetic construct
  misc_feature 1..23: note = Synthetic: WV-37000
  misc_feature 1..23: note = Synthetic: SSR-0103012
  modified_base 1: mod_base = um
  modified_base 1..2: mod_base = OTHER; note = R-phosphorothioate
  modified_base 2: mod_base = OTHER; note = 2-fluororibose uracil
  modified_base 2..3: mod_base = OTHER; note = R-phosphorothioate
  modified_base 3: mod_base = OTHER; note = 2-O-methylribose adenine
  modified_base 3..4: mod_base = OTHER; note = R-phosphorothioate
  modified_base 4: mod_base = OTHER; note = 2-fluororibose uracil
  modified_base 4..5: mod_base = OTHER; note = S-phosphorothioate
  modified_base 5: mod_base = OTHER; note = 2-O-methylribose adenine
  modified_base 5..6: mod_base = OTHER; note = R-phosphorothioate
  modified_base 6: mod_base = OTHER; note = 2-fluororibose guanine
  modified_base 6..7: mod_base = OTHER; note = S-phosphorothioate
  modified_base 7: mod_base = OTHER; note = 2-O-methylribose adenine
  modified_base 7..8: mod_base = OTHER; note = R-phosphorothioate
  modified_base 8: mod_base = OTHER; note = 2-fluororibose guanine
  modified_base 8..9: mod_base = OTHER; note = S-phosphorothioate
  modified_base 9: mod_base = cm
  modified_base 10: mod_base = OTHER; note = 2-fluororibose adenine
  modified_base 11: mod_base = OTHER; note = 2-O-methylribose adenine
  modified_base 12: mod_base = gm
  modified_base 13: mod_base = OTHER; note = 2-O-methylribose adenine
  modified_base 14: mod_base = OTHER; note = 2-fluororibose adenine
  modified_base 15: mod_base = cm
  modified_base 16: mod_base = OTHER; note = 2-fluororibose adenine
  modified_base 17: mod_base = cm
  modified_base 18: mod_base = OTHER; note = 2-fluororibose uracil
  modified_base 19: mod_base = gm
  modified_base 20: mod_base = OTHER; note = 2-fluororibose uracil
  modified_base 21: mod_base = um
  modified_base 21..22: mod_base = OTHER; note = S-phosphorothioate
  modified_base 22: mod_base = um
  modified_base 22..23: mod_base = OTHER; note = S-phosphorothioate
  modified_base 23: mod_base = um
  source 1..23: mol_type = other RNA
ttatagagcaagaacactgtttt

SEQ ID NO: 288 - RNA, 23 nt, synthetic construct
  misc_feature 1..23: note = Synthetic: WV-37001
  misc_feature 1..23: note = Synthetic: SSR-0103013
  modified_base 1: mod_base = um
  modified_base 1..2: mod_base = OTHER; note = R-phosphorothioate
  modified_base 2: mod_base = OTHER; note = 2-fluororibose uracil
  modified_base 2..3: mod_base = OTHER; note = R-phosphorothioate
  modified_base 3: mod_base = OTHER; note = 2-O-methylribose adenine
  modified_base 3..4: mod_base = OTHER; note = R-phosphorothioate
  modified_base 4: mod_base = OTHER; note = 2-fluororibose uracil
  modified_base 4..5: mod_base = OTHER; note = S-phosphorothioate
  modified_base 5: mod_base = OTHER; note = 2-O-methylribose adenine
  modified_base 5..6: mod_base = OTHER; note = R-phosphorothioate
  modified_base 6: mod_base = OTHER; note = 2-fluororibose guanine
  modified_base 6..7: mod_base = OTHER; note = S-phosphorothioate
  modified_base 7: mod_base = OTHER; note = 2-O-methylribose adenine
  modified_base 7..8: mod_base = OTHER; note = S-phosphorothioate
  modified_base 8: mod_base = OTHER; note = 2-fluororibose guanine
  modified_base 8..9: mod_base = OTHER; note = R-phosphorothioate
  modified_base 9: mod_base = cm
  modified_base 10: mod_base = OTHER; note = 2-fluororibose adenine
  modified_base 11: mod_base = OTHER; note = 2-O-methylribose adenine
  modified_base 12: mod_base = gm
  modified_base 13: mod_base = OTHER; note = 2-O-methylribose adenine
  modified_base 14: mod_base = OTHER; note = 2-fluororibose adenine
  modified_base 15: mod_base = cm
  modified_base 16: mod_base = OTHER; note = 2-fluororibose adenine
  modified_base 17: mod_base = cm
  modified_base 18: mod_base = OTHER; note = 2-fluororibose uracil
  modified_base 19: mod_base = gm
  modified_base 20: mod_base = OTHER; note = 2-fluororibose uracil
  modified_base 21: mod_base = um
  modified_base 21..22: mod_base = OTHER; note = S-phosphorothioate
  modified_base 22: mod_base = um
  modified_base 22..23: mod_base = OTHER; note = S-phosphorothioate
  modified_base 23: mod_base = um
  source 1..23: mol_type = other RNA
ttatagagcaagaacactgtttt

SEQ ID NO: 289 - RNA, 23 nt, synthetic construct
  misc_feature 1..23: note = Synthetic: WV-37002
  misc_feature 1..23: note = Synthetic: SSR-0103014
  modified_base 1: mod_base = um
  modified_base 1..2: mod_base = OTHER; note = R-phosphorothioate
  modified_base 2: mod_base = OTHER; note = 2-fluororibose uracil
  modified_base 2..3: mod_base = OTHER; note = R-phosphorothioate
  modified_base 3: mod_base = OTHER; note = 2-O-methylribose adenine
  modified_base 3..4: mod_base = OTHER; note = R-phosphorothioate
  modified_base 4: mod_base = OTHER; note = 2-fluororibose uracil
  modified_base 4..5: mod_base = OTHER; note = S-phosphorothioate
  modified_base 5: mod_base = OTHER; note = 2-O-methylribose adenine
  modified_base 5..6: mod_base = OTHER; note = R-phosphorothioate
  modified_base 6: mod_base = OTHER; note = 2-fluororibose guanine
  modified_base 6..7: mod_base = OTHER; note = S-phosphorothioate
  modified_base 7: mod_base = OTHER; note = 2-O-methylribose adenine
  modified_base 7..8: mod_base = OTHER; note = S-phosphorothioate
  modified_base 8: mod_base = OTHER; note = 2-fluororibose guanine
  modified_base 8..9: mod_base = OTHER; note = S-phosphorothioate
  modified_base 9: mod_base = cm
  modified_base 10: mod_base = OTHER; note = 2-fluororibose adenine
  modified_base 11: mod_base = OTHER; note = 2-O-methylribose adenine
  modified_base 12: mod_base = gm
  modified_base 13: mod_base = OTHER; note = 2-O-methylribose adenine
  modified_base 14: mod_base = OTHER; note = 2-fluororibose adenine
  modified_base 15: mod_base = cm
  modified_base 16: mod_base = OTHER; note = 2-fluororibose adenine
  modified_base 17: mod_base = cm
  modified_base 18: mod_base = OTHER; note = 2-fluororibose uracil
  modified_base 19: mod_base = gm
  modified_base 20: mod_base = OTHER; note = 2-fluororibose uracil
  modified_base 21: mod_base = um
  modified_base 21..22: mod_base = OTHER; note = S-phosphorothioate
  modified_base 22: mod_base = um
  modified_base 22..23: mod_base = OTHER; note = S-phosphorothioate
  modified_base 23: mod_base = um
  source 1..23: mol_type = other RNA
ttatagagcaagaacactgtttt

SEQ ID NO: 290 - RNA, 23 nt, synthetic construct
  misc_feature 1..23: note = Synthetic: WV-37003
  misc_feature 1..23: note = Synthetic: SSR-0103015
  modified_base 1: mod_base = um
  modified_base 1..2: mod_base = OTHER; note = R-phosphorothioate
  modified_base 2: mod_base = OTHER; note = 2-fluororibose uracil
  modified_base 2..3: mod_base = OTHER; note = R-phosphorothioate
  modified_base 3: mod_base = OTHER; note = 2-O-methylribose adenine
  modified_base 3..4: mod_base = OTHER; note = R-phosphorothioate
  modified_base 4: mod_base = OTHER; note = 2-fluororibose uracil
  modified_base 4..5: mod_base = OTHER; note = S-phosphorothioate
  modified_base 5: mod_base = OTHER; note = 2-O-methylribose adenine
  modified_base 5..6: mod_base = OTHER; note = S-phosphorothioate
  modified_base 6: mod_base = OTHER; note = 2-fluororibose guanine
  modified_base 6..7: mod_base = OTHER; note = R-phosphorothioate
  modified_base 7: mod_base = OTHER; note = 2-O-methylribose adenine
  modified_base 7..8: mod_base = OTHER; note = R-phosphorothioate
  modified_base 8: mod_base = OTHER; note = 2-fluororibose guanine
  modified_base 8..9: mod_base = OTHER; note = R-phosphorothioate
  modified_base 9: mod_base = cm
  modified_base 10: mod_base = OTHER; note = 2-fluororibose adenine
  modified_base 11: mod_base = OTHER; note = 2-O-methylribose adenine
  modified_base 12: mod_base = gm
  modified_base 13: mod_base = OTHER; note = 2-O-methylribose adenine
  modified_base 14: mod_base = OTHER; note = 2-fluororibose adenine
  modified_base 15: mod_base = cm
  modified_base 16: mod_base = OTHER; note = 2-fluororibose adenine
  modified_base 17: mod_base = cm
  modified_base 18: mod_base = OTHER; note = 2-fluororibose uracil
  modified_base 19: mod_base = gm
  modified_base 20: mod_base = OTHER; note = 2-fluororibose uracil
  modified_base 21: mod_base = um
  modified_base 21..22: mod_base = OTHER; note = S-phosphorothioate
  modified_base 22: mod_base = um
  modified_base 22..23: mod_base = OTHER; note = S-phosphorothioate
  modified_base 23: mod_base = um
  source 1..23: mol_type = other RNA
ttatagagcaagaacactgtttt

SEQ ID NO: 291 - RNA, 23 nt, synthetic construct
  misc_feature 1..23: note = Synthetic: WV-37004
  misc_feature 1..23: note = Synthetic: SSR-0103016
  modified_base 1: mod_base = um
  modified_base 1..2: mod_base = OTHER; note = R-phosphorothioate
  modified_base 2: mod_base = OTHER; note = 2-fluororibose uracil
  modified_base 2..3: mod_base = OTHER; note = R-phosphorothioate
  modified_base 3: mod_base = OTHER; note = 2-O-methylribose adenine
  modified_base 3..4: mod_base = OTHER; note = R-phosphorothioate
  modified_base 4: mod_base = OTHER; note = 2-fluororibose uracil
  modified_base 4..5: mod_base = OTHER; note = S-phosphorothioate
  modified_base 5: mod_base = OTHER; note = 2-O-methylribose adenine
  modified_base 5..6: mod_base = OTHER; note = S-phosphorothioate
  modified_base 6: mod_base = OTHER; note = 2-fluororibose guanine
  modified_base 6..7: mod_base = OTHER; note = R-phosphorothioate
  modified_base 7: mod_base = OTHER; note = 2-O-methylribose adenine
  modified_base 7..8: mod_base = OTHER; note = R-phosphorothioate
  modified_base 8: mod_base = OTHER; note = 2-fluororibose guanine
  modified_base 8..9: mod_base = OTHER; note = S-phosphorothioate
  modified_base 9: mod_base = cm
  modified_base 10: mod_base = OTHER; note = 2-fluororibose adenine
  modified_base 11: mod_base = OTHER; note = 2-O-methylribose adenine
  modified_base 12: mod_base = gm
  modified_base 13: mod_base = OTHER; note = 2-O-methylribose adenine
  modified_base 14: mod_base = OTHER; note = 2-fluororibose adenine
  modified_base 15: mod_base = cm
  modified_base 16: mod_base = OTHER; note = 2-fluororibose adenine
  modified_base 17: mod_base = cm
  modified_base 18: mod_base = OTHER; note = 2-fluororibose uracil
  modified_base 19: mod_base = gm
  modified_base 20: mod_base = OTHER; note = 2-fluororibose uracil
  modified_base 21: mod_base = um
  modified_base 21..22: mod_base = OTHER; note = S-phosphorothioate
  modified_base 22: mod_base = um
  modified_base 22..23: mod_base = OTHER; note = S-phosphorothioate
  modified_base 23: mod_base = um
  source 1..23: mol_type = other RNA
ttatagagcaagaacactgtttt

SEQ ID NO: 292 - RNA, 23 nt, synthetic construct
  misc_feature 1..23: note = Synthetic: WV-37005
  misc_feature 1..23: note = Synthetic: SSR-0103017
  modified_base 1: mod_base = um
  modified_base 1..2: mod_base = OTHER; note = R-phosphorothioate
  modified_base 2: mod_base = OTHER; note = 2-fluororibose uracil
  modified_base 2..3: mod_base = OTHER; note = R-phosphorothioate
  modified_base 3: mod_base = OTHER; note = 2-O-methylribose adenine
  modified_base 3..4: mod_base = OTHER; note = R-phosphorothioate
  modified_base 4: mod_base = OTHER; note = 2-fluororibose uracil
  modified_base 4..5: mod_base = OTHER; note = S-phosphorothioate
  modified_base 5: mod_base = OTHER; note = 2-O-methylribose adenine
  modified_base 5..6: mod_base = OTHER; note = S-phosphorothioate
  modified_base 6: mod_base = OTHER; note = 2-fluororibose guanine
  modified_base 6..7: mod_base = OTHER; note = R-phosphorothioate
  modified_base 7: mod_base = OTHER; note = 2-O-methylribose adenine
  modified_base 7..8: mod_base = OTHER; note = S-phosphorothioate
  modified_base 8: mod_base = OTHER; note = 2-fluororibose guanine
  modified_base 8..9: mod_base = OTHER; note = R-phosphorothioate
  modified_base 9: mod_base = cm
  modified_base 10: mod_base = OTHER; note = 2-fluororibose adenine
  modified_base 11: mod_base = OTHER; note = 2-O-methylribose adenine
  modified_base 12: mod_base = gm
  modified_base 13: mod_base = OTHER; note = 2-O-methylribose adenine
  modified_base 14: mod_base = OTHER; note = 2-fluororibose adenine
  modified_base 15: mod_base = cm
  modified_base 16: mod_base = OTHER; note = 2-fluororibose adenine
  modified_base 17: mod_base = cm
  modified_base 18: mod_base = OTHER; note = 2-fluororibose uracil
  modified_base 19: mod_base = gm
  modified_base 20: mod_base = OTHER; note = 2-fluororibose uracil
  modified_base 21: mod_base = um
  modified_base 21..22: mod_base = OTHER; note = S-phosphorothioate
  modified_base 22: mod_base = um
  modified_base 22..23: mod_base = OTHER; note = S-phosphorothioate
  modified_base 23: mod_base = um
  source 1..23: mol_type = other RNA
ttatagagcaagaacactgtttt

SEQ ID NO: 293 - RNA, 23 nt, synthetic construct
  misc_feature 1..23: note = Synthetic: WV-37006
  misc_feature 1..23: note = Synthetic: SSR-0103018
  modified_base 1: mod_base = um
  modified_base 1..2: mod_base = OTHER; note = R-phosphorothioate
  modified_base 2: mod_base = OTHER; note = 2-fluororibose uracil
  modified_base 2..3: mod_base = OTHER; note = R-phosphorothioate
  modified_base 3: mod_base = OTHER; note = 2-O-methylribose adenine
  modified_base 3..4: mod_base = OTHER; note = R-phosphorothioate
  modified_base 4: mod_base = OTHER; note = 2-fluororibose uracil
  modified_base 4..5: mod_base = OTHER; note = S-phosphorothioate
  modified_base 5: mod_base = OTHER; note = 2-O-methylribose adenine
  modified_base 5..6: mod_base = OTHER; note = S-phosphorothioate
  modified_base 6: mod_base = OTHER; note = 2-fluororibose guanine
  modified_base 6..7: mod_base = OTHER; note = R-phosphorothioate
  modified_base 7: mod_base = OTHER; note = 2-O-methylribose adenine
  modified_base 7..8: mod_base = OTHER; note = S-phosphorothioate
  modified_base 8: mod_base = OTHER; note = 2-fluororibose guanine
  modified_base 8..9: mod_base = OTHER; note = S-phosphorothioate
  modified_base 9: mod_base = cm
  modified_base 10: mod_base = OTHER; note = 2-fluororibose adenine
  modified_base 11: mod_base = OTHER; note = 2-O-methylribose adenine
  modified_base 12: mod_base = gm
  modified_base 13: mod_base = OTHER; note = 2-O-methylribose adenine
  modified_base 14: mod_base = OTHER; note = 2-fluororibose adenine
  modified_base 15: mod_base = cm
  modified_base 16: mod_base = OTHER; note = 2-fluororibose adenine
  modified_base 17: mod_base = cm
  modified_base 18: mod_base = OTHER; note = 2-fluororibose uracil
  modified_base 19: mod_base = gm
  modified_base 20: mod_base = OTHER; note = 2-fluororibose uracil
  modified_base 21: mod_base = um
  modified_base 21..22: mod_base = OTHER; note = S-phosphorothioate
  modified_base 22: mod_base = um
  modified_base 22..23: mod_base = OTHER; note = S-phosphorothioate
  modified_base 23: mod_base = um
  source 1..23: mol_type = other RNA
ttatagagcaagaacactgtttt

SEQ ID NO: 294 - RNA, 23 nt, synthetic construct
  misc_feature 1..23: note = Synthetic: WV-37007
  misc_feature 1..23: note = Synthetic: SSR-0103019
  modified_base 1: mod_base = um
  modified_base 1..2: mod_base = OTHER; note = R-phosphorothioate
  modified_base 2: mod_base = OTHER; note = 2-fluororibose uracil
  modified_base 2..3: mod_base = OTHER; note = R-phosphorothioate
  modified_base 3: mod_base = OTHER; note = 2-O-methylribose adenine
  modified_base 3..4: mod_base = OTHER; note = R-phosphorothioate
  modified_base 4: mod_base = OTHER; note = 2-fluororibose uracil
  modified_base 4..5: mod_base = OTHER; note = S-phosphorothioate
  modified_base 5: mod_base = OTHER; note = 2-O-methylribose adenine
  modified_base 5..6: mod_base = OTHER; note = S-phosphorothioate
  modified_base 6: mod_base = OTHER; note = 2-fluororibose guanine
  modified_base 6..7: mod_base = OTHER; note = S-phosphorothioate
  modified_base 7: mod_base = OTHER; note = 2-O-methylribose adenine
  modified_base 7..8: mod_base = OTHER; note = R-phosphorothioate
  modified_base 8: mod_base = OTHER; note = 2-fluororibose guanine
  modified_base 8..9: mod_base = OTHER; note = R-phosphorothioate
  modified_base 9: mod_base = cm
  modified_base 10: mod_base = OTHER; note = 2-fluororibose adenine
  modified_base 11: mod_base = OTHER; note = 2-O-methylribose adenine
  modified_base 12: mod_base = gm
  modified_base 13: mod_base = OTHER; note = 2-O-methylribose adenine
  modified_base 14: mod_base = OTHER; note = 2-fluororibose adenine
  modified_base 15: mod_base = cm
  modified_base 16: mod_base = OTHER; note = 2-fluororibose adenine
  modified_base 17: mod_base = cm
  modified_base 18: mod_base = OTHER; note = 2-fluororibose uracil
  modified_base 19: mod_base = gm
  modified_base 20: mod_base = OTHER; note = 2-fluororibose uracil
  modified_base 21: mod_base = um
  modified_base 21..22: mod_base = OTHER; note = S-phosphorothioate
  modified_base 22: mod_base = um
  modified_base 22..23: mod_base = OTHER; note = S-phosphorothioate
  modified_base 23: mod_base = um
  source 1..23: mol_type = other RNA
ttatagagcaagaacactgtttt

SEQ ID NO: 295 - RNA, 23 nt, synthetic construct
  misc_feature 1..23: note = Synthetic: WV-37008
  misc_feature 1..23: note = Synthetic: SSR-0103020
  modified_base 1: mod_base = um
  modified_base 1..2: mod_base = OTHER; note = R-phosphorothioate
  modified_base 2: mod_base = OTHER; note = 2-fluororibose uracil
  modified_base 2..3: mod_base = OTHER; note = R-phosphorothioate
  modified_base 3: mod_base = OTHER; note = 2-O-methylribose adenine
  modified_base 3..4: mod_base = OTHER; note = R-phosphorothioate
  modified_base 4: mod_base = OTHER; note = 2-fluororibose uracil
  modified_base 4..5: mod_base = OTHER; note = S-phosphorothioate
  modified_base 5: mod_base = OTHER; note = 2-O-methylribose adenine
  modified_base 5..6: mod_base = OTHER; note = S-phosphorothioate
  modified_base 6: mod_base = OTHER; note = 2-fluororibose guanine
  modified_base 6..7: mod_base = OTHER; note = S-phosphorothioate
  modified_base 7: mod_base = OTHER; note = 2-O-methylribose adenine
  modified_base 7..8: mod_base = OTHER; note = R-phosphorothioate
  modified_base 8: mod_base = OTHER; note = 2-fluororibose guanine
  modified_base 8..9: mod_base = OTHER; note = S-phosphorothioate
  modified_base 9: mod_base = cm
  modified_base 10: mod_base = OTHER; note = 2-fluororibose adenine
  modified_base 11: mod_base = OTHER; note = 2-O-methylribose adenine
  modified_base 12: mod_base = gm
  modified_base 13: mod_base = OTHER; note = 2-O-methylribose adenine
  modified_base 14: mod_base = OTHER; note = 2-fluororibose adenine
  modified_base 15: mod_base = cm
  modified_base 16: mod_base = OTHER; note = 2-fluororibose adenine
  modified_base 17: mod_base = cm
  modified_base 18: mod_base = OTHER; note = 2-fluororibose uracil
  modified_base 19: mod_base = gm
  modified_base 20: mod_base = OTHER; note = 2-fluororibose uracil
  modified_base 21: mod_base = um
  modified_base 21..22: mod_base = OTHER; note = S-phosphorothioate
  modified_base 22: mod_base = um
  modified_base 22..23: mod_base = OTHER; note = S-phosphorothioate
  modified_base 23: mod_base = um
  source 1..23: mol_type = other RNA
ttatagagcaagaacactgtttt

SEQ ID NO: 296 - RNA, 23 nt, synthetic construct
  misc_feature 1..23: note = Synthetic: WV-37009
  misc_feature 1..23: note = Synthetic: SSR-0103021
  modified_base 1: mod_base = um
  modified_base 1..2: mod_base = OTHER; note = R-phosphorothioate
  modified_base 2: mod_base = OTHER; note = 2-fluororibose uracil
  modified_base 2..3: mod_base = OTHER; note = R-phosphorothioate
  modified_base 3: mod_base = OTHER; note = 2-O-methylribose adenine
  modified_base 3..4: mod_base = OTHER; note = R-phosphorothioate
  modified_base 4: mod_base = OTHER; note = 2-fluororibose uracil
  modified_base 4..5: mod_base = OTHER; note = S-phosphorothioate
  modified_base 5: mod_base = OTHER; note = 2-O-methylribose adenine
  modified_base 5..6: mod_base = OTHER; note = S-phosphorothioate
  modified_base 6: mod_base = OTHER; note = 2-fluororibose guanine
  modified_base 6..7: mod_base = OTHER; note = S-phosphorothioate
  modified_base 7: mod_base = OTHER; note = 2-O-methylribose adenine
  modified_base 7..8: mod_base = OTHER; note = S-phosphorothioate
  modified_base 8: mod_base = OTHER; note = 2-fluororibose guanine
  modified_base 8..9: mod_base = OTHER; note = R-phosphorothioate
  modified_base 9: mod_base = cm
  modified_base 10: mod_base = OTHER; note = 2-fluororibose adenine
  modified_base 11: mod_base = OTHER; note = 2-O-methylribose adenine
  modified_base 12: mod_base = gm
  modified_base 13: mod_base = OTHER; note = 2-O-methylribose adenine
  modified_base 14: mod_base = OTHER; note = 2-fluororibose adenine
  modified_base 15: mod_base = cm
  modified_base 16: mod_base = OTHER; note = 2-fluororibose adenine
  modified_base 17: mod_base = cm
  modified_base 18: mod_base = OTHER; note = 2-fluororibose uracil
  modified_base 19: mod_base = gm
  modified_base 20: mod_base = OTHER; note = 2-fluororibose uracil
  modified_base 21: mod_base = um
  modified_base 21..22: mod_base = OTHER; note = S-phosphorothioate
  modified_base 22: mod_base = um
  modified_base 22..23: mod_base = OTHER; note = S-phosphorothioate
  modified_base 23: mod_base = um
  source 1..23: mol_type = other RNA
ttatagagcaagaacactgtttt

SEQ ID NO: 297 - RNA, 23 nt, synthetic construct
  misc_feature 1..23: note = Synthetic: WV-37010
  misc_feature 1..23: note = Synthetic: SSR-0103022
  modified_base 1: mod_base = um
  modified_base 1..2: mod_base = OTHER; note = R-phosphorothioate
  modified_base 2: mod_base = OTHER; note = 2-fluororibose uracil
  modified_base 2..3: mod_base = OTHER; note = R-phosphorothioate
  modified_base 3: mod_base = OTHER; note = 2-O-methylribose adenine
  modified_base 3..4: mod_base = OTHER; note = R-phosphorothioate
  modified_base 4: mod_base = OTHER; note = 2-fluororibose uracil
  modified_base 4..5: mod_base = OTHER; note = S-phosphorothioate
  modified_base 5: mod_base = OTHER; note = 2-O-methylribose adenine
  modified_base 5..6: mod_base = OTHER; note = S-phosphorothioate
  modified_base 6: mod_base = OTHER; note = 2-fluororibose guanine
  modified_base 6..7: mod_base = OTHER; note = S-phosphorothioate
  modified_base 7: mod_base = OTHER; note = 2-O-methylribose adenine
  modified_base 7..8: mod_base = OTHER; note = S-phosphorothioate
  modified_base 8: mod_base = OTHER; note = 2-fluororibose guanine
  modified_base 8..9: mod_base = OTHER; note = S-phosphorothioate
  modified_base 9: mod_base = cm
  modified_base 10: mod_base = OTHER; note = 2-fluororibose adenine
  modified_base 11: mod_base = OTHER; note = 2-O-methylribose adenine
  modified_base 12: mod_base = gm
  modified_base 13: mod_base = OTHER; note = 2-O-methylribose adenine
  modified_base 14: mod_base = OTHER; note = 2-fluororibose adenine
  modified_base 15: mod_base = cm
  modified_base 16: mod_base = OTHER; note = 2-fluororibose adenine
  modified_base 17: mod_base = cm
  modified_base 18: mod_base = OTHER; note = 2-fluororibose uracil
  modified_base 19: mod_base = gm
  modified_base 20: mod_base = OTHER; note = 2-fluororibose uracil
  modified_base 21: mod_base = um
  modified_base 21..22: mod_base = OTHER; note = S-phosphorothioate
  modified_base 22: mod_base = um
  modified_base 22..23: mod_base = OTHER; note = S-phosphorothioate
  modified_base 23: mod_base = um
  source 1..23: mol_type = other RNA
ttatagagcaagaacactgtttt

SEQ ID NO: 298 - RNA, 23 nt, synthetic construct
  misc_feature 1..23: note = Synthetic: WV-37011
  misc_feature 1..23: note = Synthetic: SSR-0103023
  modified_base 1: mod_base = um
  modified_base 1..2: mod_base = OTHER; note = R-phosphorothioate
  modified_base 2: mod_base = OTHER; note = 2-fluororibose uracil
  modified_base 2..3: mod_base = OTHER; note = R-phosphorothioate
  modified_base 3: mod_base = OTHER; note = 2-O-methylribose adenine
  modified_base 3..4: mod_base = OTHER; note = S-phosphorothioate
  modified_base 4: mod_base = OTHER; note = 2-fluororibose uracil
  modified_base 4..5: mod_base = OTHER; note = R-phosphorothioate
  modified_base 5: mod_base = OTHER; note = 2-O-methylribose adenine
  modified_base 5..6: mod_base = OTHER; note = R-phosphorothioate
  modified_base 6: mod_base = OTHER; note = 2-fluororibose guanine
  modified_base 6..7: mod_base = OTHER; note = R-phosphorothioate
  modified_base 7: mod_base = OTHER; note = 2-O-methylribose adenine
  modified_base 7..8: mod_base = OTHER; note = R-phosphorothioate
  modified_base 8: mod_base = OTHER; note = 2-fluororibose guanine
  modified_base 8..9: mod_base = OTHER; note = R-phosphorothioate
  modified_base 9: mod_base = cm
  modified_base 10: mod_base = OTHER; note = 2-fluororibose adenine
  modified_base 11: mod_base = OTHER; note = 2-O-methylribose adenine
  modified_base 12: mod_base = gm
  modified_base 13: mod_base = OTHER; note = 2-O-methylribose adenine
  modified_base 14: mod_base = OTHER; note = 2-fluororibose adenine
  modified_base 15: mod_base = cm
  modified_base 16: mod_base = OTHER; note = 2-fluororibose adenine
  modified_base 17: mod_base = cm
  modified_base 18: mod_base = OTHER; note = 2-fluororibose uracil
  modified_base 19: mod_base = gm
  modified_base 20: mod_base = OTHER; note = 2-fluororibose uracil
  modified_base 21: mod_base = um
  modified_base 21..22: mod_base = OTHER; note = S-phosphorothioate
  modified_base 22: mod_base = um
  modified_base 22..23: mod_base = OTHER; note = S-phosphorothioate
  modified_base 23: mod_base = um
  source 1..23: mol_type = other RNA
ttatagagcaagaacactgtttt

SEQ ID NO: 299 - RNA, 23 nt, synthetic construct
  misc_feature 1..23: note = Synthetic: WV-37012
  misc_feature 1..23: note = Synthetic: SSR-0103024
  modified_base 1: mod_base = um
  modified_base 1..2: mod_base = OTHER; note = R-phosphorothioate
  modified_base 2: mod_base = OTHER; note = 2-fluororibose uracil
  modified_base 2..3: mod_base = OTHER; note = R-phosphorothioate
  modified_base 3: mod_base = OTHER; note = 2-O-methylribose adenine
  modified_base 3..4: mod_base = OTHER; note = S-phosphorothioate
  modified_base 4: mod_base = OTHER; note = 2-fluororibose uracil
  modified_base 4..5: mod_base = OTHER; note = R-phosphorothioate
  modified_base 5: mod_base = OTHER; note = 2-O-methylribose adenine
  modified_base 5..6: mod_base = OTHER; note = R-phosphorothioate
  modified_base 6: mod_base = OTHER; note = 2-fluororibose guanine
  modified_base 6..7: mod_base = OTHER; note = R-phosphorothioate
  modified_base 7: mod_base = OTHER; note = 2-O-methylribose adenine
  modified_base 7..8: mod_base = OTHER; note = R-phosphorothioate
  modified_base 8: mod_base = OTHER; note = 2-fluororibose guanine
  modified_base 8..9: mod_base = OTHER; note = S-phosphorothioate
  modified_base 9: mod_base = cm
  modified_base 10: mod_base = OTHER; note = 2-fluororibose adenine
  modified_base 11: mod_base = OTHER; note = 2-O-methylribose adenine
  modified_base 12: mod_base = gm
  modified_base 13: mod_base = OTHER; note = 2-O-methylribose adenine
  modified_base 14: mod_base = OTHER; note = 2-fluororibose adenine
  modified_base 15: mod_base = cm
  modified_base 16: mod_base = OTHER; note = 2-fluororibose adenine
  modified_base 17: mod_base = cm
  modified_base 18: mod_base = OTHER; note = 2-fluororibose uracil
  modified_base 19: mod_base = gm
  modified_base 20: mod_base = OTHER; note = 2-fluororibose uracil
  modified_base 21: mod_base = um
  modified_base 21..22: mod_base = OTHER; note = S-phosphorothioate
  modified_base 22: mod_base = um
  modified_base 22..23: mod_base = OTHER; note = S-phosphorothioate
  modified_base 23: mod_base = um
  source 1..23: mol_type = other RNA
ttatagagcaagaacactgtttt

SEQ ID NO: 300 - RNA, 23 nt, synthetic construct
  misc_feature 1..23: note = Synthetic: WV-37013
  misc_feature 1..23: note = Synthetic: SSR-0103025
  modified_base 1: mod_base = um
  modified_base 1..2: mod_base = OTHER; note = R-phosphorothioate
  modified_base 2: mod_base = OTHER; note = 2-fluororibose uracil
  modified_base 2..3: mod_base = OTHER; note = R-phosphorothioate
  modified_base 3: mod_base = OTHER; note = 2-O-methylribose adenine
  modified_base 3..4: mod_base = OTHER; note = S-phosphorothioate
  modified_base 4: mod_base = OTHER; note = 2-fluororibose uracil
  modified_base 4..5: mod_base = OTHER; note = R-phosphorothioate
  modified_base 5: mod_base = OTHER; note = 2-O-methylribose adenine
  modified_base 5..6: mod_base = OTHER; note = R-phosphorothioate
  modified_base 6: mod_base = OTHER; note = 2-fluororibose guanine
  modified_base 6..7: mod_base = OTHER; note = R-phosphorothioate
  modified_base 7: mod_base = OTHER; note = 2-O-methylribose adenine
  modified_base 7..8: mod_base = OTHER; note = S-phosphorothioate
  modified_base 8: mod_base = OTHER; note = 2-fluororibose guanine
  modified_base 8..9: mod_base = OTHER; note = R-phosphorothioate
  modified_base 9: mod_base = cm
  modified_base 10: mod_base = OTHER; note = 2-fluororibose adenine
  modified_base 11: mod_base = OTHER; note = 2-O-methylribose adenine
  modified_base 12: mod_base = gm
  modified_base 13: mod_base = OTHER; note = 2-O-methylribose adenine
  modified_base 14: mod_base = OTHER; note = 2-fluororibose adenine
  modified_base 15: mod_base = cm
  modified_base 16: mod_base = OTHER; note = 2-fluororibose adenine
  modified_base 17: mod_base = cm
  modified_base 18: mod_base = OTHER; note = 2-fluororibose uracil
  modified_base 19: mod_base = gm
  modified_base 20: mod_base = OTHER; note = 2-fluororibose uracil
  modified_base 21: mod_base = um
  modified_base 21..22: mod_base = OTHER; note = S-phosphorothioate
  modified_base 22: mod_base = um
  modified_base 22..23: mod_base = OTHER; note = S-phosphorothioate
  modified_base 23: mod_base = um
  source 1..23: mol_type = other RNA
ttatagagcaagaacactgtttt

SEQ ID NO: 301 - RNA, 23 nt, synthetic construct
  misc_feature 1..23: note = Synthetic: WV-37014
  misc_feature 1..23: note = Synthetic: SSR-0103026
  modified_base 1: mod_base = um
  modified_base 1..2: mod_base = OTHER; note = R-phosphorothioate
  modified_base 2: mod_base = OTHER; note = 2-fluororibose uracil
  modified_base 2..3: mod_base = OTHER; note = R-phosphorothioate
  modified_base 3: mod_base = OTHER; note = 2-O-methylribose adenine
  modified_base 3..4: mod_base = OTHER; note = S-phosphorothioate
  modified_base 4: mod_base = OTHER; note = 2-fluororibose uracil
  modified_base 4..5: mod_base = OTHER; note = R-phosphorothioate
  modified_base 5: mod_base = OTHER; note = 2-O-methylribose adenine
  modified_base 5..6: mod_base = OTHER; note = R-phosphorothioate
  modified_base 6: mod_base = OTHER; note = 2-fluororibose guanine
  modified_base 6..7: mod_base = OTHER; note = R-phosphorothioate
  modified_base 7: mod_base = OTHER; note = 2-O-methylribose adenine
  modified_base 7..8: mod_base = OTHER; note = S-phosphorothioate
  modified_base 8: mod_base = OTHER; note = 2-fluororibose guanine
  modified_base 8..9: mod_base = OTHER; note = S-phosphorothioate
  modified_base 9: mod_base = cm
  modified_base 10: mod_base = OTHER; note = 2-fluororibose adenine
  modified_base 11: mod_base = OTHER; note = 2-O-methylribose adenine
  modified_base 12: mod_base = gm
  modified_base 13: mod_base = OTHER; note = 2-O-methylribose adenine
  modified_base 14: mod_base = OTHER; note = 2-fluororibose adenine
  modified_base 15: mod_base = cm
  modified_base 16: mod_base = OTHER; note = 2-fluororibose adenine
  modified_base 17: mod_base = cm
  modified_base 18: mod_base = OTHER; note = 2-fluororibose uracil
  modified_base 19: mod_base = gm
  modified_base 20: mod_base = OTHER; note = 2-fluororibose uracil
  modified_base 21: mod_base = um
  modified_base 21..22: mod_base = OTHER; note = S-phosphorothioate
  modified_base 22: mod_base = um
  modified_base 22..23: mod_base = OTHER; note = S-phosphorothioate
  modified_base 23: mod_base = um
  source 1..23: mol_type = other RNA
ttatagagcaagaacactgtttt

SEQ ID NO: 302 - RNA, 23 nt, synthetic construct
  misc_feature 1..23: note = Synthetic: WV-37015
  misc_feature 1..23: note = Synthetic: SSR-0103027
  modified_base 1: mod_base = um
  modified_base 1..2: mod_base = OTHER; note = R-phosphorothioate
  modified_base 2: mod_base = OTHER; note = 2-fluororibose uracil
  modified_base 2..3: mod_base = OTHER; note = R-phosphorothioate
  modified_base 3: mod_base = OTHER; note = 2-O-methylribose adenine
  modified_base 3..4: mod_base = OTHER; note = S-phosphorothioate
  modified_base 4: mod_base = OTHER; note = 2-fluororibose uracil
  modified_base 4..5: mod_base = OTHER; note = R-phosphorothioate
  modified_base 5: mod_base = OTHER; note = 2-O-methylribose adenine
  modified_base 5..6: mod_base = OTHER; note = R-phosphorothioate
  modified_base 6: mod_base = OTHER; note = 2-fluororibose guanine
  modified_base 6..7: mod_base = OTHER; note = S-phosphorothioate
  modified_base 7: mod_base = OTHER; note = 2-O-methylribose adenine
  modified_base 7..8: mod_base = OTHER; note = R-phosphorothioate
  modified_base 8: mod_base = OTHER; note = 2-fluororibose guanine
  modified_base 8..9: mod_base = OTHER; note = R-phosphorothioate
  modified_base 9: mod_base = cm
  modified_base 10: mod_base = OTHER; note = 2-fluororibose adenine
  modified_base 11: mod_base = OTHER; note = 2-O-methylribose adenine
  modified_base 12: mod_base = gm
  modified_base 13: mod_base = OTHER; note = 2-O-methylribose adenine
  modified_base 14: mod_base = OTHER; note = 2-fluororibose adenine
  modified_base 15: mod_base = cm
  modified_base 16: mod_base = OTHER; note = 2-fluororibose adenine
  modified_base 17: mod_base = cm
  modified_base 18: mod_base = OTHER; note = 2-fluororibose uracil
  modified_base 19: mod_base = gm
  modified_base 20: mod_base = OTHER; note = 2-fluororibose uracil
  modified_base 21: mod_base = um
  modified_base 21..22: mod_base = OTHER; note = S-phosphorothioate
  modified_base 22: mod_base = um
  modified_base 22..23: mod_base = OTHER; note = S-phosphorothioate
  modified_base 23: mod_base = um
  source 1..23: mol_type = other RNA
ttatagagcaagaacactgtttt

SEQ ID NO: 303 - RNA, 23 nt, synthetic construct
  misc_feature 1..23: note = Synthetic: WV-37016
  misc_feature 1..23: note = Synthetic: SSR-0103028
  modified_base 1: mod_base = um
  modified_base 1..2: mod_base = OTHER; note = R-phosphorothioate
  modified_base 2: mod_base = OTHER; note = 2-fluororibose uracil
  modified_base 2..3: mod_base = OTHER; note = R-phosphorothioate
  modified_base 3: mod_base = OTHER; note = 2-O-methylribose adenine
  modified_base 3..4: mod_base = OTHER; note = S-phosphorothioate
  modified_base 4: mod_base = OTHER; note = 2-fluororibose uracil
  modified_base 4..5: mod_base = OTHER; note = R-phosphorothioate
  modified_base 5: mod_base = OTHER; note = 2-O-methylribose adenine
  modified_base 5..6: mod_base = OTHER; note = R-phosphorothioate
  modified_base 6: mod_base = OTHER; note = 2-fluororibose guanine
  modified_base 6..7: mod_base = OTHER; note = S-phosphorothioate
  modified_base 7: mod_base = OTHER; note = 2-O-methylribose adenine
  modified_base 7..8: mod_base = OTHER; note = R-phosphorothioate
  modified_base 8: mod_base = OTHER; note = 2-fluororibose guanine
  modified_base 8..9: mod_base = OTHER; note = S-phosphorothioate
  modified_base 9: mod_base = cm
  modified_base 10: mod_base = OTHER; note = 2-fluororibose adenine
  modified_base 11: mod_base = OTHER; note = 2-O-methylribose adenine
  modified_base 12: mod_base = gm
  modified_base 13: mod_base = OTHER; note = 2-O-methylribose adenine
  modified_base 14: mod_base = OTHER; note = 2-fluororibose adenine
  modified_base 15: mod_base = cm
  modified_base 16: mod_base = OTHER; note = 2-fluororibose adenine
  modified_base 17: mod_base = cm
  modified_base 18: mod_base = OTHER; note = 2-fluororibose uracil
  modified_base 19: mod_base = gm
  modified_base 20: mod_base = OTHER; note = 2-fluororibose uracil
  modified_base 21: mod_base = um
  modified_base 21..22: mod_base = OTHER; note = S-phosphorothioate
  modified_base 22: mod_base = um
  modified_base 22..23: mod_base = OTHER; note = S-phosphorothioate
  modified_base 23: mod_base = um
  source 1..23: mol_type = other RNA
ttatagagcaagaacactgtttt

SEQ ID NO: 304 - RNA, 23 nt, synthetic construct
  misc_feature 1..23: note = Synthetic: WV-37017
  misc_feature 1..23: note = Synthetic: SSR-0103029
  modified_base 1: mod_base = um
  modified_base 1..2: mod_base = OTHER; note = R-phosphorothioate
  modified_base 2: mod_base = OTHER; note = 2-fluororibose uracil
  modified_base 2..3: mod_base = OTHER; note = R-phosphorothioate
  modified_base 3: mod_base = OTHER; note = 2-O-methylribose adenine
  modified_base 3..4: mod_base = OTHER; note = S-phosphorothioate
  modified_base 4: mod_base = OTHER; note = 2-fluororibose uracil
  modified_base 4..5: mod_base = OTHER; note = R-phosphorothioate
  modified_base 5: mod_base = OTHER; note = 2-O-methylribose adenine
  modified_base 5..6: mod_base = OTHER; note = R-phosphorothioate
  modified_base 6: mod_base = OTHER; note = 2-fluororibose guanine
  modified_base 6..7: mod_base = OTHER; note = S-phosphorothioate
  modified_base 7: mod_base = OTHER; note = 2-O-methylribose adenine
  modified_base 7..8: mod_base = OTHER; note = S-phosphorothioate
  modified_base 8: mod_base = OTHER; note = 2-fluororibose guanine
  modified_base 8..9: mod_base = OTHER; note = R-phosphorothioate
  modified_base 9: mod_base = cm
  modified_base 10: mod_base = OTHER; note = 2-fluororibose adenine
  modified_base 11: mod_base = OTHER; note = 2-O-methylribose adenine
  modified_base 12: mod_base = gm
  modified_base 13: mod_base = OTHER; note = 2-O-methylribose adenine
  modified_base 14: mod_base = OTHER; note = 2-fluororibose adenine
  modified_base 15: mod_base = cm
  modified_base 16: mod_base = OTHER; note = 2-fluororibose adenine
  modified_base 17: mod_base = cm
  modified_base 18: mod_base = OTHER; note = 2-fluororibose uracil
  modified_base 19: mod_base = gm
  modified_base 20: mod_base = OTHER; note = 2-fluororibose uracil
  modified_base 21: mod_base = um
  modified_base 21..22: mod_base = OTHER; note = S-phosphorothioate
  modified_base 22: mod_base = um
  modified_base 22..23: mod_base = OTHER; note = S-phosphorothioate
  modified_base 23: mod_base = um
  source 1..23: mol_type = other RNA
ttatagagcaagaacactgtttt

SEQ ID NO: 305 - RNA, 23 nt, synthetic construct
  misc_feature 1..23: note = Synthetic: WV-37018
  misc_feature 1..23: note = Synthetic: SSR-0103030
  modified_base 1: mod_base = um
  modified_base 1..2: mod_base = OTHER; note = R-phosphorothioate
  modified_base 2: mod_base = OTHER; note = 2-fluororibose uracil
  modified_base 2..3: mod_base = OTHER; note = R-phosphorothioate
  modified_base 3: mod_base = OTHER; note = 2-O-methylribose adenine
  modified_base 3..4: mod_base = OTHER; note = S-phosphorothioate
  modified_base 4: mod_base = OTHER; note = 2-fluororibose uracil
  modified_base 4..5: mod_base = OTHER; note = R-phosphorothioate
  modified_base 5: mod_base = OTHER; note = 2-O-methylribose adenine
  modified_base 5..6: mod_base = OTHER; note = R-phosphorothioate
  modified_base 6: mod_base = OTHER; note = 2-fluororibose guanine
  modified_base 6..7: mod_base = OTHER; note = S-phosphorothioate
  modified_base 7: mod_base = OTHER; note = 2-O-methylribose adenine
  modified_base 7..8: mod_base = OTHER; note = S-phosphorothioate
  modified_base 8: mod_base = OTHER; note = 2-fluororibose guanine
  modified_base 8..9: mod_base = OTHER; note = S-phosphorothioate
  modified_base 9: mod_base = cm
  modified_base 10: mod_base = OTHER; note = 2-fluororibose adenine
  modified_base 11: mod_base = OTHER; note = 2-O-methylribose adenine
  modified_base 12: mod_base = gm
  modified_base 13: mod_base = OTHER; note = 2-O-methylribose adenine
  modified_base 14: mod_base = OTHER; note = 2-fluororibose adenine
  modified_base 15: mod_base = cm
  modified_base 16: mod_base = OTHER; note = 2-fluororibose adenine
  modified_base 17: mod_base = cm
  modified_base 18: mod_base = OTHER; note = 2-fluororibose uracil
  modified_base 19: mod_base = gm
  modified_base 20: mod_base = OTHER; note = 2-fluororibose uracil
  modified_base 21: mod_base = um
  modified_base 21..22: mod_base = OTHER; note = S-phosphorothioate
  modified_base 22: mod_base = um
  modified_base 22..23: mod_base = OTHER; note = S-phosphorothioate
  modified_base 23: mod_base = um
  source 1..23: mol_type = other RNA
ttatagagcaagaacactgtttt

SEQ ID NO: 306 - RNA, 23 nt, synthetic construct
  misc_feature 1..23: note = Synthetic: WV-37019
  misc_feature 1..23: note = Synthetic: SSR-0103031
  modified_base 1: mod_base = um
  modified_base 1..2: mod_base = OTHER; note = R-phosphorothioate
  modified_base 2: mod_base = OTHER; note = 2-fluororibose uracil
  modified_base 2..3: mod_base = OTHER; note = R-phosphorothioate
  modified_base 3: mod_base = OTHER; note = 2-O-methylribose adenine
  modified_base 3..4: mod_base = OTHER; note = S-phosphorothioate
  modified_base 4: mod_base = OTHER; note = 2-fluororibose uracil
  modified_base 4..5: mod_base = OTHER; note = R-phosphorothioate
  modified_base 5: mod_base = OTHER; note = 2-O-methylribose adenine
  modified_base 5..6: mod_base = OTHER; note = S-phosphorothioate
  modified_base 6: mod_base = OTHER; note = 2-fluororibose guanine
  modified_base 6..7: mod_base = OTHER; note = R-phosphorothioate
  modified_base 7: mod_base = OTHER; note = 2-O-methylribose adenine
  modified_base 7..8: mod_base = OTHER; note = R-phosphorothioate
  modified_base 8: mod_base = OTHER; note = 2-fluororibose guanine
  modified_base 8..9: mod_base = OTHER; note = R-phosphorothioate
  modified_base 9: mod_base = cm
  modified_base 10: mod_base = OTHER; note = 2-fluororibose adenine
  modified_base 11: mod_base = OTHER; note = 2-O-methylribose adenine
  modified_base 12: mod_base = gm
  modified_base 13: mod_base = OTHER; note = 2-O-methylribose adenine
  modified_base 14: mod_base = OTHER; note = 2-fluororibose adenine
  modified_base 15: mod_base = cm
  modified_base 16: mod_base = OTHER; note = 2-fluororibose adenine
  modified_base 17: mod_base = cm
  modified_base 18: mod_base = OTHER; note = 2-fluororibose uracil
  modified_base 19: mod_base = gm
  modified_base 20: mod_base = OTHER; note = 2-fluororibose uracil
  modified_base 21: mod_base = um
  modified_base 21..22: mod_base = OTHER; note = S-phosphorothioate
  modified_base 22: mod_base = um
  modified_base 22..23: mod_base = OTHER; note = S-phosphorothioate
  modified_base 23: mod_base = um
  source 1..23: mol_type = other RNA
ttatagagcaagaacactgtttt

SEQ ID NO: 307 - RNA, 23 nt, synthetic construct
  misc_feature 1..23: note = Synthetic: WV-37020
  misc_feature 1..23: note = Synthetic: SSR-0103032
  modified_base 1: mod_base = um
  modified_base 1..2: mod_base = OTHER; note = R-phosphorothioate
  modified_base 2: mod_base = OTHER; note = 2-fluororibose uracil
  modified_base 2..3: mod_base = OTHER; note = R-phosphorothioate
  modified_base 3: mod_base = OTHER; note = 2-O-methylribose adenine
  modified_base 3..4: mod_base = OTHER; note = S-phosphorothioate
  modified_base 4: mod_base = OTHER; note = 2-fluororibose uracil
  modified_base 4..5: mod_base = OTHER; note = R-phosphorothioate
  modified_base 5: mod_base = OTHER; note = 2-O-methylribose adenine
  modified_base 5..6: mod_base = OTHER; note = S-phosphorothioate
  modified_base 6: mod_base = OTHER; note = 2-fluororibose guanine
  modified_base 6..7: mod_base = OTHER; note = R-phosphorothioate
  modified_base 7: mod_base = OTHER; note = 2-O-methylribose adenine
  modified_base 7..8: mod_base = OTHER; note = R-phosphorothioate
  modified_base 8: mod_base = OTHER; note = 2-fluororibose guanine
  modified_base 8..9: mod_base = OTHER; note = S-phosphorothioate
  modified_base 9: mod_base = cm
  modified_base 10: mod_base = OTHER; note = 2-fluororibose adenine
  modified_base 11: mod_base = OTHER; note = 2-O-methylribose adenine
  modified_base 12: mod_base = gm
  modified_base 13: mod_base = OTHER; note = 2-O-methylribose adenine
  modified_base 14: mod_base = OTHER; note = 2-fluororibose adenine
  modified_base 15: mod_base = cm
  modified_base 16: mod_base = OTHER; note = 2-fluororibose adenine
  modified_base 17: mod_base = cm
  modified_base 18: mod_base = OTHER; note = 2-fluororibose uracil
  modified_base 19: mod_base = gm
  modified_base 20: mod_base = OTHER; note = 2-fluororibose uracil
  modified_base 21: mod_base = um
  modified_base 21..22: mod_base = OTHER; note = S-phosphorothioate
  modified_base 22: mod_base = um
  modified_base 22..23: mod_base = OTHER; note = S-phosphorothioate
  modified_base 23: mod_base = um
  source 1..23: mol_type = other RNA
ttatagagcaagaacactgtttt

SEQ ID NO: 308 - RNA, 23 nt, synthetic construct
  misc_feature 1..23: note = Synthetic: WV-37021
  misc_feature 1..23: note = Synthetic: SSR-0103033
  modified_base 1: mod_base = um
  modified_base 1..2: mod_base = OTHER; note = R-phosphorothioate
  modified_base 2: mod_base = OTHER; note = 2-fluororibose uracil
  modified_base 2..3: mod_base = OTHER; note = R-phosphorothioate
  modified_base 3: mod_base = OTHER; note = 2-O-methylribose adenine
  modified_base 3..4: mod_base = OTHER; note = S-phosphorothioate
  modified_base 4: mod_base = OTHER; note = 2-fluororibose uracil
  modified_base 4..5: mod_base = OTHER; note = R-phosphorothioate
  modified_base 5: mod_base = OTHER; note = 2-O-methylribose adenine
  modified_base 5..6: mod_base = OTHER; note = S-phosphorothioate
  modified_base 6: mod_base = OTHER; note = 2-fluororibose guanine
  modified_base 6..7: mod_base = OTHER; note = R-phosphorothioate
  modified_base 7: mod_base = OTHER; note = 2-O-methylribose adenine
  modified_base 7..8: mod_base = OTHER; note = S-phosphorothioate
  modified_base 8: mod_base = OTHER; note = 2-fluororibose guanine
  modified_base 8..9: mod_base = OTHER; note = R-phosphorothioate
  modified_base 9: mod_base = cm
  modified_base 10: mod_base = OTHER; note = 2-fluororibose adenine
  modified_base 11: mod_base = OTHER; note = 2-O-methylribose adenine
  modified_base 12: mod_base = gm
  modified_base 13: mod_base = OTHER; note = 2-O-methylribose adenine
  modified_base 14: mod_base = OTHER; note = 2-fluororibose adenine
  modified_base 15: mod_base = cm
  modified_base 16: mod_base = OTHER; note = 2-fluororibose adenine
  modified_base 17: mod_base = cm
  modified_base 18: mod_base = OTHER; note = 2-fluororibose uracil
  modified_base 19: mod_base = gm
  modified_base 20: mod_base = OTHER; note = 2-fluororibose uracil
  modified_base 21: mod_base = um
  modified_base 21..22: mod_base = OTHER; note = S-phosphorothioate
  modified_base 22: mod_base = um
  modified_base 22..23: mod_base = OTHER; note = S-phosphorothioate
  modified_base 23: mod_base = um
  source 1..23: mol_type = other RNA
ttatagagcaagaacactgtttt

SEQ ID NO: 309 - RNA, 23 nt, synthetic construct
  misc_feature 1..23: note = Synthetic: WV-37022
  misc_feature 1..23: note = Synthetic: SSR-0103034
  modified_base 1: mod_base = um
  modified_base 1..2: mod_base = OTHER; note = R-phosphorothioate
  modified_base 2: mod_base = OTHER; note = 2-fluororibose uracil
  modified_base 2..3: mod_base = OTHER; note = R-phosphorothioate
  modified_base 3: mod_base = OTHER; note = 2-O-methylribose adenine
  modified_base 3..4: mod_base = OTHER; note = S-phosphorothioate
  modified_base 4: mod_base = OTHER; note = 2-fluororibose uracil
  modified_base 4..5: mod_base = OTHER; note = R-phosphorothioate
  modified_base 5: mod_base = OTHER; note = 2-O-methylribose adenine
  modified_base 5..6: mod_base = OTHER; note = S-phosphorothioate
  modified_base 6: mod_base = OTHER; note = 2-fluororibose guanine
  modified_base 6..7: mod_base = OTHER; note = R-phosphorothioate
  modified_base 7: mod_base = OTHER; note = 2-O-methylribose adenine
  modified_base 7..8: mod_base = OTHER; note = S-phosphorothioate
  modified_base 8: mod_base = OTHER; note = 2-fluororibose guanine
  modified_base 8..9: mod_base = OTHER; note = S-phosphorothioate
  modified_base 9: mod_base = cm
  modified_base 10: mod_base = OTHER; note = 2-fluororibose adenine
  modified_base 11: mod_base = OTHER; note = 2-O-methylribose adenine
  modified_base 12: mod_base = gm
  modified_base 13: mod_base = OTHER; note = 2-O-methylribose adenine
  modified_base 14: mod_base = OTHER; note = 2-fluororibose adenine
  modified_base 15: mod_base = cm
  modified_base 16: mod_base = OTHER; note = 2-fluororibose adenine
  modified_base 17: mod_base = cm
  modified_base 18: mod_base = OTHER; note = 2-fluororibose uracil
  modified_base 19: mod_base = gm
  modified_base 20: mod_base = OTHER; note = 2-fluororibose uracil
  modified_base 21: mod_base = um
  modified_base 21..22: mod_base = OTHER; note = S-phosphorothioate
  modified_base 22: mod_base = um
  modified_base 22..23: mod_base = OTHER; note = S-phosphorothioate
  modified_base 23: mod_base = um
  source 1..23: mol_type = other RNA
ttatagagcaagaacactgtttt

SEQ ID NO: 310 - RNA, 23 nt, synthetic construct
  misc_feature 1..23: note = Synthetic: WV-37023
  misc_feature 1..23: note = Synthetic: SSR-0103035
  modified_base 1: mod_base = um
  modified_base 1..2: mod_base = OTHER; note = R-phosphorothioate
  modified_base 2: mod_base = OTHER; note = 2-fluororibose uracil
  modified_base 2..3: mod_base = OTHER; note = R-phosphorothioate
  modified_base 3: mod_base = OTHER; note = 2-O-methylribose adenine
  modified_base 3..4: mod_base = OTHER; note = S-phosphorothioate
  modified_base 4: mod_base = OTHER; note = 2-fluororibose uracil
  modified_base 4..5: mod_base = OTHER; note = R-phosphorothioate
  modified_base 5: mod_base = OTHER; note = 2-O-methylribose adenine
  modified_base 5..6: mod_base = OTHER; note = S-phosphorothioate
  modified_base 6: mod_base = OTHER; note = 2-fluororibose guanine
  modified_base 6..7: mod_base = OTHER; note = S-phosphorothioate
  modified_base 7: mod_base = OTHER; note = 2-O-methylribose adenine
  modified_base 7..8: mod_base = OTHER; note = R-phosphorothioate
  modified_base 8: mod_base = OTHER; note = 2-fluororibose guanine
  modified_base 8..9: mod_base = OTHER; note = R-phosphorothioate
  modified_base 9: mod_base = cm
  modified_base 10: mod_base = OTHER; note = 2-fluororibose adenine
  modified_base 11: mod_base = OTHER; note = 2-O-methylribose adenine
  modified_base 12: mod_base = gm
  modified_base 13: mod_base = OTHER; note = 2-O-methylribose adenine
  modified_base 14: mod_base = OTHER; note = 2-fluororibose adenine
  modified_base 15: mod_base = cm
  modified_base 16: mod_base = OTHER; note = 2-fluororibose adenine
  modified_base 17: mod_base = cm
  modified_base 18: mod_base = OTHER; note = 2-fluororibose uracil
  modified_base 19: mod_base = gm
  modified_base 20: mod_base = OTHER; note = 2-fluororibose uracil
  modified_base 21: mod_base = um
  modified_base 21..22: mod_base = OTHER; note = S-phosphorothioate
  modified_base 22: mod_base = um
  modified_base 22..23: mod_base = OTHER; note = S-phosphorothioate
  modified_base 23: mod_base = um
  source 1..23: mol_type = other RNA
ttatagagcaagaacactgtttt

SEQ ID NO: 311 - RNA, 23 nt, synthetic construct
  misc_feature 1..23: note = Synthetic: WV-37024
  misc_feature 1..23: note = Synthetic: SSR-0103036
  modified_base 1: mod_base = um
  modified_base 1..2: mod_base = OTHER; note = R-phosphorothioate
  modified_base 2: mod_base = OTHER; note = 2-fluororibose uracil
  modified_base 2..3: mod_base = OTHER; note = R-phosphorothioate
  modified_base 3: mod_base = OTHER; note = 2-O-methylribose adenine
  modified_base 3..4: mod_base = OTHER; note = S-phosphorothioate
  modified_base 4: mod_base = OTHER; note = 2-fluororibose uracil
  modified_base 4..5: mod_base = OTHER; note = R-phosphorothioate
  modified_base 5: mod_base = OTHER; note = 2-O-methylribose adenine
  modified_base 5..6: mod_base = OTHER; note = S-phosphorothioate
  modified_base 6: mod_base = OTHER; note = 2-fluororibose guanine
  modified_base 6..7: mod_base = OTHER; note = S-phosphorothioate
  modified_base 7: mod_base = OTHER; note = 2-O-methylribose adenine
  modified_base 7..8: mod_base = OTHER; note = R-phosphorothioate
  modified_base 8: mod_base = OTHER; note = 2-fluororibose guanine
  modified_base 8..9: mod_base = OTHER; note = S-phosphorothioate
  modified_base 9: mod_base = cm
  modified_base 10: mod_base = OTHER; note = 2-fluororibose adenine
  modified_base 11: mod_base = OTHER; note = 2-O-methylribose adenine
  modified_base 12: mod_base = gm
  modified_base 13: mod_base = OTHER; note = 2-O-methylribose adenine
  modified_base 14: mod_base = OTHER; note = 2-fluororibose adenine
  modified_base 15: mod_base = cm
  modified_base 16: mod_base = OTHER; note = 2-fluororibose adenine
  modified_base 17: mod_base = cm
  modified_base 18: mod_base = OTHER; note = 2-fluororibose uracil
  modified_base 19: mod_base = gm
  modified_base 20: mod_base = OTHER; note = 2-fluororibose uracil
  modified_base 21: mod_base = um
  modified_base 21..22: mod_base = OTHER; note = S-phosphorothioate
  modified_base 22: mod_base = um
  modified_base 22..23: mod_base = OTHER; note = S-phosphorothioate
  modified_base 23: mod_base = um
  source 1..23: mol_type = other RNA
ttatagagcaagaacactgtttt

SEQ ID NO: 312 - RNA, 23 nt, synthetic construct
  misc_feature 1..23: note = Synthetic: WV-37025
  misc_feature 1..23: note = Synthetic: SSR-0103037
  modified_base 1: mod_base = um
  modified_base 1..2: mod_base = OTHER; note = R-phosphorothioate
  modified_base 2: mod_base = OTHER; note = 2-fluororibose uracil
  modified_base 2..3: mod_base = OTHER; note = R-phosphorothioate
  modified_base 3: mod_base = OTHER; note = 2-O-methylribose adenine
  modified_base 3..4: mod_base = OTHER; note = S-phosphorothioate
  modified_base 4: mod_base = OTHER; note = 2-fluororibose uracil
  modified_base 4..5: mod_base = OTHER; note = R-phosphorothioate
  modified_base 5: mod_base = OTHER; note = 2-O-methylribose adenine
  modified_base 5..6: mod_base = OTHER; note = S-phosphorothioate
  modified_base 6: mod_base = OTHER; note = 2-fluororibose guanine
  modified_base 6..7: mod_base = OTHER; note = S-phosphorothioate
  modified_base 7: mod_base = OTHER; note = 2-O-methylribose adenine
  modified_base 7..8: mod_base = OTHER; note = S-phosphorothioate
  modified_base 8: mod_base = OTHER; note = 2-fluororibose guanine
  modified_base 8..9: mod_base = OTHER; note = R-phosphorothioate
  modified_base 9: mod_base = cm
  modified_base 10: mod_base = OTHER; note = 2-fluororibose adenine
  modified_base 11: mod_base = OTHER; note = 2-O-methylribose adenine
  modified_base 12: mod_base = gm
  modified_base 13: mod_base = OTHER; note = 2-O-methylribose adenine
  modified_base 14: mod_base = OTHER; note = 2-fluororibose adenine
  modified_base 15: mod_base = cm
  modified_base 16: mod_base = OTHER; note = 2-fluororibose adenine
  modified_base 17: mod_base = cm
  modified_base 18: mod_base = OTHER; note = 2-fluororibose uracil
  modified_base 19: mod_base = gm
  modified_base 20: mod_base = OTHER; note = 2-fluororibose uracil
  modified_base 21: mod_base = um
  modified_base 21..22: mod_base = OTHER; note = S-phosphorothioate
  modified_base 22: mod_base = um
  modified_base 22..23: mod_base = OTHER; note = S-phosphorothioate
  modified_base 23: mod_base = um
  source 1..23: mol_type = other RNA
ttatagagcaagaacactgtttt

SEQ ID NO: 313 - RNA, 23 nt, synthetic construct
  misc_feature 1..23: note = Synthetic: WV-37026
  misc_feature 1..23: note = Synthetic: SSR-0103038
  modified_base 1: mod_base = um
  modified_base 1..2: mod_base = OTHER; note = R-phosphorothioate
  modified_base 2: mod_base = OTHER; note = 2-fluororibose uracil
  modified_base 2..3: mod_base = OTHER; note = R-phosphorothioate
  modified_base 3: mod_base = OTHER; note = 2-O-methylribose adenine
  modified_base 3..4: mod_base = OTHER; note = S-phosphorothioate
  modified_base 4: mod_base = OTHER; note = 2-fluororibose uracil
  modified_base 4..5: mod_base = OTHER; note = R-phosphorothioate
  modified_base 5: mod_base = OTHER; note = 2-O-methylribose adenine
  modified_base 5..6: mod_base = OTHER; note = S-phosphorothioate
  modified_base 6: mod_base = OTHER; note = 2-fluororibose guanine
  modified_base 6..7: mod_base = OTHER; note = S-phosphorothioate
  modified_base 7: mod_base = OTHER; note = 2-O-methylribose adenine
  modified_base 7..8: mod_base = OTHER; note = S-phosphorothioate
  modified_base 8: mod_base = OTHER; note = 2-fluororibose guanine
  modified_base 8..9: mod_base = OTHER; note = S-phosphorothioate
  modified_base 9: mod_base = cm
  modified_base 10: mod_base = OTHER; note = 2-fluororibose adenine
  modified_base 11: mod_base = OTHER; note = 2-O-methylribose adenine
  modified_base 12: mod_base = gm
  modified_base 13: mod_base = OTHER; note = 2-O-methylribose adenine
  modified_base 14: mod_base = OTHER; note = 2-fluororibose adenine
  modified_base 15: mod_base = cm
  modified_base 16: mod_base = OTHER; note = 2-fluororibose adenine
  modified_base 17: mod_base = cm
  modified_base 18: mod_base = OTHER; note = 2-fluororibose uracil
  modified_base 19: mod_base = gm
  modified_base 20: mod_base = OTHER; note = 2-fluororibose uracil
  modified_base 21: mod_base = um
  modified_base 21..22: mod_base = OTHER; note = S-phosphorothioate
  modified_base 22: mod_base = um
  modified_base 22..23: mod_base = OTHER; note = S-phosphorothioate
  modified_base 23: mod_base = um
  source 1..23: mol_type = other RNA
ttatagagcaagaacactgtttt

SEQ ID NO: 314 - RNA, 23 nt, synthetic construct
  misc_feature 1..23: note = Synthetic: WV-37027
  misc_feature 1..23: note = Synthetic: SSR-0103039
  modified_base 1: mod_base = um
  modified_base 1..2: mod_base = OTHER; note = R-phosphorothioate
  modified_base 2: mod_base = OTHER; note = 2-fluororibose uracil
  modified_base 2..3: mod_base = OTHER; note = R-phosphorothioate
  modified_base 3: mod_base = OTHER; note = 2-O-methylribose adenine
  modified_base 3..4: mod_base = OTHER; note = S-phosphorothioate
  modified_base 4: mod_base = OTHER; note = 2-fluororibose uracil
  modified_base 4..5: mod_base = OTHER; note = S-phosphorothioate
  modified_base 5: mod_base = OTHER; note = 2-O-methylribose adenine
  modified_base 5..6: mod_base = OTHER; note = R-phosphorothioate
  modified_base 6: mod_base = OTHER; note = 2-fluororibose guanine
  modified_base 6..7: mod_base = OTHER; note = R-phosphorothioate
  modified_base 7: mod_base = OTHER; note = 2-O-methylribose adenine
  modified_base 7..8: mod_base = OTHER; note = R-phosphorothioate
  modified_base 8: mod_base = OTHER; note = 2-fluororibose guanine
  modified_base 8..9: mod_base = OTHER; note = R-phosphorothioate
  modified_base 9: mod_base = cm
  modified_base 10: mod_base = OTHER; note = 2-fluororibose adenine
  modified_base 11: mod_base = OTHER; note = 2-O-methylribose adenine
  modified_base 12: mod_base = gm
  modified_base 13: mod_base = OTHER; note = 2-O-methylribose adenine
  modified_base 14: mod_base = OTHER; note = 2-fluororibose adenine
  modified_base 15: mod_base = cm
  modified_base 16: mod_base = OTHER; note = 2-fluororibose adenine
  modified_base 17: mod_base = cm
  modified_base 18: mod_base = OTHER; note = 2-fluororibose uracil
  modified_base 19: mod_base = gm
  modified_base 20: mod_base = OTHER; note = 2-fluororibose uracil
  modified_base 21: mod_base = um
  modified_base 21..22: mod_base = OTHER; note = S-phosphorothioate
  modified_base 22: mod_base = um
  modified_base 22..23: mod_base = OTHER; note = S-phosphorothioate
  modified_base 23: mod_base = um
  source 1..23: mol_type = other RNA
ttatagagcaagaacactgtttt

SEQ ID NO: 315 - RNA, 23 nt, synthetic construct
  misc_feature 1..23: note = Synthetic: WV-37028
  misc_feature 1..23: note = Synthetic: SSR-0103040
  modified_base 1: mod_base = um
  modified_base 1..2: mod_base = OTHER; note = R-phosphorothioate
  modified_base 2: mod_base = OTHER; note = 2-fluororibose uracil
  modified_base 2..3: mod_base = OTHER; note = R-phosphorothioate
  modified_base 3: mod_base = OTHER; note = 2-O-methylribose adenine
  modified_base 3..4: mod_base = OTHER; note = S-phosphorothioate
  modified_base 4: mod_base = OTHER; note = 2-fluororibose uracil
  modified_base 4..5: mod_base = OTHER; note = S-phosphorothioate
  modified_base 5: mod_base = OTHER; note = 2-O-methylribose adenine
  modified_base 5..6: mod_base = OTHER; note = R-phosphorothioate
  modified_base 6: mod_base = OTHER; note = 2-fluororibose guanine
  modified_base 6..7: mod_base = OTHER; note = R-phosphorothioate
  modified_base 7: mod_base = OTHER; note = 2-O-methylribose adenine
  modified_base 7..8: mod_base = OTHER; note = R-phosphorothioate
  modified_base 8: mod_base = OTHER; note = 2-fluororibose guanine
  modified_base 8..9: mod_base = OTHER; note = S-phosphorothioate
  modified_base 9: mod_base = cm
  modified_base 10: mod_base = OTHER; note = 2-fluororibose adenine
  modified_base 11: mod_base = OTHER; note = 2-O-methylribose adenine
  modified_base 12: mod_base = gm
  modified_base 13: mod_base = OTHER; note = 2-O-methylribose adenine
  modified_base 14: mod_base = OTHER; note = 2-fluororibose adenine
  modified_base 15: mod_base = cm
  modified_base 16: mod_base = OTHER; note = 2-fluororibose adenine
  modified_base 17: mod_base = cm
  modified_base 18: mod_base = OTHER; note = 2-fluororibose uracil
  modified_base 19: mod_base = gm
  modified_base 20: mod_base = OTHER; note = 2-fluororibose uracil
  modified_base 21: mod_base = um
  modified_base 21..22: mod_base = OTHER; note = S-phosphorothioate
  modified_base 22: mod_base = um
  modified_base 22..23: mod_base = OTHER; note = S-phosphorothioate
  modified_base 23: mod_base = um
  source 1..23: mol_type = other RNA
ttatagagcaagaacactgtttt

SEQ ID NO: 316 - RNA, 23 nt, synthetic construct
  misc_feature 1..23: note = Synthetic: WV-37029
  misc_feature 1..23: note = Synthetic: SSR-0103041
  modified_base 1: mod_base = um
  modified_base 1..2: mod_base = OTHER; note = R-phosphorothioate
  modified_base 2: mod_base = OTHER; note = 2-fluororibose uracil
  modified_base 2..3: mod_base = OTHER; note = R-phosphorothioate
  modified_base 3: mod_base = OTHER; note = 2-O-methylribose adenine
  modified_base 3..4: mod_base = OTHER; note = S-phosphorothioate
  modified_base 4: mod_base = OTHER; note = 2-fluororibose uracil
  modified_base 4..5: mod_base = OTHER; note = S-phosphorothioate
  modified_base 5: mod_base = OTHER; note = 2-O-methylribose adenine
  modified_base 5..6: mod_base = OTHER; note = R-phosphorothioate
  modified_base 6: mod_base = OTHER; note = 2-fluororibose guanine
  modified_base 6..7: mod_base = OTHER; note = R-phosphorothioate
  modified_base 7: mod_base = OTHER; note = 2-O-methylribose adenine
  modified_base 7..8: mod_base = OTHER; note = S-phosphorothioate
  modified_base 8: mod_base = OTHER; note = 2-fluororibose guanine
  modified_base 8..9: mod_base = OTHER; note = R-phosphorothioate
  modified_base 9: mod_base = cm
  modified_base 10: mod_base = OTHER; note = 2-fluororibose adenine
  modified_base 11: mod_base = OTHER; note = 2-O-methylribose adenine
  modified_base 12: mod_base = gm
  modified_base 13: mod_base = OTHER; note = 2-O-methylribose adenine
  modified_base 14: mod_base = OTHER; note = 2-fluororibose adenine
  modified_base 15: mod_base = cm
  modified_base 16: mod_base = OTHER; note = 2-fluororibose adenine
  modified_base 17: mod_base = cm
  modified_base 18: mod_base = OTHER; note = 2-fluororibose uracil
  modified_base 19: mod_base = gm
  modified_base 20: mod_base = OTHER; note = 2-fluororibose uracil
  modified_base 21: mod_base = um
  modified_base 21..22: mod_base = OTHER; note = S-phosphorothioate
  modified_base 22: mod_base = um
  modified_base 22..23: mod_base = OTHER; note = S-phosphorothioate
  modified_base 23: mod_base = um
  source 1..23: mol_type = other RNA
ttatagagcaagaacactgtttt

SEQ ID NO: 317 - RNA, 23 nt, synthetic construct
  misc_feature 1..23: note = Synthetic: WV-37030
  misc_feature 1..23: note = Synthetic: SSR-0103042
  modified_base 1: mod_base = um
  modified_base 1..2: mod_base = OTHER; note = R-phosphorothioate
  modified_base 2: mod_base = OTHER; note = 2-fluororibose uracil
  modified_base 2..3: mod_base = OTHER; note = R-phosphorothioate
  modified_base 3: mod_base = OTHER; note = 2-O-methylribose adenine
  modified_base 3..4: mod_base = OTHER; note = S-phosphorothioate
  modified_base 4: mod_base = OTHER; note = 2-fluororibose uracil
  modified_base 4..5: mod_base = OTHER; note = S-phosphorothioate
  modified_base 5: mod_base = OTHER; note = 2-O-methylribose adenine
  modified_base 5..6: mod_base = OTHER; note = R-phosphorothioate
  modified_base 6: mod_base = OTHER; note = 2-fluororibose guanine
  modified_base 6..7: mod_base = OTHER; note = R-phosphorothioate
  modified_base 7: mod_base = OTHER; note = 2-O-methylribose adenine
  modified_base 7..8: mod_base = OTHER; note = S-phosphorothioate
  modified_base 8: mod_base = OTHER; note = 2-fluororibose guanine
  modified_base 8..9: mod_base = OTHER; note = S-phosphorothioate
  modified_base 9: mod_base = cm
  modified_base 10: mod_base = OTHER; note = 2-fluororibose adenine
  modified_base 11: mod_base = OTHER; note = 2-O-methylribose adenine
  modified_base 12: mod_base = gm
  modified_base 13: mod_base = OTHER; note = 2-O-methylribose adenine
  modified_base 14: mod_base = OTHER; note = 2-fluororibose adenine
  modified_base 15: mod_base = cm
  modified_base 16: mod_base = OTHER; note = 2-fluororibose adenine
  modified_base 17: mod_base = cm
  modified_base 18: mod_base = OTHER; note = 2-fluororibose uracil
  modified_base 19: mod_base = gm
  modified_base 20: mod_base = OTHER; note = 2-fluororibose uracil
  modified_base 21: mod_base = um
  modified_base 21..22: mod_base = OTHER; note = S-phosphorothioate
  modified_base 22: mod_base = um
  modified_base 22..23: mod_base = OTHER; note = S-phosphorothioate
  modified_base 23: mod_base = um
  source 1..23: mol_type = other RNA
ttatagagcaagaacactgtttt

SEQ ID NO: 318 - RNA, 23 nt, synthetic construct
  misc_feature 1..23: note = Synthetic: WV-37031
  misc_feature 1..23: note = Synthetic: SSR-0103043
  modified_base 1: mod_base = um
  modified_base 1..2: mod_base = OTHER; note = R-phosphorothioate
  modified_base 2: mod_base = OTHER; note = 2-fluororibose uracil
  modified_base 2..3: mod_base = OTHER; note = R-phosphorothioate
  modified_base 3: mod_base = OTHER; note = 2-O-methylribose adenine
  modified_base 3..4: mod_base = OTHER; note = S-phosphorothioate
  modified_base 4: mod_base = OTHER; note = 2-fluororibose uracil
  modified_base 4..5: mod_base = OTHER; note = S-phosphorothioate
  modified_base 5: mod_base = OTHER; note = 2-O-methylribose adenine
  modified_base 5..6: mod_base = OTHER; note = R-phosphorothioate
  modified_base 6: mod_base = OTHER; note = 2-fluororibose guanine
  modified_base 6..7: mod_base = OTHER; note = S-phosphorothioate
  modified_base 7: mod_base = OTHER; note = 2-O-methylribose adenine
  modified_base 7..8: mod_base = OTHER; note = R-phosphorothioate
  modified_base 8: mod_base = OTHER; note = 2-fluororibose guanine
  modified_base 8..9: mod_base = OTHER; note = R-phosphorothioate
  modified_base 9: mod_base = cm
  modified_base 10: mod_base = OTHER; note = 2-fluororibose adenine
  modified_base 11: mod_base = OTHER; note = 2-O-methylribose adenine
  modified_base 12: mod_base = gm
  modified_base 13: mod_base = OTHER; note = 2-O-methylribose adenine
  modified_base 14: mod_base = OTHER; note = 2-fluororibose adenine
  modified_base 15: mod_base = cm
  modified_base 16: mod_base = OTHER; note = 2-fluororibose adenine
  modified_base 17: mod_base = cm
  modified_base 18: mod_base = OTHER; note = 2-fluororibose uracil
  modified_base 19: mod_base = gm
  modified_base 20: mod_base = OTHER; note = 2-fluororibose uracil
  modified_base 21: mod_base = um
  modified_base 21..22: mod_base = OTHER; note = S-phosphorothioate
  modified_base 22: mod_base = um
  modified_base 22..23: mod_base = OTHER; note = S-phosphorothioate
  modified_base 23: mod_base = um
  source 1..23: mol_type = other RNA
ttatagagcaagaacactgtttt

SEQ ID NO: 319 - RNA, 23 nt, synthetic construct
  misc_feature 1..23: note = Synthetic: WV-37032
  misc_feature 1..23: note = Synthetic: SSR-0103044
  modified_base 1: mod_base = um
  modified_base 1..2: mod_base = OTHER; note = R-phosphorothioate
  modified_base 2: mod_base = OTHER; note = 2-fluororibose uracil
  modified_base 2..3: mod_base = OTHER; note = R-phosphorothioate
  modified_base 3: mod_base = OTHER; note = 2-O-methylribose adenine
  modified_base 3..4: mod_base = OTHER; note = S-phosphorothioate
  modified_base 4: mod_base = OTHER; note = 2-fluororibose uracil
  modified_base 4..5: mod_base = OTHER; note = S-phosphorothioate
  modified_base 5: mod_base = OTHER; note = 2-O-methylribose adenine
  modified_base 5..6: mod_base = OTHER; note = R-phosphorothioate
  modified_base 6: mod_base = OTHER; note = 2-fluororibose guanine
  modified_base 6..7: mod_base = OTHER; note = S-phosphorothioate
  modified_base 7: mod_base = OTHER; note = 2-O-methylribose adenine
  modified_base 7..8: mod_base = OTHER; note = R-phosphorothioate
  modified_base 8: mod_base = OTHER; note = 2-fluororibose guanine
  modified_base 8..9: mod_base = OTHER; note = S-phosphorothioate
  modified_base 9: mod_base = cm
  modified_base 10: mod_base = OTHER; note = 2-fluororibose adenine
  modified_base 11: mod_base = OTHER; note = 2-O-methylribose adenine
  modified_base 12: mod_base = gm
  modified_base 13: mod_base = OTHER; note = 2-O-methylribose adenine
  modified_base 14: mod_base = OTHER; note = 2-fluororibose adenine
  modified_base 15: mod_base = cm
  modified_base 16: mod_base = OTHER; note = 2-fluororibose adenine
  modified_base 17: mod_base = cm
  modified_base 18: mod_base = OTHER; note = 2-fluororibose uracil
  modified_base 19: mod_base = gm
  modified_base 20: mod_base = OTHER; note = 2-fluororibose uracil
  modified_base 21: mod_base = um
  modified_base 21..22: mod_base = OTHER; note = S-phosphorothioate
  modified_base 22: mod_base = um
  modified_base 22..23: mod_base = OTHER; note = S-phosphorothioate
  modified_base 23: mod_base = um
  source 1..23: mol_type = other RNA
ttatagagcaagaacactgtttt

SEQ ID NO: 320 - RNA, 23 nt, synthetic construct
  misc_feature 1..23: note = Synthetic: WV-37033
  misc_feature 1..23: note = Synthetic: SSR-0103045
  modified_base 1: mod_base = um
  modified_base 1..2: mod_base = OTHER; note = R-phosphorothioate
  modified_base 2: mod_base = OTHER; note = 2-fluororibose uracil
  modified_base 2..3: mod_base = OTHER; note = R-phosphorothioate
  modified_base 3: mod_base = OTHER; note = 2-O-methylribose adenine
  modified_base 3..4: mod_base = OTHER; note = S-phosphorothioate
  modified_base 4: mod_base = OTHER; note = 2-fluororibose uracil
  modified_base 4..5: mod_base = OTHER; note = S-phosphorothioate
  modified_base 5: mod_base = OTHER; note = 2-O-methylribose adenine
  modified_base 5..6: mod_base = OTHER; note = R-phosphorothioate
  modified_base 6: mod_base = OTHER; note = 2-fluororibose guanine
  modified_base 6..7: mod_base = OTHER; note = S-phosphorothioate
  modified_base 7: mod_base = OTHER; note = 2-O-methylribose adenine
  modified_base 7..8: mod_base = OTHER; note = S-phosphorothioate
  modified_base 8: mod_base = OTHER; note = 2-fluororibose guanine
  modified_base 8..9: mod_base = OTHER; note = R-phosphorothioate
  modified_base 9: mod_base = cm
  modified_base 10: mod_base = OTHER; note = 2-fluororibose adenine
  modified_base 11: mod_base = OTHER; note = 2-O-methylribose adenine
  modified_base 12: mod_base = gm
  modified_base 13: mod_base = OTHER; note = 2-O-methylribose adenine
  modified_base 14: mod_base = OTHER; note = 2-fluororibose adenine
  modified_base 15: mod_base = cm
  modified_base 16: mod_base = OTHER; note = 2-fluororibose adenine
  modified_base 17: mod_base = cm
  modified_base 18: mod_base = OTHER; note = 2-fluororibose uracil
  modified_base 19: mod_base = gm
  modified_base 20: mod_base = OTHER; note = 2-fluororibose uracil
  modified_base 21: mod_base = um
  modified_base 21..22: mod_base = OTHER; note = S-phosphorothioate
  modified_base 22: mod_base = um
  modified_base 22..23: mod_base = OTHER; note = S-phosphorothioate
  modified_base 23: mod_base = um
  source 1..23: mol_type = other RNA
ttatagagcaagaacactgtttt

SEQ ID NO: 321 - RNA, 23 nt, synthetic construct
  misc_feature 1..23: note = Synthetic: WV-37034
  misc_feature 1..23: note = Synthetic: SSR-0103046
  modified_base 1: mod_base = um
  modified_base 1..2: mod_base = OTHER; note = R-phosphorothioate
  modified_base 2: mod_base = OTHER; note = 2-fluororibose uracil
  modified_base 2..3: mod_base = OTHER; note = R-phosphorothioate
  modified_base 3: mod_base = OTHER; note = 2-O-methylribose adenine
  modified_base 3..4: mod_base = OTHER; note = S-phosphorothioate
  modified_base 4: mod_base = OTHER; note = 2-fluororibose uracil
  modified_base 4..5: mod_base = OTHER; note = S-phosphorothioate
  modified_base 5: mod_base = OTHER; note = 2-O-methylribose adenine
  modified_base 5..6: mod_base = OTHER; note = R-phosphorothioate
  modified_base 6: mod_base = OTHER; note = 2-fluororibose guanine
  modified_base 6..7: mod_base = OTHER; note = S-phosphorothioate
  modified_base 7: mod_base = OTHER; note = 2-O-methylribose adenine
  modified_base 7..8: mod_base = OTHER; note = S-phosphorothioate
  modified_base 8: mod_base = OTHER; note = 2-fluororibose guanine
  modified_base 8..9: mod_base = OTHER; note = S-phosphorothioate
  modified_base 9: mod_base = cm
  modified_base 10: mod_base = OTHER; note = 2-fluororibose adenine
  modified_base 11: mod_base = OTHER; note = 2-O-methylribose adenine
  modified_base 12: mod_base = gm
  modified_base 13: mod_base = OTHER; note = 2-O-methylribose adenine
  modified_base 14: mod_base = OTHER; note = 2-fluororibose adenine
  modified_base 15: mod_base = cm
  modified_base 16: mod_base = OTHER; note = 2-fluororibose adenine
  modified_base 17: mod_base = cm
  modified_base 18: mod_base = OTHER; note = 2-fluororibose uracil
  modified_base 19: mod_base = gm
  modified_base 20: mod_base = OTHER; note = 2-fluororibose uracil
  modified_base 21: mod_base = um
  modified_base 21..22: mod_base = OTHER; note = S-phosphorothioate
  modified_base 22: mod_base = um
  modified_base 22..23: mod_base = OTHER; note = S-phosphorothioate
  modified_base 23: mod_base = um
  source 1..23: mol_type = other RNA
ttatagagcaagaacactgtttt

SEQ ID NO: 322 - RNA, 23 nt, synthetic construct
  misc_feature 1..23: note = Synthetic: WV-37035
  misc_feature 1..23: note = Synthetic: SSR-0103047
  modified_base 1: mod_base = um
  modified_base 1..2: mod_base = OTHER; note = R-phosphorothioate
  modified_base 2: mod_base = OTHER; note = 2-fluororibose uracil
  modified_base 2..3: mod_base = OTHER; note = R-phosphorothioate
  modified_base 3: mod_base = OTHER; note = 2-O-methylribose adenine
  modified_base 3..4: mod_base = OTHER; note = S-phosphorothioate
  modified_base 4: mod_base = OTHER; note = 2-fluororibose uracil
  modified_base 4..5: mod_base = OTHER; note = S-phosphorothioate
  modified_base 5: mod_base = OTHER; note = 2-O-methylribose adenine
  modified_base 5..6: mod_base = OTHER; note = S-phosphorothioate
  modified_base 6: mod_base = OTHER; note = 2-fluororibose guanine
  modified_base 6..7: mod_base = OTHER; note = R-phosphorothioate
  modified_base 7: mod_base = OTHER; note = 2-O-methylribose adenine
  modified_base 7..8: mod_base = OTHER; note = R-phosphorothioate
  modified_base 8: mod_base = OTHER; note = 2-fluororibose guanine
  modified_base 8..9: mod_base = OTHER; note = R-phosphorothioate
  modified_base 9: mod_base = cm
  modified_base 10: mod_base = OTHER; note = 2-fluororibose adenine
  modified_base 11: mod_base = OTHER; note = 2-O-methylribose adenine
  modified_base 12: mod_base = gm
  modified_base 13: mod_base = OTHER; note = 2-O-methylribose adenine
  modified_base 14: mod_base = OTHER; note = 2-fluororibose adenine
  modified_base 15: mod_base = cm
  modified_base 16: mod_base = OTHER; note = 2-fluororibose adenine
  modified_base 17: mod_base = cm
  modified_base 18: mod_base = OTHER; note = 2-fluororibose uracil
  modified_base 19: mod_base = gm
  modified_base 20: mod_base = OTHER; note = 2-fluororibose uracil
  modified_base 21: mod_base = um
  modified_base 21..22: mod_base = OTHER; note = S-phosphorothioate
  modified_base 22: mod_base = um
  modified_base 22..23: mod_base = OTHER; note = S-phosphorothioate
  modified_base 23: mod_base = um
  source 1..23: mol_type = other RNA
ttatagagcaagaacactgtttt

SEQ ID NO: 323 - RNA, 23 nt, synthetic construct
  misc_feature 1..23: note = Synthetic: WV-37036
  misc_feature 1..23: note = Synthetic: SSR-0103048
  modified_base 1: mod_base = um
  modified_base 1..2: mod_base = OTHER; note = R-phosphorothioate
  modified_base 2: mod_base = OTHER; note = 2-fluororibose uracil
  modified_base 2..3: mod_base = OTHER; note = R-phosphorothioate
  modified_base 3: mod_base = OTHER; note = 2-O-methylribose adenine
  modified_base 3..4: mod_base = OTHER; note = S-phosphorothioate
  modified_base 4: mod_base = OTHER; note = 2-fluororibose uracil
  modified_base 4..5: mod_base = OTHER; note = S-phosphorothioate
  modified_base 5: mod_base = OTHER; note = 2-O-methylribose adenine
  modified_base 5..6: mod_base = OTHER; note = S-phosphorothioate
  modified_base 6: mod_base = OTHER; note = 2-fluororibose guanine
  modified_base 6..7: mod_base = OTHER; note = R-phosphorothioate
  modified_base 7: mod_base = OTHER; note = 2-O-methylribose adenine
  modified_base 7..8: mod_base = OTHER; note = R-phosphorothioate
  modified_base 8: mod_base = OTHER; note = 2-fluororibose guanine
  modified_base 8..9: mod_base = OTHER; note = S-phosphorothioate
  modified_base 9: mod_base = cm
  modified_base 10: mod_base = OTHER; note = 2-fluororibose adenine
  modified_base 11: mod_base = OTHER; note = 2-O-methylribose adenine
  modified_base 12: mod_base = gm
  modified_base 13: mod_base = OTHER; note = 2-O-methylribose adenine
  modified_base 14: mod_base = OTHER; note = 2-fluororibose adenine
  modified_base 15: mod_base = cm
  modified_base 16: mod_base = OTHER; note = 2-fluororibose adenine
  modified_base 17: mod_base = cm
  modified_base 18: mod_base = OTHER; note = 2-fluororibose uracil
  modified_base 19: mod_base = gm
  modified_base 20: mod_base = OTHER; note = 2-fluororibose uracil
  modified_base 21: mod_base = um
  modified_base 21..22: mod_base = OTHER; note = S-phosphorothioate
  modified_base 22: mod_base = um
  modified_base 22..23: mod_base = OTHER; note = S-phosphorothioate
  modified_base 23: mod_base = um
  source 1..23: mol_type = other RNA
ttatagagcaagaacactgtttt

SEQ ID NO: 324 - RNA, 23 nt, synthetic construct
  misc_feature 1..23: note = Synthetic: WV-37037
  misc_feature 1..23: note = Synthetic: SSR-0103049
  modified_base 1: mod_base = um
  modified_base 1..2: mod_base = OTHER; note = R-phosphorothioate
  modified_base 2: mod_base = OTHER; note = 2-fluororibose uracil
  modified_base 2..3: mod_base = OTHER; note = R-phosphorothioate
  modified_base 3: mod_base = OTHER; note = 2-O-methylribose adenine
  modified_base 3..4: mod_base = OTHER; note = S-phosphorothioate
  modified_base 4: mod_base = OTHER; note = 2-fluororibose uracil
  modified_base 4..5: mod_base = OTHER; note = S-phosphorothioate
  modified_base 5: mod_base = OTHER; note = 2-O-methylribose adenine
  modified_base 5..6: mod_base = OTHER; note = S-phosphorothioate
  modified_base 6: mod_base = OTHER; note = 2-fluororibose guanine
  modified_base 6..7: mod_base = OTHER; note = R-phosphorothioate
  modified_base 7: mod_base = OTHER; note = 2-O-methylribose adenine
  modified_base 7..8: mod_base = OTHER; note = S-phosphorothioate
  modified_base 8: mod_base = OTHER; note = 2-fluororibose guanine
  modified_base 8..9: mod_base = OTHER; note = R-phosphorothioate
  modified_base 9: mod_base = cm
  modified_base 10: mod_base = OTHER; note = 2-fluororibose adenine
  modified_base 11: mod_base = OTHER; note = 2-O-methylribose adenine
  modified_base 12: mod_base = gm
  modified_base 13: mod_base = OTHER; note = 2-O-methylribose adenine
  modified_base 14: mod_base = OTHER; note = 2-fluororibose adenine
  modified_base 15: mod_base = cm
  modified_base 16: mod_base = OTHER; note = 2-fluororibose adenine
  modified_base 17: mod_base = cm
  modified_base 18: mod_base = OTHER; note = 2-fluororibose uracil
  modified_base 19: mod_base = gm
  modified_base 20: mod_base = OTHER; note = 2-fluororibose uracil
  modified_base 21: mod_base = um
  modified_base 21..22: mod_base = OTHER; note = S-phosphorothioate
  modified_base 22: mod_base = um
  modified_base 22..23: mod_base = OTHER; note = S-phosphorothioate
  modified_base 23: mod_base = um
  source 1..23: mol_type = other RNA
ttatagagcaagaacactgtttt

SEQ ID NO: 325 - RNA, 23 nt, synthetic construct
  misc_feature 1..23: note = Synthetic: WV-37038
  misc_feature 1..23: note = Synthetic: SSR-0103050
  modified_base 1: mod_base = um
  modified_base 1..2: mod_base = OTHER; note = R-phosphorothioate
  modified_base 2: mod_base = OTHER; note = 2-fluororibose uracil
  modified_base 2..3: mod_base = OTHER; note = R-phosphorothioate
  modified_base 3: mod_base = OTHER; note = 2-O-methylribose adenine
  modified_base 3..4: mod_base = OTHER; note = S-phosphorothioate
  modified_base 4: mod_base = OTHER; note = 2-fluororibose uracil
  modified_base 4..5: mod_base = OTHER; note = S-phosphorothioate
  modified_base 5: mod_base = OTHER; note = 2-O-methylribose adenine
  modified_base 5..6: mod_base = OTHER; note = S-phosphorothioate
  modified_base 6: mod_base = OTHER; note = 2-fluororibose guanine
  modified_base 6..7: mod_base = OTHER; note = R-phosphorothioate
  modified_base 7: mod_base = OTHER; note = 2-O-methylribose adenine
  modified_base 7..8: mod_base = OTHER; note = S-phosphorothioate
  modified_base 8: mod_base = OTHER; note = 2-fluororibose guanine
  modified_base 8..9: mod_base = OTHER; note = S-phosphorothioate
  modified_base 9: mod_base = cm
  modified_base 10: mod_base = OTHER; note = 2-fluororibose adenine
  modified_base 11: mod_base = OTHER; note = 2-O-methylribose adenine
  modified_base 12: mod_base = gm
  modified_base 13: mod_base = OTHER; note = 2-O-methylribose adenine
  modified_base 14: mod_base = OTHER; note = 2-fluororibose adenine
  modified_base 15: mod_base = cm
  modified_base 16: mod_base = OTHER; note = 2-fluororibose adenine
  modified_base 17: mod_base = cm
  modified_base 18: mod_base = OTHER; note = 2-fluororibose uracil
  modified_base 19: mod_base = gm
  modified_base 20: mod_base = OTHER; note = 2-fluororibose uracil
  modified_base 21: mod_base = um
  modified_base 21..22: mod_base = OTHER; note = S-phosphorothioate
  modified_base 22: mod_base = um
  modified_base 22..23: mod_base = OTHER; note = S-phosphorothioate
  modified_base 23: mod_base = um
  source 1..23: mol_type = other RNA
ttatagagcaagaacactgtttt

SEQ ID NO: 326 - RNA, 23 nt, synthetic construct
  misc_feature 1..23: note = Synthetic: WV-37039
  misc_feature 1..23: note = Synthetic: SSR-0103051
  modified_base 1: mod_base = um
  modified_base 1..2: mod_base = OTHER; note = R-phosphorothioate
  modified_base 2: mod_base = OTHER; note = 2-fluororibose uracil
  modified_base 2..3: mod_base = OTHER; note = R-phosphorothioate
  modified_base 3: mod_base = OTHER; note = 2-O-methylribose adenine
  modified_base 3..4: mod_base = OTHER; note = S-phosphorothioate
  modified_base 4: mod_base = OTHER; note = 2-fluororibose uracil
  modified_base 4..5: mod_base = OTHER; note = S-phosphorothioate
  modified_base 5: mod_base = OTHER; note = 2-O-methylribose adenine
  modified_base 5..6: mod_base = OTHER; note = S-phosphorothioate
  modified_base 6: mod_base = OTHER; note = 2-fluororibose guanine
  modified_base 6..7: mod_base = OTHER; note = S-phosphorothioate
  modified_base 7: mod_base = OTHER; note = 2-O-methylribose adenine
  modified_base 7..8: mod_base = OTHER; note = R-phosphorothioate
  modified_base 8: mod_base = OTHER; note = 2-fluororibose guanine
  modified_base 8..9: mod_base = OTHER; note = R-phosphorothioate
  modified_base 9: mod_base = cm
  modified_base 10: mod_base = OTHER; note = 2-fluororibose adenine
  modified_base 11: mod_base = OTHER; note = 2-O-methylribose adenine
  modified_base 12: mod_base = gm
  modified_base 13: mod_base = OTHER; note = 2-O-methylribose adenine
  modified_base 14: mod_base = OTHER; note = 2-fluororibose adenine
  modified_base 15: mod_base = cm
  modified_base 16: mod_base = OTHER; note = 2-fluororibose adenine
  modified_base 17: mod_base = cm
  modified_base 18: mod_base = OTHER; note = 2-fluororibose uracil
  modified_base 19: mod_base = gm
  modified_base 20: mod_base = OTHER; note = 2-fluororibose uracil
  modified_base 21: mod_base = um
  modified_base 21..22: mod_base = OTHER; note = S-phosphorothioate
  modified_base 22: mod_base = um
  modified_base 22..23: mod_base = OTHER; note = S-phosphorothioate
  modified_base 23: mod_base = um
  source 1..23: mol_type = other RNA
ttatagagcaagaacactgtttt

SEQ ID NO: 327 - RNA, 23 nt, synthetic construct
  misc_feature 1..23: note = Synthetic: WV-37040
  misc_feature 1..23: note = Synthetic: SSR-0103052
  modified_base 1: mod_base = um
  modified_base 1..2: mod_base = OTHER; note = R-phosphorothioate
  modified_base 2: mod_base = OTHER; note = 2-fluororibose uracil
  modified_base 2..3: mod_base = OTHER; note = R-phosphorothioate
  modified_base 3: mod_base = OTHER; note = 2-O-methylribose adenine
  modified_base 3..4: mod_base = OTHER; note = S-phosphorothioate
  modified_base 4: mod_base = OTHER; note = 2-fluororibose uracil
  modified_base 4..5: mod_base = OTHER; note = S-phosphorothioate
  modified_base 5: mod_base = OTHER; note = 2-O-methylribose adenine
  modified_base 5..6: mod_base = OTHER; note = S-phosphorothioate
  modified_base 6: mod_base = OTHER; note = 2-fluororibose guanine
  modified_base 6..7: mod_base = OTHER; note = S-phosphorothioate
  modified_base 7: mod_base = OTHER; note = 2-O-methylribose adenine
  modified_base 7..8: mod_base = OTHER; note = R-phosphorothioate
  modified_base 8: mod_base = OTHER; note = 2-fluororibose guanine
  modified_base 8..9: mod_base = OTHER; note = S-phosphorothioate
  modified_base 9: mod_base = cm
  modified_base 10: mod_base = OTHER; note = 2-fluororibose adenine
  modified_base 11: mod_base = OTHER; note = 2-O-methylribose adenine
  modified_base 12: mod_base = gm
  modified_base 13: mod_base = OTHER; note = 2-O-methylribose adenine
  modified_base 14: mod_base = OTHER; note = 2-fluororibose adenine
  modified_base 15: mod_base = cm
  modified_base 16: mod_base = OTHER; note = 2-fluororibose adenine
  modified_base 17: mod_base = cm
  modified_base 18: mod_base = OTHER; note = 2-fluororibose uracil
  modified_base 19: mod_base = gm
  modified_base 20: mod_base = OTHER; note = 2-fluororibose uracil
  modified_base 21: mod_base = um
  modified_base 21..22: mod_base = OTHER; note = S-phosphorothioate
  modified_base 22: mod_base = um
  modified_base 22..23: mod_base = OTHER; note = S-phosphorothioate
  modified_base 23: mod_base = um
  source 1..23: mol_type = other RNA
ttatagagcaagaacactgtttt

SEQ ID NO: 328 - RNA, 23 nt, synthetic construct
  misc_feature 1..23: note = Synthetic: WV-37041
  misc_feature 1..23: note = Synthetic: SSR-0103053
  modified_base 1: mod_base = um
  modified_base 1..2: mod_base = OTHER; note = R-phosphorothioate
  modified_base 2: mod_base = OTHER; note = 2-fluororibose uracil
  modified_base 2..3: mod_base = OTHER; note = R-phosphorothioate
  modified_base 3: mod_base = OTHER; note = 2-O-methylribose adenine
  modified_base 3..4: mod_base = OTHER; note = S-phosphorothioate
  modified_base 4: mod_base = OTHER; note = 2-fluororibose uracil
  modified_base 4..5: mod_base = OTHER; note = S-phosphorothioate
  modified_base 5: mod_base = OTHER; note = 2-O-methylribose adenine
  modified_base 5..6: mod_base = OTHER; note = S-phosphorothioate
  modified_base 6: mod_base = OTHER; note = 2-fluororibose guanine
  modified_base 6..7: mod_base = OTHER; note = S-phosphorothioate
  modified_base 7: mod_base = OTHER; note = 2-O-methylribose adenine
  modified_base 7..8: mod_base = OTHER; note = S-phosphorothioate
  modified_base 8: mod_base = OTHER; note = 2-fluororibose guanine
  modified_base 8..9: mod_base = OTHER; note = R-phosphorothioate
  modified_base 9: mod_base = cm
  modified_base 10: mod_base = OTHER; note = 2-fluororibose adenine
  modified_base 11: mod_base = OTHER; note = 2-O-methylribose adenine
  modified_base 12: mod_base = gm
  modified_base 13: mod_base = OTHER; note = 2-O-methylribose adenine
  modified_base 14: mod_base = OTHER; note = 2-fluororibose adenine
  modified_base 15: mod_base = cm
  modified_base 16: mod_base = OTHER; note = 2-fluororibose adenine
  modified_base 17: mod_base = cm
  modified_base 18: mod_base = OTHER; note = 2-fluororibose uracil
  modified_base 19: mod_base = gm
  modified_base 20: mod_base = OTHER; note = 2-fluororibose uracil
  modified_base 21: mod_base = um
  modified_base 21..22: mod_base = OTHER; note = S-phosphorothioate
  modified_base 22: mod_base = um
  modified_base 22..23: mod_base = OTHER; note = S-phosphorothioate
  modified_base 23: mod_base = um
  source 1..23: mol_type = other RNA
ttatagagcaagaacactgtttt

SEQ ID NO: 329 - RNA, 23 nt, synthetic construct
  misc_feature 1..23: note = Synthetic: WV-37042
  misc_feature 1..23: note = Synthetic: SSR-0103054
  modified_base 1: mod_base = um
  modified_base 1..2: mod_base = OTHER; note = R-phosphorothioate
  modified_base 2: mod_base = OTHER; note = 2-fluororibose uracil
  modified_base 2..3: mod_base = OTHER; note = R-phosphorothioate
  modified_base 3: mod_base = OTHER; note = 2-O-methylribose adenine
  modified_base 3..4: mod_base = OTHER; note = S-phosphorothioate
  modified_base 4: mod_base = OTHER; note = 2-fluororibose uracil
  modified_base 4..5: mod_base = OTHER; note = S-phosphorothioate
  modified_base 5: mod_base = OTHER; note = 2-O-methylribose adenine
  modified_base 5..6: mod_base = OTHER; note = S-phosphorothioate
  modified_base 6: mod_base = OTHER; note = 2-fluororibose guanine
  modified_base 6..7: mod_base = OTHER; note = S-phosphorothioate
  modified_base 7: mod_base = OTHER; note = 2-O-methylribose adenine
  modified_base 7..8: mod_base = OTHER; note = S-phosphorothioate
  modified_base 8: mod_base = OTHER; note = 2-fluororibose guanine
  modified_base 8..9: mod_base = OTHER; note = S-phosphorothioate
  modified_base 9: mod_base = cm
  modified_base 10: mod_base = OTHER; note = 2-fluororibose adenine
  modified_base 11: mod_base = OTHER; note = 2-O-methylribose adenine
  modified_base 12: mod_base = gm
  modified_base 13: mod_base = OTHER; note = 2-O-methylribose adenine
  modified_base 14: mod_base = OTHER; note = 2-fluororibose adenine
  modified_base 15: mod_base = cm
  modified_base 16: mod_base = OTHER; note = 2-fluororibose adenine
  modified_base 17: mod_base = cm
  modified_base 18: mod_base = OTHER; note = 2-fluororibose uracil
  modified_base 19: mod_base = gm
  modified_base 20: mod_base = OTHER; note = 2-fluororibose uracil
  modified_base 21: mod_base = um
  modified_base 21..22: mod_base = OTHER; note = S-phosphorothioate
  modified_base 22: mod_base = um
  modified_base 22..23: mod_base = OTHER; note = S-phosphorothioate
  modified_base 23: mod_base = um
  source 1..23: mol_type = other RNA
ttatagagcaagaacactgtttt

SEQ ID NO: 330 - RNA, 23 nt, synthetic construct
  misc_feature 1..23: note = Synthetic: WV-37043
  misc_feature 1..23: note = Synthetic: SSR-0103055
  modified_base 1: mod_base = um
  modified_base 1..2: mod_base = OTHER; note = R-phosphorothioate
  modified_base 2: mod_base = OTHER; note = 2-fluororibose uracil
  modified_base 2..3: mod_base = OTHER; note = S-phosphorothioate
  modified_base 3: mod_base = OTHER; note = 2-O-methylribose adenine
  modified_base 3..4: mod_base = OTHER; note = R-phosphorothioate
  modified_base 4: mod_base = OTHER; note = 2-fluororibose uracil
  modified_base 4..5: mod_base = OTHER; note = R-phosphorothioate
  modified_base 5: mod_base = OTHER; note = 2-O-methylribose adenine
  modified_base 5..6: mod_base = OTHER; note = R-phosphorothioate
  modified_base 6: mod_base = OTHER; note = 2-fluororibose guanine
  modified_base 6..7: mod_base = OTHER; note = R-phosphorothioate
  modified_base 7: mod_base = OTHER; note = 2-O-methylribose adenine
  modified_base 7..8: mod_base = OTHER; note = R-phosphorothioate
  modified_base 8: mod_base = OTHER; note = 2-fluororibose guanine
  modified_base 8..9: mod_base = OTHER; note = R-phosphorothioate
  modified_base 9: mod_base = cm
  modified_base 10: mod_base = OTHER; note = 2-fluororibose adenine
  modified_base 11: mod_base = OTHER; note = 2-O-methylribose adenine
  modified_base 12: mod_base = gm
  modified_base 13: mod_base = OTHER; note = 2-O-methylribose adenine
  modified_base 14: mod_base = OTHER; note = 2-fluororibose adenine
  modified_base 15: mod_base = cm
  modified_base 16: mod_base = OTHER; note = 2-fluororibose adenine
  modified_base 17: mod_base = cm
  modified_base 18: mod_base = OTHER; note = 2-fluororibose uracil
  modified_base 19: mod_base = gm
  modified_base 20: mod_base = OTHER; note = 2-fluororibose uracil
  modified_base 21: mod_base = um
  modified_base 21..22: mod_base = OTHER; note = S-phosphorothioate
  modified_base 22: mod_base = um
  modified_base 22..23: mod_base = OTHER; note = S-phosphorothioate
  modified_base 23: mod_base = um
  source 1..23: mol_type = other RNA
ttatagagcaagaacactgtttt

SEQ ID NO: 331 - RNA, 23 nt, synthetic construct
  misc_feature 1..23: note = Synthetic: WV-37044
  misc_feature 1..23: note = Synthetic: SSR-0103056
  modified_base 1: mod_base = um
  modified_base 1..2: mod_base = OTHER; note = R-phosphorothioate
  modified_base 2: mod_base = OTHER; note = 2-fluororibose uracil
  modified_base 2..3: mod_base = OTHER; note = S-phosphorothioate
  modified_base 3: mod_base = OTHER; note = 2-O-methylribose adenine
  modified_base 3..4: mod_base = OTHER; note = R-phosphorothioate
  modified_base 4: mod_base = OTHER; note = 2-fluororibose uracil
  modified_base 4..5: mod_base = OTHER; note = R-phosphorothioate
  modified_base 5: mod_base = OTHER; note = 2-O-methylribose adenine
  modified_base 5..6: mod_base = OTHER; note = R-phosphorothioate
  modified_base 6: mod_base = OTHER; note = 2-fluororibose guanine
  modified_base 6..7: mod_base = OTHER; note = R-phosphorothioate
  modified_base 7: mod_base = OTHER; note = 2-O-methylribose adenine
  modified_base 7..8: mod_base = OTHER; note = R-phosphorothioate
  modified_base 8: mod_base = OTHER; note = 2-fluororibose guanine
  modified_base 8..9: mod_base = OTHER; note = S-phosphorothioate
  modified_base 9: mod_base = cm
  modified_base 10: mod_base = OTHER; note = 2-fluororibose adenine
  modified_base 11: mod_base = OTHER; note = 2-O-methylribose adenine
  modified_base 12: mod_base = gm
  modified_base 13: mod_base = OTHER; note = 2-O-methylribose adenine
  modified_base 14: mod_base = OTHER; note = 2-fluororibose adenine
  modified_base 15: mod_base = cm
  modified_base 16: mod_base = OTHER; note = 2-fluororibose adenine
  modified_base 17: mod_base = cm
  modified_base 18: mod_base = OTHER; note = 2-fluororibose uracil
  modified_base 19: mod_base = gm
  modified_base 20: mod_base = OTHER; note = 2-fluororibose uracil
  modified_base 21: mod_base = um
  modified_base 21..22: mod_base = OTHER; note = S-phosphorothioate
  modified_base 22: mod_base = um
  modified_base 22..23: mod_base = OTHER; note = S-phosphorothioate
  modified_base 23: mod_base = um
  source 1..23: mol_type = other RNA
ttatagagcaagaacactgtttt

SEQ ID NO: 332 - RNA, 23 nt, synthetic construct
  misc_feature 1..23: note = Synthetic: WV-37045
  misc_feature 1..23: note = Synthetic: SSR-0103057
  modified_base 1: mod_base = um
  modified_base 1..2: mod_base = OTHER; note = R-phosphorothioate
  modified_base 2: mod_base = OTHER; note = 2-fluororibose uracil
  modified_base 2..3: mod_base = OTHER; note = S-phosphorothioate
  modified_base 3: mod_base = OTHER; note = 2-O-methylribose adenine
  modified_base 3..4: mod_base = OTHER; note = R-phosphorothioate
  modified_base 4: mod_base = OTHER; note = 2-fluororibose uracil
  modified_base 4..5: mod_base = OTHER; note = R-phosphorothioate
  modified_base 5: mod_base = OTHER; note = 2-O-methylribose adenine
  modified_base 5..6: mod_base = OTHER; note = R-phosphorothioate
  modified_base 6: mod_base = OTHER; note = 2-fluororibose guanine
  modified_base 6..7: mod_base = OTHER; note = R-phosphorothioate
  modified_base 7: mod_base = OTHER; note = 2-O-methylribose adenine
  modified_base 7..8: mod_base = OTHER; note = S-phosphorothioate
  modified_base 8: mod_base = OTHER; note = 2-fluororibose guanine
  modified_base 8..9: mod_base = OTHER; note = R-phosphorothioate
  modified_base 9: mod_base = cm
  modified_base 10: mod_base = OTHER; note = 2-fluororibose adenine
  modified_base 11: mod_base = OTHER; note = 2-O-methylribose adenine
  modified_base 12: mod_base = gm
  modified_base 13: mod_base = OTHER; note = 2-O-methylribose adenine
  modified_base 14: mod_base = OTHER; note = 2-fluororibose adenine
  modified_base 15: mod_base = cm
  modified_base 16: mod_base = OTHER; note = 2-fluororibose adenine
  modified_base 17: mod_base = cm
  modified_base 18: mod_base = OTHER; note = 2-fluororibose uracil
  modified_base 19: mod_base = gm
  modified_base 20: mod_base = OTHER; note = 2-fluororibose uracil
  modified_base 21: mod_base = um
  modified_base 21..22: mod_base = OTHER; note = S-phosphorothioate
  modified_base 22: mod_base = um
  modified_base 22..23: mod_base = OTHER; note = S-phosphorothioate
  modified_base 23: mod_base = um
  source 1..23: mol_type = other RNA
ttatagagcaagaacactgtttt

SEQ ID NO: 333 - RNA, 23 nt, synthetic construct
  misc_feature 1..23: note = Synthetic: WV-37046
  misc_feature 1..23: note = Synthetic: SSR-0103058
  modified_base 1: mod_base = um
  modified_base 1..2: mod_base = OTHER; note = R-phosphorothioate
  modified_base 2: mod_base = OTHER; note = 2-fluororibose uracil
  modified_base 2..3: mod_base = OTHER; note = S-phosphorothioate
  modified_base 3: mod_base = OTHER; note = 2-O-methylribose adenine
  modified_base 3..4: mod_base = OTHER; note = R-phosphorothioate
  modified_base 4: mod_base = OTHER; note = 2-fluororibose uracil
  modified_base 4..5: mod_base = OTHER; note = R-phosphorothioate
  modified_base 5: mod_base = OTHER; note = 2-O-methylribose adenine
  modified_base 5..6: mod_base = OTHER; note = R-phosphorothioate
  modified_base 6: mod_base = OTHER; note = 2-fluororibose guanine
  modified_base 6..7: mod_base = OTHER; note = R-phosphorothioate
  modified_base 7: mod_base = OTHER; note = 2-O-methylribose adenine
  modified_base 7..8: mod_base = OTHER; note = S-phosphorothioate
  modified_base 8: mod_base = OTHER; note = 2-fluororibose guanine
  modified_base 8..9: mod_base = OTHER; note = S-phosphorothioate
  modified_base 9: mod_base = cm
  modified_base 10: mod_base = OTHER; note = 2-fluororibose adenine
  modified_base 11: mod_base = OTHER; note = 2-O-methylribose adenine
  modified_base 12: mod_base = gm
  modified_base 13: mod_base = OTHER; note = 2-O-methylribose adenine
  modified_base 14: mod_base = OTHER; note = 2-fluororibose adenine
  modified_base 15: mod_base = cm
  modified_base 16: mod_base = OTHER; note = 2-fluororibose adenine
  modified_base 17: mod_base = cm
  modified_base 18: mod_base = OTHER; note = 2-fluororibose uracil
  modified_base 19: mod_base = gm
  modified_base 20: mod_base = OTHER; note = 2-fluororibose uracil
  modified_base 21: mod_base = um
  modified_base 21..22: mod_base = OTHER; note = S-phosphorothioate
  modified_base 22: mod_base = um
  modified_base 22..23: mod_base = OTHER; note = S-phosphorothioate
  modified_base 23: mod_base = um
  source 1..23: mol_type = other RNA
ttatagagcaagaacactgtttt

SEQ ID NO: 334 - RNA, 23 nt, synthetic construct
  misc_feature 1..23: note = Synthetic: WV-37047
  misc_feature 1..23: note = Synthetic: SSR-0103059
  modified_base 1: mod_base = um
  modified_base 1..2: mod_base = OTHER; note = R-phosphorothioate
  modified_base 2: mod_base = OTHER; note = 2-fluororibose uracil
  modified_base 2..3: mod_base = OTHER; note = S-phosphorothioate
  modified_base 3: mod_base = OTHER; note = 2-O-methylribose adenine
  modified_base 3..4: mod_base = OTHER; note = R-phosphorothioate
  modified_base 4: mod_base = OTHER; note = 2-fluororibose uracil
  modified_base 4..5: mod_base = OTHER; note = R-phosphorothioate
  modified_base 5: mod_base = OTHER; note = 2-O-methylribose adenine
  modified_base 5..6: mod_base = OTHER; note = R-phosphorothioate
  modified_base 6: mod_base = OTHER; note = 2-fluororibose guanine
  modified_base 6..7: mod_base = OTHER; note = S-phosphorothioate
  modified_base 7: mod_base = OTHER; note = 2-O-methylribose adenine
  modified_base 7..8: mod_base = OTHER; note = R-phosphorothioate
  modified_base 8: mod_base = OTHER; note = 2-fluororibose guanine
  modified_base 8..9: mod_base = OTHER; note = R-phosphorothioate
  modified_base 9: mod_base = cm
  modified_base 10: mod_base = OTHER; note = 2-fluororibose adenine
  modified_base 11: mod_base = OTHER; note = 2-O-methylribose adenine
  modified_base 12: mod_base = gm
  modified_base 13: mod_base = OTHER; note = 2-O-methylribose adenine
  modified_base 14: mod_base = OTHER; note = 2-fluororibose adenine
  modified_base 15: mod_base = cm
  modified_base 16: mod_base = OTHER; note = 2-fluororibose adenine
  modified_base 17: mod_base = cm
  modified_base 18: mod_base = OTHER; note = 2-fluororibose uracil
  modified_base 19: mod_base = gm
  modified_base 20: mod_base = OTHER; note = 2-fluororibose uracil
  modified_base 21: mod_base = um
  modified_base 21..22: mod_base = OTHER; note = S-phosphorothioate
  modified_base 22: mod_base = um
  modified_base 22..23: mod_base = OTHER; note = S-phosphorothioate
  modified_base 23: mod_base = um
  source 1..23: mol_type = other RNA
ttatagagcaagaacactgtttt

SEQ ID NO: 335 - RNA, 23 nt, synthetic construct
  misc_feature 1..23: note = Synthetic: WV-37048
  misc_feature 1..23: note = Synthetic: SSR-0103060
  modified_base 1: mod_base = um
  modified_base 1..2: mod_base = OTHER; note = R-phosphorothioate
  modified_base 2: mod_base = OTHER; note = 2-fluororibose uracil
  modified_base 2..3: mod_base = OTHER; note = S-phosphorothioate
  modified_base 3: mod_base = OTHER; note = 2-O-methylribose adenine
  modified_base 3..4: mod_base = OTHER; note = R-phosphorothioate
  modified_base 4: mod_base = OTHER; note = 2-fluororibose uracil
  modified_base 4..5: mod_base = OTHER; note = R-phosphorothioate
  modified_base 5: mod_base = OTHER; note = 2-O-methylribose adenine
  modified_base 5..6: mod_base = OTHER; note = R-phosphorothioate
  modified_base 6: mod_base = OTHER; note = 2-fluororibose guanine
  modified_base 6..7: mod_base = OTHER; note = S-phosphorothioate
  modified_base 7: mod_base = OTHER; note = 2-O-methylribose adenine
  modified_base 7..8: mod_base = OTHER; note = R-phosphorothioate
  modified_base 8: mod_base = OTHER; note = 2-fluororibose guanine
  modified_base 8..9: mod_base = OTHER; note = S-phosphorothioate
  modified_base 9: mod_base = cm
  modified_base 10: mod_base = OTHER; note = 2-fluororibose adenine
  modified_base 11: mod_base = OTHER; note = 2-O-methylribose adenine
  modified_base 12: mod_base = gm
  modified_base 13: mod_base = OTHER; note = 2-O-methylribose adenine
  modified_base 14: mod_base = OTHER; note = 2-fluororibose adenine
  modified_base 15: mod_base = cm
  modified_base 16: mod_base = OTHER; note = 2-fluororibose adenine
  modified_base 17: mod_base = cm
  modified_base 18: mod_base = OTHER; note = 2-fluororibose uracil
  modified_base 19: mod_base = gm
  modified_base 20: mod_base = OTHER; note = 2-fluororibose uracil
  modified_base 21: mod_base = um
  modified_base 21..22: mod_base = OTHER; note = S-phosphorothioate
  modified_base 22: mod_base = um
  modified_base 22..23: mod_base = OTHER; note = S-phosphorothioate
  modified_base 23: mod_base = um
  source 1..23: mol_type = other RNA
ttatagagcaagaacactgtttt

SEQ ID NO: 336 - RNA, 23 nt, synthetic construct
  misc_feature 1..23: note = Synthetic: WV-37049
  misc_feature 1..23: note = Synthetic: SSR-0103061
  modified_base 1: mod_base = um
  modified_base 1..2: mod_base = OTHER; note = R-phosphorothioate
  modified_base 2: mod_base = OTHER; note = 2-fluororibose uracil
  modified_base 2..3: mod_base = OTHER; note = S-phosphorothioate
  modified_base 3: mod_base = OTHER; note = 2-O-methylribose adenine
  modified_base 3..4: mod_base = OTHER; note = R-phosphorothioate
  modified_base 4: mod_base = OTHER; note = 2-fluororibose uracil
  modified_base 4..5: mod_base = OTHER; note = R-phosphorothioate
  modified_base 5: mod_base = OTHER; note = 2-O-methylribose adenine
  modified_base 5..6: mod_base = OTHER; note = R-phosphorothioate
  modified_base 6: mod_base = OTHER; note = 2-fluororibose guanine
  modified_base 6..7: mod_base = OTHER; note = S-phosphorothioate
  modified_base 7: mod_base = OTHER; note = 2-O-methylribose adenine
  modified_base 7..8: mod_base = OTHER; note = S-phosphorothioate
  modified_base 8: mod_base = OTHER; note = 2-fluororibose guanine
  modified_base 8..9: mod_base = OTHER; note = R-phosphorothioate
  modified_base 9: mod_base = cm
  modified_base 10: mod_base = OTHER; note = 2-fluororibose adenine
  modified_base 11: mod_base = OTHER; note = 2-O-methylribose adenine
  modified_base 12: mod_base = gm
  modified_base 13: mod_base = OTHER; note = 2-O-methylribose adenine
  modified_base 14: mod_base = OTHER; note = 2-fluororibose adenine
  modified_base 15: mod_base = cm
  modified_base 16: mod_base = OTHER; note = 2-fluororibose adenine
  modified_base 17: mod_base = cm
  modified_base 18: mod_base = OTHER; note = 2-fluororibose uracil
  modified_base 19: mod_base = gm
  modified_base 20: mod_base = OTHER; note = 2-fluororibose uracil
  modified_base 21: mod_base = um
  modified_base 21..22: mod_base = OTHER; note = S-phosphorothioate
  modified_base 22: mod_base = um
  modified_base 22..23: mod_base = OTHER; note = S-phosphorothioate
  modified_base 23: mod_base = um
  source 1..23: mol_type = other RNA
ttatagagcaagaacactgtttt

SEQ ID NO: 337 - RNA, 23 nt, synthetic construct
  misc_feature 1..23: note = Synthetic: WV-37050
  misc_feature 1..23: note = Synthetic: SSR-0103062
  modified_base 1: mod_base = um
  modified_base 1..2: mod_base = OTHER; note = R-phosphorothioate
  modified_base 2: mod_base = OTHER; note = 2-fluororibose uracil
  modified_base 2..3: mod_base = OTHER; note = S-phosphorothioate
  modified_base 3: mod_base = OTHER; note = 2-O-methylribose adenine
  modified_base 3..4: mod_base = OTHER; note = R-phosphorothioate
  modified_base 4: mod_base = OTHER; note = 2-fluororibose uracil
  modified_base 4..5: mod_base = OTHER; note = R-phosphorothioate
  modified_base 5: mod_base = OTHER; note = 2-O-methylribose adenine
  modified_base 5..6: mod_base = OTHER; note = R-phosphorothioate
  modified_base 6: mod_base = OTHER; note = 2-fluororibose guanine
  modified_base 6..7: mod_base = OTHER; note = S-phosphorothioate
  modified_base 7: mod_base = OTHER; note = 2-O-methylribose adenine
  modified_base 7..8: mod_base = OTHER; note = S-phosphorothioate
  modified_base 8: mod_base = OTHER; note = 2-fluororibose guanine
  modified_base 8..9: mod_base = OTHER; note = S-phosphorothioate
  modified_base 9: mod_base = cm
  modified_base 10: mod_base = OTHER; note = 2-fluororibose adenine
  modified_base 11: mod_base = OTHER; note = 2-O-methylribose adenine
  modified_base 12: mod_base = gm
  modified_base 13: mod_base = OTHER; note = 2-O-methylribose adenine
  modified_base 14: mod_base = OTHER; note = 2-fluororibose adenine
  modified_base 15: mod_base = cm
  modified_base 16: mod_base = OTHER; note = 2-fluororibose adenine
  modified_base 17: mod_base = cm
  modified_base 18: mod_base = OTHER; note = 2-fluororibose uracil
  modified_base 19: mod_base = gm
  modified_base 20: mod_base = OTHER; note = 2-fluororibose uracil
  modified_base 21: mod_base = um
  modified_base 21..22: mod_base = OTHER; note = S-phosphorothioate
  modified_base 22: mod_base = um
  modified_base 22..23: mod_base = OTHER; note = S-phosphorothioate
  modified_base 23: mod_base = um
  source 1..23: mol_type = other RNA
ttatagagcaagaacactgtttt

SEQ ID NO: 338 - RNA, 23 nt, synthetic construct
  misc_feature 1..23: note = Synthetic: WV-37051
  misc_feature 1..23: note = Synthetic: SSR-0103063
  modified_base 1: mod_base = um
  modified_base 1..2: mod_base = OTHER; note = R-phosphorothioate
  modified_base 2: mod_base = OTHER; note = 2-fluororibose uracil
  modified_base 2..3: mod_base = OTHER; note = S-phosphorothioate
  modified_base 3: mod_base = OTHER; note = 2-O-methylribose adenine
  modified_base 3..4: mod_base = OTHER; note = R-phosphorothioate
  modified_base 4: mod_base = OTHER; note = 2-fluororibose uracil
  modified_base 4..5: mod_base = OTHER; note = R-phosphorothioate
  modified_base 5: mod_base = OTHER; note = 2-O-methylribose adenine
  modified_base 5..6: mod_base = OTHER; note = S-phosphorothioate
  modified_base 6: mod_base = OTHER; note = 2-fluororibose guanine
  modified_base 6..7: mod_base = OTHER; note = R-phosphorothioate
  modified_base 7: mod_base = OTHER; note = 2-O-methylribose adenine
  modified_base 7..8: mod_base = OTHER; note = R-phosphorothioate
  modified_base 8: mod_base = OTHER; note = 2-fluororibose guanine
  modified_base 8..9: mod_base = OTHER; note = R-phosphorothioate
  modified_base 9: mod_base = cm
  modified_base 10: mod_base = OTHER; note = 2-fluororibose adenine
  modified_base 11: mod_base = OTHER; note = 2-O-methylribose adenine
  modified_base 12: mod_base = gm
  modified_base 13: mod_base = OTHER; note = 2-O-methylribose adenine
  modified_base 14: mod_base = OTHER; note = 2-fluororibose adenine
  modified_base 15: mod_base = cm
  modified_base 16: mod_base = OTHER; note = 2-fluororibose adenine
  modified_base 17: mod_base = cm
  modified_base 18: mod_base = OTHER; note = 2-fluororibose uracil
  modified_base 19: mod_base = gm
  modified_base 20: mod_base = OTHER; note = 2-fluororibose uracil
  modified_base 21: mod_base = um
  modified_base 21..22: mod_base = OTHER; note = S-phosphorothioate
  modified_base 22: mod_base = um
  modified_base 22..23: mod_base = OTHER; note = S-phosphorothioate
  modified_base 23: mod_base = um
  source 1..23: mol_type = other RNA
ttatagagcaagaacactgtttt

SEQ ID NO: 339 - RNA, 23 nt, synthetic construct
  misc_feature 1..23: note = Synthetic: WV-37052
  misc_feature 1..23: note = Synthetic: SSR-0103064
  modified_base 1: mod_base = um
  modified_base 1..2: mod_base = OTHER; note = R-phosphorothioate
  modified_base 2: mod_base = OTHER; note = 2-fluororibose uracil
  modified_base 2..3: mod_base = OTHER; note = S-phosphorothioate
  modified_base 3: mod_base = OTHER; note = 2-O-methylribose adenine
  modified_base 3..4: mod_base = OTHER; note = R-phosphorothioate
  modified_base 4: mod_base = OTHER; note = 2-fluororibose uracil
  modified_base 4..5: mod_base = OTHER; note = R-phosphorothioate
  modified_base 5: mod_base = OTHER; note = 2-O-methylribose adenine
  modified_base 5..6: mod_base = OTHER; note = S-phosphorothioate
  modified_base 6: mod_base = OTHER; note = 2-fluororibose guanine
  modified_base 6..7: mod_base = OTHER; note = R-phosphorothioate
  modified_base 7: mod_base = OTHER; note = 2-O-methylribose adenine
  modified_base 7..8: mod_base = OTHER; note = R-phosphorothioate
  modified_base 8: mod_base = OTHER; note = 2-fluororibose guanine
  modified_base 8..9: mod_base = OTHER; note = S-phosphorothioate
  modified_base 9: mod_base = cm
  modified_base 10: mod_base = OTHER; note = 2-fluororibose adenine
  modified_base 11: mod_base = OTHER; note = 2-O-methylribose adenine
  modified_base 12: mod_base = gm
  modified_base 13: mod_base = OTHER; note = 2-O-methylribose adenine
  modified_base 14: mod_base = OTHER; note = 2-fluororibose adenine
  modified_base 15: mod_base = cm
  modified_base 16: mod_base = OTHER; note = 2-fluororibose adenine
  modified_base 17: mod_base = cm
  modified_base 18: mod_base = OTHER; note = 2-fluororibose uracil
  modified_base 19: mod_base = gm
  modified_base 20: mod_base = OTHER; note = 2-fluororibose uracil
  modified_base 21: mod_base = um
  modified_base 21..22: mod_base = OTHER; note = S-phosphorothioate
  modified_base 22: mod_base = um
  modified_base 22..23: mod_base = OTHER; note = S-phosphorothioate
  modified_base 23: mod_base = um
  source 1..23: mol_type = other RNA
ttatagagcaagaacactgtttt

SEQ ID NO: 340 - RNA, 23 nt, synthetic construct
  misc_feature 1..23: note = Synthetic: WV-37053
  misc_feature 1..23: note = Synthetic: SSR-0103065
  modified_base 1: mod_base = um
  modified_base 1..2: mod_base = OTHER; note = R-phosphorothioate
  modified_base 2: mod_base = OTHER; note = 2-fluororibose uracil
  modified_base 2..3: mod_base = OTHER; note = S-phosphorothioate
  modified_base 3: mod_base = OTHER; note = 2-O-methylribose adenine
  modified_base 3..4: mod_base = OTHER; note = R-phosphorothioate
  modified_base 4: mod_base = OTHER; note = 2-fluororibose uracil
  modified_base 4..5: mod_base = OTHER; note = R-phosphorothioate
  modified_base 5: mod_base = OTHER; note = 2-O-methylribose adenine
  modified_base 5..6: mod_base = OTHER; note = S-phosphorothioate
  modified_base 6: mod_base = OTHER; note = 2-fluororibose guanine
  modified_base 6..7: mod_base = OTHER; note = R-phosphorothioate
  modified_base 7: mod_base = OTHER; note = 2-O-methylribose adenine
  modified_base 7..8: mod_base = OTHER; note = S-phosphorothioate
  modified_base 8: mod_base = OTHER; note = 2-fluororibose guanine
  modified_base 8..9: mod_base = OTHER; note = R-phosphorothioate
  modified_base 9: mod_base = cm
  modified_base 10: mod_base = OTHER; note = 2-fluororibose adenine
  modified_base 11: mod_base = OTHER; note = 2-O-methylribose adenine
  modified_base 12: mod_base = gm
  modified_base 13: mod_base = OTHER; note = 2-O-methylribose adenine
  modified_base 14: mod_base = OTHER; note = 2-fluororibose adenine
  modified_base 15: mod_base = cm
  modified_base 16: mod_base = OTHER; note = 2-fluororibose adenine
  modified_base 17: mod_base = cm
  modified_base 18: mod_base = OTHER; note = 2-fluororibose uracil
  modified_base 19: mod_base = gm
  modified_base 20: mod_base = OTHER; note = 2-fluororibose uracil
  modified_base 21: mod_base = um
  modified_base 21..22: mod_base = OTHER; note = S-phosphorothioate
  modified_base 22: mod_base = um
  modified_base 22..23: mod_base = OTHER; note = S-phosphorothioate
  modified_base 23: mod_base = um
  source 1..23: mol_type = other RNA
ttatagagcaagaacactgtttt

SEQ ID NO: 341 - RNA, 23 nt, synthetic construct
  misc_feature 1..23: note = Synthetic: WV-37054
  misc_feature 1..23: note = Synthetic: SSR-0103066
  modified_base 1: mod_base = um
  modified_base 1..2: mod_base = OTHER; note = R-phosphorothioate
  modified_base 2: mod_base = OTHER; note = 2-fluororibose uracil
  modified_base 2..3: mod_base = OTHER; note = S-phosphorothioate
  modified_base 3: mod_base = OTHER; note = 2-O-methylribose adenine
  modified_base 3..4: mod_base = OTHER; note = R-phosphorothioate
  modified_base 4: mod_base = OTHER; note = 2-fluororibose uracil
  modified_base 4..5: mod_base = OTHER; note = R-phosphorothioate
  modified_base 5: mod_base = OTHER; note = 2-O-methylribose adenine
  modified_base 5..6: mod_base = OTHER; note = S-phosphorothioate
  modified_base 6: mod_base = OTHER; note = 2-fluororibose guanine
  modified_base 6..7: mod_base = OTHER; note = R-phosphorothioate
  modified_base 7: mod_base = OTHER; note = 2-O-methylribose adenine
  modified_base 7..8: mod_base = OTHER; note = S-phosphorothioate
  modified_base 8: mod_base = OTHER; note = 2-fluororibose guanine
  modified_base 8..9: mod_base = OTHER; note = S-phosphorothioate
  modified_base 9: mod_base = cm
  modified_base 10: mod_base = OTHER; note = 2-fluororibose adenine
  modified_base 11: mod_base = OTHER; note = 2-O-methylribose adenine
  modified_base 12: mod_base = gm
  modified_base 13: mod_base = OTHER; note = 2-O-methylribose adenine
  modified_base 14: mod_base = OTHER; note = 2-fluororibose adenine
  modified_base 15: mod_base = cm
  modified_base 16: mod_base = OTHER; note = 2-fluororibose adenine
  modified_base 17: mod_base = cm
  modified_base 18: mod_base = OTHER; note = 2-fluororibose uracil
  modified_base 19: mod_base = gm
  modified_base 20: mod_base = OTHER; note = 2-fluororibose uracil
  modified_base 21: mod_base = um
  modified_base 21..22: mod_base = OTHER; note = S-phosphorothioate
  modified_base 22: mod_base = um
  modified_base 22..23: mod_base = OTHER; note = S-phosphorothioate
  modified_base 23: mod_base = um
  source 1..23: mol_type = other RNA
ttatagagcaagaacactgtttt

SEQ ID NO: 342 - RNA, 23 nt, synthetic construct
  misc_feature 1..23: note = Synthetic: WV-37055
  misc_feature 1..23: note = Synthetic: SSR-0103067
  modified_base 1: mod_base = um
  modified_base 1..2: mod_base = OTHER; note = R-phosphorothioate
  modified_base 2: mod_base = OTHER; note = 2-fluororibose uracil
  modified_base 2..3: mod_base = OTHER; note = S-phosphorothioate
  modified_base 3: mod_base = OTHER; note = 2-O-methylribose adenine
  modified_base 3..4: mod_base = OTHER; note = R-phosphorothioate
  modified_base 4: mod_base = OTHER; note = 2-fluororibose uracil
  modified_base 4..5: mod_base = OTHER; note = R-phosphorothioate
  modified_base 5: mod_base = OTHER; note = 2-O-methylribose adenine
  modified_base 5..6: mod_base = OTHER; note = S-phosphorothioate
  modified_base 6: mod_base = OTHER; note = 2-fluororibose guanine
  modified_base 6..7: mod_base = OTHER; note = S-phosphorothioate
  modified_base 7: mod_base = OTHER; note = 2-O-methylribose adenine
  modified_base 7..8: mod_base = OTHER; note = R-phosphorothioate
  modified_base 8: mod_base = OTHER; note = 2-fluororibose guanine
  modified_base 8..9: mod_base = OTHER; note = R-phosphorothioate
  modified_base 9: mod_base = cm
  modified_base 10: mod_base = OTHER; note = 2-fluororibose adenine
  modified_base 11: mod_base = OTHER; note = 2-O-methylribose adenine
  modified_base 12: mod_base = gm
  modified_base 13: mod_base = OTHER; note = 2-O-methylribose adenine
  modified_base 14: mod_base = OTHER; note = 2-fluororibose adenine
  modified_base 15: mod_base = cm
  modified_base 16: mod_base = OTHER; note = 2-fluororibose adenine
  modified_base 17: mod_base = cm
  modified_base 18: mod_base = OTHER; note = 2-fluororibose uracil
  modified_base 19: mod_base = gm
  modified_base 20: mod_base = OTHER; note = 2-fluororibose uracil
  modified_base 21: mod_base = um
  modified_base 21..22: mod_base = OTHER; note = S-phosphorothioate
  modified_base 22: mod_base = um
  modified_base 22..23: mod_base = OTHER; note = S-phosphorothioate
  modified_base 23: mod_base = um
  source 1..23: mol_type = other RNA
ttatagagcaagaacactgtttt

SEQ ID NO: 343 - RNA, 23 nt, synthetic construct
  misc_feature 1..23: note = Synthetic: WV-37056
  misc_feature 1..23: note = Synthetic: SSR-0103068
  modified_base 1: mod_base = um
  modified_base 1..2: mod_base = OTHER; note = R-phosphorothioate
  modified_base 2: mod_base = OTHER; note = 2-fluororibose uracil
  modified_base 2..3: mod_base = OTHER; note = S-phosphorothioate
  modified_base 3: mod_base = OTHER; note = 2-O-methylribose adenine
  modified_base 3..4: mod_base = OTHER; note = R-phosphorothioate
  modified_base 4: mod_base = OTHER; note = 2-fluororibose uracil
  modified_base 4..5: mod_base = OTHER; note = R-phosphorothioate
  modified_base 5: mod_base = OTHER; note = 2-O-methylribose adenine
  modified_base 5..6: mod_base = OTHER; note = S-phosphorothioate
  modified_base 6: mod_base = OTHER; note = 2-fluororibose guanine
  modified_base 6..7: mod_base = OTHER; note = S-phosphorothioate
  modified_base 7: mod_base = OTHER; note = 2-O-methylribose adenine
  modified_base 7..8: mod_base = OTHER; note = R-phosphorothioate
  modified_base 8: mod_base = OTHER; note = 2-fluororibose guanine
  modified_base 8..9: mod_base = OTHER; note = S-phosphorothioate
  modified_base 9: mod_base = cm
  modified_base 10: mod_base = OTHER; note = 2-fluororibose adenine
  modified_base 11: mod_base = OTHER; note = 2-O-methylribose adenine
  modified_base 12: mod_base = gm
  modified_base 13: mod_base = OTHER; note = 2-O-methylribose adenine
  modified_base 14: mod_base = OTHER; note = 2-fluororibose adenine
  modified_base 15: mod_base = cm
  modified_base 16: mod_base = OTHER; note = 2-fluororibose adenine
  modified_base 17: mod_base = cm
  modified_base 18: mod_base = OTHER; note = 2-fluororibose uracil
  modified_base 19: mod_base = gm
  modified_base 20: mod_base = OTHER; note = 2-fluororibose uracil
  modified_base 21: mod_base = um
  modified_base 21..22: mod_base = OTHER; note = S-phosphorothioate
  modified_base 22: mod_base = um
  modified_base 22..23: mod_base = OTHER; note = S-phosphorothioate
  modified_base 23: mod_base = um
  source 1..23: mol_type = other RNA
ttatagagcaagaacactgtttt

SEQ ID NO: 344 - RNA, 23 nt, synthetic construct
  misc_feature 1..23: note = Synthetic: WV-37057
  misc_feature 1..23: note = Synthetic: SSR-0103069
  modified_base 1: mod_base = um
  modified_base 1..2: mod_base = OTHER; note = R-phosphorothioate
  modified_base 2: mod_base = OTHER; note = 2-fluororibose uracil
  modified_base 2..3: mod_base = OTHER; note = S-phosphorothioate
  modified_base 3: mod_base = OTHER; note = 2-O-methylribose adenine
  modified_base 3..4: mod_base = OTHER; note = R-phosphorothioate
  modified_base 4: mod_base = OTHER; note = 2-fluororibose uracil
  modified_base 4..5: mod_base = OTHER; note = R-phosphorothioate
  modified_base 5: mod_base = OTHER; note = 2-O-methylribose adenine
  modified_base 5..6: mod_base = OTHER; note = S-phosphorothioate
  modified_base 6: mod_base = OTHER; note = 2-fluororibose guanine
  modified_base 6..7: mod_base = OTHER; note = S-phosphorothioate
  modified_base 7: mod_base = OTHER; note = 2-O-methylribose adenine
  modified_base 7..8: mod_base = OTHER; note = S-phosphorothioate
  modified_base 8: mod_base = OTHER; note = 2-fluororibose guanine
  modified_base 8..9: mod_base = OTHER; note = R-phosphorothioate
  modified_base 9: mod_base = cm
  modified_base 10: mod_base = OTHER; note = 2-fluororibose adenine
  modified_base 11: mod_base = OTHER; note = 2-O-methylribose adenine
  modified_base 12: mod_base = gm
  modified_base 13: mod_base = OTHER; note = 2-O-methylribose adenine
  modified_base 14: mod_base = OTHER; note = 2-fluororibose adenine
  modified_base 15: mod_base = cm
  modified_base 16: mod_base = OTHER; note = 2-fluororibose adenine
  modified_base 17: mod_base = cm
  modified_base 18: mod_base = OTHER; note = 2-fluororibose uracil
  modified_base 19: mod_base = gm
  modified_base 20: mod_base = OTHER; note = 2-fluororibose uracil
  modified_base 21: mod_base = um
  modified_base 21..22: mod_base = OTHER; note = S-phosphorothioate
  modified_base 22: mod_base = um
  modified_base 22..23: mod_base = OTHER; note = S-phosphorothioate
  modified_base 23: mod_base = um
  source 1..23: mol_type = other RNA
ttatagagcaagaacactgtttt

SEQ ID NO: 345 - RNA, 23 nt, synthetic construct
  misc_feature 1..23: note = Synthetic: WV-37058
  misc_feature 1..23: note = Synthetic: SSR-0103070
  modified_base 1: mod_base = um
  modified_base 1..2: mod_base = OTHER; note = R-phosphorothioate
  modified_base 2: mod_base = OTHER; note = 2-fluororibose uracil
  modified_base 2..3: mod_base = OTHER; note = S-phosphorothioate
  modified_base 3: mod_base = OTHER; note = 2-O-methylribose adenine
  modified_base 3..4: mod_base = OTHER; note = R-phosphorothioate
  modified_base 4: mod_base = OTHER; note = 2-fluororibose uracil
  modified_base 4..5: mod_base = OTHER; note = R-phosphorothioate
  modified_base 5: mod_base = OTHER; note = 2-O-methylribose adenine
  modified_base 5..6: mod_base = OTHER; note = S-phosphorothioate
  modified_base 6: mod_base = OTHER; note = 2-fluororibose guanine
  modified_base 6..7: mod_base = OTHER; note = S-phosphorothioate
  modified_base 7: mod_base = OTHER; note = 2-O-methylribose adenine
  modified_base 7..8: mod_base = OTHER; note = S-phosphorothioate
  modified_base 8: mod_base = OTHER; note = 2-fluororibose guanine
  modified_base 8..9: mod_base = OTHER; note = S-phosphorothioate
  modified_base 9: mod_base = cm
  modified_base 10: mod_base = OTHER; note = 2-fluororibose adenine
  modified_base 11: mod_base = OTHER; note = 2-O-methylribose adenine
  modified_base 12: mod_base = gm
  modified_base 13: mod_base = OTHER; note = 2-O-methylribose adenine
  modified_base 14: mod_base = OTHER; note = 2-fluororibose adenine
  modified_base 15: mod_base = cm
  modified_base 16: mod_base = OTHER; note = 2-fluororibose adenine
  modified_base 17: mod_base = cm
  modified_base 18: mod_base = OTHER; note = 2-fluororibose uracil
  modified_base 19: mod_base = gm
  modified_base 20: mod_base = OTHER; note = 2-fluororibose uracil
  modified_base 21: mod_base = um
  modified_base 21..22: mod_base = OTHER; note = S-phosphorothioate
  modified_base 22: mod_base = um
  modified_base 22..23: mod_base = OTHER; note = S-phosphorothioate
  modified_base 23: mod_base = um
  source 1..23: mol_type = other RNA
ttatagagcaagaacactgtttt

SEQ ID NO: 346 - RNA, 23 nt, synthetic construct
  misc_feature 1..23: note = Synthetic: WV-37059
  misc_feature 1..23: note = Synthetic: SSR-0103071
  modified_base 1: mod_base = um
  modified_base 1..2: mod_base = OTHER; note = R-phosphorothioate
  modified_base 2: mod_base = OTHER; note = 2-fluororibose uracil
  modified_base 2..3: mod_base = OTHER; note = S-phosphorothioate
  modified_base 3: mod_base = OTHER; note = 2-O-methylribose adenine
  modified_base 3..4: mod_base = OTHER; note = R-phosphorothioate
  modified_base 4: mod_base = OTHER; note = 2-fluororibose uracil
  modified_base 4..5: mod_base = OTHER; note = S-phosphorothioate
  modified_base 5: mod_base = OTHER; note = 2-O-methylribose adenine
  modified_base 5..6: mod_base = OTHER; note = R-phosphorothioate
  modified_base 6: mod_base = OTHER; note = 2-fluororibose guanine
  modified_base 6..7: mod_base = OTHER; note = R-phosphorothioate
  modified_base 7: mod_base = OTHER; note = 2-O-methylribose adenine
  modified_base 7..8: mod_base = OTHER; note = R-phosphorothioate
  modified_base 8: mod_base = OTHER; note = 2-fluororibose guanine
  modified_base 8..9: mod_base = OTHER; note = R-phosphorothioate
  modified_base 9: mod_base = cm
  modified_base 10: mod_base = OTHER; note = 2-fluororibose adenine
  modified_base 11: mod_base = OTHER; note = 2-O-methylribose adenine
  modified_base 12: mod_base = gm
  modified_base 13: mod_base = OTHER; note = 2-O-methylribose adenine
  modified_base 14: mod_base = OTHER; note = 2-fluororibose adenine
  modified_base 15: mod_base = cm
  modified_base 16: mod_base = OTHER; note = 2-fluororibose adenine
  modified_base 17: mod_base = cm
  modified_base 18: mod_base = OTHER; note = 2-fluororibose uracil
  modified_base 19: mod_base = gm
  modified_base 20: mod_base = OTHER; note = 2-fluororibose uracil
  modified_base 21: mod_base = um
  modified_base 21..22: mod_base = OTHER; note = S-phosphorothioate
  modified_base 22: mod_base = um
  modified_base 22..23: mod_base = OTHER; note = S-phosphorothioate
  modified_base 23: mod_base = um
  source 1..23: mol_type = other RNA
ttatagagcaagaacactgtttt

SEQ ID NO: 347 - RNA, 23 nt, synthetic construct
  misc_feature 1..23: note = Synthetic: WV-37060
  misc_feature 1..23: note = Synthetic: SSR-0103072
  modified_base 1: mod_base = um
  modified_base 1..2: mod_base = OTHER; note = R-phosphorothioate
  modified_base 2: mod_base = OTHER; note = 2-fluororibose uracil
  modified_base 2..3: mod_base = OTHER; note = S-phosphorothioate
  modified_base 3: mod_base = OTHER; note = 2-O-methylribose adenine
  modified_base 3..4: mod_base = OTHER; note = R-phosphorothioate
  modified_base 4: mod_base = OTHER; note = 2-fluororibose uracil
  modified_base 4..5: mod_base = OTHER; note = S-phosphorothioate
  modified_base 5: mod_base = OTHER; note = 2-O-methylribose adenine
  modified_base 5..6: mod_base = OTHER; note = R-phosphorothioate
  modified_base 6: mod_base = OTHER; note = 2-fluororibose guanine
  modified_base 6..7: mod_base = OTHER; note = R-phosphorothioate
  modified_base 7: mod_base = OTHER; note = 2-O-methylribose adenine
  modified_base 7..8: mod_base = OTHER; note = R-phosphorothioate
  modified_base 8: mod_base = OTHER; note = 2-fluororibose guanine
  modified_base 8..9: mod_base = OTHER; note = S-phosphorothioate
  modified_base 9: mod_base = cm
  modified_base 10: mod_base = OTHER; note = 2-fluororibose adenine
  modified_base 11: mod_base = OTHER; note = 2-O-methylribose adenine
  modified_base 12: mod_base = gm
  modified_base 13: mod_base = OTHER; note = 2-O-methylribose adenine
  modified_base 14: mod_base = OTHER; note = 2-fluororibose adenine
  modified_base 15: mod_base = cm
  modified_base 16: mod_base = OTHER; note = 2-fluororibose adenine
  modified_base 17: mod_base = cm
  modified_base 18: mod_base = OTHER; note = 2-fluororibose uracil
  modified_base 19: mod_base = gm
  modified_base 20: mod_base = OTHER; note = 2-fluororibose uracil
  modified_base 21: mod_base = um
  modified_base 21..22: mod_base = OTHER; note = S-phosphorothioate
  modified_base 22: mod_base = um
  modified_base 22..23: mod_base = OTHER; note = S-phosphorothioate
  modified_base 23: mod_base = um
  source 1..23: mol_type = other RNA
ttatagagcaagaacactgtttt

SEQ ID NO: 348 - RNA, 23 nt, synthetic construct
  misc_feature 1..23: note = Synthetic: WV-37061
  misc_feature 1..23: note = Synthetic: SSR-0103073
  modified_base 1: mod_base = um
  modified_base 1..2: mod_base = OTHER; note = R-phosphorothioate
  modified_base 2: mod_base = OTHER; note = 2-fluororibose uracil
  modified_base 2..3: mod_base = OTHER; note = S-phosphorothioate
  modified_base 3: mod_base = OTHER; note = 2-O-methylribose adenine
  modified_base 3..4: mod_base = OTHER; note = R-phosphorothioate
  modified_base 4: mod_base = OTHER; note = 2-fluororibose uracil
  modified_base 4..5: mod_base = OTHER; note = S-phosphorothioate
  modified_base 5: mod_base = OTHER; note = 2-O-methylribose adenine
  modified_base 5..6: mod_base = OTHER; note = R-phosphorothioate
  modified_base 6: mod_base = OTHER; note = 2-fluororibose guanine
  modified_base 6..7: mod_base = OTHER; note = R-phosphorothioate
  modified_base 7: mod_base = OTHER; note = 2-O-methylribose adenine
  modified_base 7..8: mod_base = OTHER; note = S-phosphorothioate
  modified_base 8: mod_base = OTHER; note = 2-fluororibose guanine
  modified_base 8..9: mod_base = OTHER; note = R-phosphorothioate
  modified_base 9: mod_base = cm
  modified_base 10: mod_base = OTHER; note = 2-fluororibose adenine
  modified_base 11: mod_base = OTHER; note = 2-O-methylribose adenine
  modified_base 12: mod_base = gm
  modified_base 13: mod_base = OTHER; note = 2-O-methylribose adenine
  modified_base 14: mod_base = OTHER; note = 2-fluororibose adenine
  modified_base 15: mod_base = cm
  modified_base 16: mod_base = OTHER; note = 2-fluororibose adenine
  modified_base 17: mod_base = cm
  modified_base 18: mod_base = OTHER; note = 2-fluororibose uracil
  modified_base 19: mod_base = gm
  modified_base 20: mod_base = OTHER; note = 2-fluororibose uracil
  modified_base 21: mod_base = um
  modified_base 21..22: mod_base = OTHER; note = S-phosphorothioate
  modified_base 22: mod_base = um
  modified_base 22..23: mod_base = OTHER; note = S-phosphorothioate
  modified_base 23: mod_base = um
  source 1..23: mol_type = other RNA
ttatagagcaagaacactgtttt

SEQ ID NO: 349 - RNA, 23 nt, synthetic construct
  misc_feature 1..23: note = Synthetic: WV-37062
  misc_feature 1..23: note = Synthetic: SSR-0103074
  modified_base 1: mod_base = um
  modified_base 1..2: mod_base = OTHER; note = R-phosphorothioate
  modified_base 2: mod_base = OTHER; note = 2-fluororibose uracil
  modified_base 2..3: mod_base = OTHER; note = S-phosphorothioate
  modified_base 3: mod_base = OTHER; note = 2-O-methylribose adenine
  modified_base 3..4: mod_base = OTHER; note = R-phosphorothioate
  modified_base 4: mod_base = OTHER; note = 2-fluororibose uracil
  modified_base 4..5: mod_base = OTHER; note = S-phosphorothioate
  modified_base 5: mod_base = OTHER; note = 2-O-methylribose adenine
  modified_base 5..6: mod_base = OTHER; note = R-phosphorothioate
  modified_base 6: mod_base = OTHER; note = 2-fluororibose guanine
  modified_base 6..7: mod_base = OTHER; note = R-phosphorothioate
  modified_base 7: mod_base = OTHER; note = 2-O-methylribose adenine
  modified_base 7..8: mod_base = OTHER; note = S-phosphorothioate
  modified_base 8: mod_base = OTHER; note = 2-fluororibose guanine
  modified_base 8..9: mod_base = OTHER; note = S-phosphorothioate
  modified_base 9: mod_base = cm
  modified_base 10: mod_base = OTHER; note = 2-fluororibose adenine
  modified_base 11: mod_base = OTHER; note = 2-O-methylribose adenine
  modified_base 12: mod_base = gm
  modified_base 13: mod_base = OTHER; note = 2-O-methylribose adenine
  modified_base 14: mod_base = OTHER; note = 2-fluororibose adenine
  modified_base 15: mod_base = cm
  modified_base 16: mod_base = OTHER; note = 2-fluororibose adenine
  modified_base 17: mod_base = cm
  modified_base 18: mod_base = OTHER; note = 2-fluororibose uracil
  modified_base 19: mod_base = gm
  modified_base 20: mod_base = OTHER; note = 2-fluororibose uracil
  modified_base 21: mod_base = um
  modified_base 21..22: mod_base = OTHER; note = S-phosphorothioate
  modified_base 22: mod_base = um
  modified_base 22..23: mod_base = OTHER; note = S-phosphorothioate
  modified_base 23: mod_base = um
  source 1..23: mol_type = other RNA
ttatagagcaagaacactgtttt

SEQ ID NO: 350 - RNA, 23 nt, synthetic construct
  misc_feature 1..23: note = Synthetic: WV-37063
  misc_feature 1..23: note = Synthetic: SSR-0103075
  modified_base 1: mod_base = um
  modified_base 1..2: mod_base = OTHER; note = R-phosphorothioate
  modified_base 2: mod_base = OTHER; note = 2-fluororibose uracil
  modified_base 2..3: mod_base = OTHER; note = S-phosphorothioate
  modified_base 3: mod_base = OTHER; note = 2-O-methylribose adenine
  modified_base 3..4: mod_base = OTHER; note = R-phosphorothioate
  modified_base 4: mod_base = OTHER; note = 2-fluororibose uracil
  modified_base 4..5: mod_base = OTHER; note = S-phosphorothioate
  modified_base 5: mod_base = OTHER; note = 2-O-methylribose adenine
  modified_base 5..6: mod_base = OTHER; note = R-phosphorothioate
  modified_base 6: mod_base = OTHER; note = 2-fluororibose guanine
  modified_base 6..7: mod_base = OTHER; note = S-phosphorothioate
  modified_base 7: mod_base = OTHER; note = 2-O-methylribose adenine
  modified_base 7..8: mod_base = OTHER; note = R-phosphorothioate
  modified_base 8: mod_base = OTHER; note = 2-fluororibose guanine
  modified_base 8..9: mod_base = OTHER; note = R-phosphorothioate
  modified_base 9: mod_base = cm
  modified_base 10: mod_base = OTHER; note = 2-fluororibose adenine
  modified_base 11: mod_base = OTHER; note = 2-O-methylribose adenine
  modified_base 12: mod_base = gm
  modified_base 13: mod_base = OTHER; note = 2-O-methylribose adenine
  modified_base 14: mod_base = OTHER; note = 2-fluororibose adenine
  modified_base 15: mod_base = cm
  modified_base 16: mod_base = OTHER; note = 2-fluororibose adenine
  modified_base 17: mod_base = cm
  modified_base 18: mod_base = OTHER; note = 2-fluororibose uracil
  modified_base 19: mod_base = gm
  modified_base 20: mod_base = OTHER; note = 2-fluororibose uracil
  modified_base 21: mod_base = um
  modified_base 21..22: mod_base = OTHER; note = S-phosphorothioate
  modified_base 22: mod_base = um
  modified_base 22..23: mod_base = OTHER; note = S-phosphorothioate
  modified_base 23: mod_base = um
  source 1..23: mol_type = other RNA
ttatagagcaagaacactgtttt

SEQ ID NO: 351 - RNA, 23 nt, synthetic construct
  misc_feature 1..23: note = Synthetic: WV-37064
  misc_feature 1..23: note = Synthetic: SSR-0103076
  modified_base 1: mod_base = um
  modified_base 1..2: mod_base = OTHER; note = R-phosphorothioate
  modified_base 2: mod_base = OTHER; note = 2-fluororibose uracil
  modified_base 2..3: mod_base = OTHER; note = S-phosphorothioate
  modified_base 3: mod_base = OTHER; note = 2-O-methylribose adenine
  modified_base 3..4: mod_base = OTHER; note = R-phosphorothioate
  modified_base 4: mod_base = OTHER; note = 2-fluororibose uracil
  modified_base 4..5: mod_base = OTHER; note = S-phosphorothioate
  modified_base 5: mod_base = OTHER; note = 2-O-methylribose adenine
  modified_base 5..6: mod_base = OTHER; note = R-phosphorothioate
  modified_base 6: mod_base = OTHER; note = 2-fluororibose guanine
  modified_base 6..7: mod_base = OTHER; note = S-phosphorothioate
  modified_base 7: mod_base = OTHER; note = 2-O-methylribose adenine
  modified_base 7..8: mod_base = OTHER; note = R-phosphorothioate
  modified_base 8: mod_base = OTHER; note = 2-fluororibose guanine
  modified_base 8..9: mod_base = OTHER; note = S-phosphorothioate
  modified_base 9: mod_base = cm
  modified_base 10: mod_base = OTHER; note = 2-fluororibose adenine
  modified_base 11: mod_base = OTHER; note = 2-O-methylribose adenine
  modified_base 12: mod_base = gm
  modified_base 13: mod_base = OTHER; note = 2-O-methylribose adenine
  modified_base 14: mod_base = OTHER; note = 2-fluororibose adenine
  modified_base 15: mod_base = cm
  modified_base 16: mod_base = OTHER; note = 2-fluororibose adenine
  modified_base 17: mod_base = cm
  modified_base 18: mod_base = OTHER; note = 2-fluororibose uracil
  modified_base 19: mod_base = gm
  modified_base 20: mod_base = OTHER; note = 2-fluororibose uracil
  modified_base 21: mod_base = um
  modified_base 21..22: mod_base = OTHER; note = S-phosphorothioate
  modified_base 22: mod_base = um
  modified_base 22..23: mod_base = OTHER; note = S-phosphorothioate
  modified_base 23: mod_base = um
  source 1..23: mol_type = other RNA
ttatagagcaagaacactgtttt

SEQ ID NO: 352 - RNA, 23 nt, synthetic construct
  misc_feature 1..23: note = Synthetic: WV-37065
  misc_feature 1..23: note = Synthetic: SSR-0103077
  modified_base 1: mod_base = um
  modified_base 1..2: mod_base = OTHER; note = R-phosphorothioate
  modified_base 2: mod_base = OTHER; note = 2-fluororibose uracil
  modified_base 2..3: mod_base = OTHER; note = S-phosphorothioate
  modified_base 3: mod_base = OTHER; note = 2-O-methylribose adenine
  modified_base 3..4: mod_base = OTHER; note = R-phosphorothioate
  modified_base 4: mod_base = OTHER; note = 2-fluororibose uracil
  modified_base 4..5: mod_base = OTHER; note = S-phosphorothioate
  modified_base 5: mod_base = OTHER; note = 2-O-methylribose adenine
  modified_base 5..6: mod_base = OTHER; note = R-phosphorothioate
  modified_base 6: mod_base = OTHER; note = 2-fluororibose guanine
  modified_base 6..7: mod_base = OTHER; note = S-phosphorothioate
  modified_base 7: mod_base = OTHER; note = 2-O-methylribose adenine
  modified_base 7..8: mod_base = OTHER; note = S-phosphorothioate
  modified_base 8: mod_base = OTHER; note = 2-fluororibose guanine
  modified_base 8..9: mod_base = OTHER; note = R-phosphorothioate
  modified_base 9: mod_base = cm
  modified_base 10: mod_base = OTHER; note = 2-fluororibose adenine
  modified_base 11: mod_base = OTHER; note = 2-O-methylribose adenine
  modified_base 12: mod_base = gm
  modified_base 13: mod_base = OTHER; note = 2-O-methylribose adenine
  modified_base 14: mod_base = OTHER; note = 2-fluororibose adenine
  modified_base 15: mod_base = cm
  modified_base 16: mod_base = OTHER; note = 2-fluororibose adenine
  modified_base 17: mod_base = cm
  modified_base 18: mod_base = OTHER; note = 2-fluororibose uracil
  modified_base 19: mod_base = gm
  modified_base 20: mod_base = OTHER; note = 2-fluororibose uracil
  modified_base 21: mod_base = um
  modified_base 21..22: mod_base = OTHER; note = S-phosphorothioate
  modified_base 22: mod_base = um
  modified_base 22..23: mod_base = OTHER; note = S-phosphorothioate
  modified_base 23: mod_base = um
  source 1..23: mol_type = other RNA
ttatagagcaagaacactgtttt

SEQ ID NO: 353 - RNA, 23 nt, synthetic construct
  misc_feature 1..23: note = Synthetic: WV-37066
  misc_feature 1..23: note = Synthetic: SSR-0103078
  modified_base 1: mod_base = um
  modified_base 1..2: mod_base = OTHER; note = R-phosphorothioate
  modified_base 2: mod_base = OTHER; note = 2-fluororibose uracil
  modified_base 2..3: mod_base = OTHER; note = S-phosphorothioate
  modified_base 3: mod_base = OTHER; note = 2-O-methylribose adenine
  modified_base 3..4: mod_base = OTHER; note = R-phosphorothioate
  modified_base 4: mod_base = OTHER; note = 2-fluororibose uracil
  modified_base 4..5: mod_base = OTHER; note = S-phosphorothioate
  modified_base 5: mod_base = OTHER; note = 2-O-methylribose adenine
  modified_base 5..6: mod_base = OTHER; note = R-phosphorothioate
  modified_base 6: mod_base = OTHER; note = 2-fluororibose guanine
  modified_base 6..7: mod_base = OTHER; note = S-phosphorothioate
  modified_base 7: mod_base = OTHER; note = 2-O-methylribose adenine
  modified_base 7..8: mod_base = OTHER; note = S-phosphorothioate
  modified_base 8: mod_base = OTHER; note = 2-fluororibose guanine
  modified_base 8..9: mod_base = OTHER; note = S-phosphorothioate
  modified_base 9: mod_base = cm
  modified_base 10: mod_base = OTHER; note = 2-fluororibose adenine
  modified_base 11: mod_base = OTHER; note = 2-O-methylribose adenine
  modified_base 12: mod_base = gm
  modified_base 13: mod_base = OTHER; note = 2-O-methylribose adenine
  modified_base 14: mod_base = OTHER; note = 2-fluororibose adenine
  modified_base 15: mod_base = cm
  modified_base 16: mod_base = OTHER; note = 2-fluororibose adenine
  modified_base 17: mod_base = cm
  modified_base 18: mod_base = OTHER; note = 2-fluororibose uracil
  modified_base 19: mod_base = gm
  modified_base 20: mod_base = OTHER; note = 2-fluororibose uracil
  modified_base 21: mod_base = um
  modified_base 21..22: mod_base = OTHER; note = S-phosphorothioate
  modified_base 22: mod_base = um
  modified_base 22..23: mod_base = OTHER; note = S-phosphorothioate
  modified_base 23: mod_base = um
  source 1..23: mol_type = other RNA
ttatagagcaagaacactgtttt

SEQ ID NO: 354 - RNA, 23 nt, synthetic construct
  misc_feature 1..23: note = Synthetic: WV-37067
  misc_feature 1..23: note = Synthetic: SSR-0103079
  modified_base 1: mod_base = um
  modified_base 1..2: mod_base = OTHER; note = R-phosphorothioate
  modified_base 2: mod_base = OTHER; note = 2-fluororibose uracil
  modified_base 2..3: mod_base = OTHER; note = S-phosphorothioate
  modified_base 3: mod_base = OTHER; note = 2-O-methylribose adenine
  modified_base 3..4: mod_base = OTHER; note = R-phosphorothioate
  modified_base 4: mod_base = OTHER; note = 2-fluororibose uracil
  modified_base 4..5: mod_base = OTHER; note = S-phosphorothioate
  modified_base 5: mod_base = OTHER; note = 2-O-methylribose adenine
  modified_base 5..6: mod_base = OTHER; note = S-phosphorothioate
  modified_base 6: mod_base = OTHER; note = 2-fluororibose guanine
  modified_base 6..7: mod_base = OTHER; note = R-phosphorothioate
  modified_base 7: mod_base = OTHER; note = 2-O-methylribose adenine
  modified_base 7..8: mod_base = OTHER; note = R-phosphorothioate
  modified_base 8: mod_base = OTHER; note = 2-fluororibose guanine
  modified_base 8..9: mod_base = OTHER; note = R-phosphorothioate
  modified_base 9: mod_base = cm
  modified_base 10: mod_base = OTHER; note = 2-fluororibose adenine
  modified_base 11: mod_base = OTHER; note = 2-O-methylribose adenine
  modified_base 12: mod_base = gm
  modified_base 13: mod_base = OTHER; note = 2-O-methylribose adenine
  modified_base 14: mod_base = OTHER; note = 2-fluororibose adenine
  modified_base 15: mod_base = cm
  modified_base 16: mod_base = OTHER; note = 2-fluororibose adenine
  modified_base 17: mod_base = cm
  modified_base 18: mod_base = OTHER; note = 2-fluororibose uracil
  modified_base 19: mod_base = gm
  modified_base 20: mod_base = OTHER; note = 2-fluororibose uracil
  modified_base 21: mod_base = um
  modified_base 21..22: mod_base = OTHER; note = S-phosphorothioate
  modified_base 22: mod_base = um
  modified_base 22..23: mod_base = OTHER; note = S-phosphorothioate
  modified_base 23: mod_base = um
  source 1..23: mol_type = other RNA
ttatagagcaagaacactgtttt

SEQ ID NO: 355 - RNA, 23 nt, synthetic construct
  misc_feature 1..23: note = Synthetic: WV-37068
  misc_feature 1..23: note = Synthetic: SSR-0103080
  modified_base 1: mod_base = um
  modified_base 1..2: mod_base = OTHER; note = R-phosphorothioate
  modified_base 2: mod_base = OTHER; note = 2-fluororibose uracil
  modified_base 2..3: mod_base = OTHER; note = S-phosphorothioate
  modified_base 3: mod_base = OTHER; note = 2-O-methylribose adenine
  modified_base 3..4: mod_base = OTHER; note = R-phosphorothioate
  modified_base 4: mod_base = OTHER; note = 2-fluororibose uracil
  modified_base 4..5: mod_base = OTHER; note = S-phosphorothioate
  modified_base 5: mod_base = OTHER; note = 2-O-methylribose adenine
  modified_base 5..6: mod_base = OTHER; note = S-phosphorothioate
  modified_base 6: mod_base = OTHER; note = 2-fluororibose guanine
  modified_base 6..7: mod_base = OTHER; note = R-phosphorothioate
  modified_base 7: mod_base = OTHER; note = 2-O-methylribose adenine
  modified_base 7..8: mod_base = OTHER; note = R-phosphorothioate
  modified_base 8: mod_base = OTHER; note = 2-fluororibose guanine
  modified_base 8..9: mod_base = OTHER; note = S-phosphorothioate
  modified_base 9: mod_base = cm
  modified_base 10: mod_base = OTHER; note = 2-fluororibose adenine
  modified_base 11: mod_base = OTHER; note = 2-O-methylribose adenine
  modified_base 12: mod_base = gm
  modified_base 13: mod_base = OTHER; note = 2-O-methylribose adenine
  modified_base 14: mod_base = OTHER; note = 2-fluororibose adenine
  modified_base 15: mod_base = cm
  modified_base 16: mod_base = OTHER; note = 2-fluororibose adenine
  modified_base 17: mod_base = cm
  modified_base 18: mod_base = OTHER; note = 2-fluororibose uracil
  modified_base 19: mod_base = gm
  modified_base 20: mod_base = OTHER; note = 2-fluororibose uracil
  modified_base 21: mod_base = um
  modified_base 21..22: mod_base = OTHER; note = S-phosphorothioate
  modified_base 22: mod_base = um
  modified_base 22..23: mod_base = OTHER; note = S-phosphorothioate
  modified_base 23: mod_base = um
  source 1..23: mol_type = other RNA
ttatagagcaagaacactgtttt

SEQ ID NO: 356 - RNA, 23 nt, synthetic construct
  misc_feature 1..23: note = Synthetic: WV-37069
  misc_feature 1..23: note = Synthetic: SSR-0103081
  modified_base 1: mod_base = um
  modified_base 1..2: mod_base = OTHER; note = R-phosphorothioate
  modified_base 2: mod_base = OTHER; note = 2-fluororibose uracil
  modified_base 2..3: mod_base = OTHER; note = S-phosphorothioate
  modified_base 3: mod_base = OTHER; note = 2-O-methylribose adenine
  modified_base 3..4: mod_base = OTHER; note = R-phosphorothioate
  modified_base 4: mod_base = OTHER; note = 2-fluororibose uracil
  modified_base 4..5: mod_base = OTHER; note = S-phosphorothioate
  modified_base 5: mod_base = OTHER; note = 2-O-methylribose adenine
  modified_base 5..6: mod_base = OTHER; note = S-phosphorothioate
  modified_base 6: mod_base = OTHER; note = 2-fluororibose guanine
  modified_base 6..7: mod_base = OTHER; note = R-phosphorothioate
  modified_base 7: mod_base = OTHER; note = 2-O-methylribose adenine
  modified_base 7..8: mod_base = OTHER; note = S-phosphorothioate
  modified_base 8: mod_base = OTHER; note = 2-fluororibose guanine
  modified_base 8..9: mod_base = OTHER; note = R-phosphorothioate
  modified_base 9: mod_base = cm
  modified_base 10: mod_base = OTHER; note = 2-fluororibose adenine
  modified_base 11: mod_base = OTHER; note = 2-O-methylribose adenine
  modified_base 12: mod_base = gm
  modified_base 13: mod_base = OTHER; note = 2-O-methylribose adenine
  modified_base 14: mod_base = OTHER; note = 2-fluororibose adenine
  modified_base 15: mod_base = cm
  modified_base 16: mod_base = OTHER; note = 2-fluororibose adenine
  modified_base 17: mod_base = cm
  modified_base 18: mod_base = OTHER; note = 2-fluororibose uracil
  modified_base 19: mod_base = gm
  modified_base 20: mod_base = OTHER; note = 2-fluororibose uracil
  modified_base 21: mod_base = um
  modified_base 21..22: mod_base = OTHER; note = S-phosphorothioate
  modified_base 22: mod_base = um
  modified_base 22..23: mod_base = OTHER; note = S-phosphorothioate
  modified_base 23: mod_base = um
  source 1..23: mol_type = other RNA
ttatagagcaagaacactgtttt

SEQ ID NO: 357 - RNA, 23 nt, synthetic construct
  misc_feature 1..23: note = Synthetic: WV-37070
  misc_feature 1..23: note = Synthetic: SSR-0103082
  modified_base 1: mod_base = um
  modified_base 1..2: mod_base = OTHER; note = R-phosphorothioate
  modified_base 2: mod_base = OTHER; note = 2-fluororibose uracil
  modified_base 2..3: mod_base = OTHER; note = S-phosphorothioate
  modified_base 3: mod_base = OTHER; note = 2-O-methylribose adenine
  modified_base 3..4: mod_base = OTHER; note = R-phosphorothioate
  modified_base 4: mod_base = OTHER; note = 2-fluororibose uracil
  modified_base 4..5: mod_base = OTHER; note = S-phosphorothioate
  modified_base 5: mod_base = OTHER; note = 2-O-methylribose adenine
  modified_base 5..6: mod_base = OTHER; note = S-phosphorothioate
  modified_base 6: mod_base = OTHER; note = 2-fluororibose guanine
  modified_base 6..7: mod_base = OTHER; note = R-phosphorothioate
  modified_base 7: mod_base = OTHER; note = 2-O-methylribose adenine
  modified_base 7..8: mod_base = OTHER; note = S-phosphorothioate
  modified_base 8: mod_base = OTHER; note = 2-fluororibose guanine
  modified_base 8..9: mod_base = OTHER; note = S-phosphorothioate
  modified_base 9: mod_base = cm
  modified_base 10: mod_base = OTHER; note = 2-fluororibose adenine
  modified_base 11: mod_base = OTHER; note = 2-O-methylribose adenine
  modified_base 12: mod_base = gm
  modified_base 13: mod_base = OTHER; note = 2-O-methylribose adenine
  modified_base 14: mod_base = OTHER; note = 2-fluororibose adenine
  modified_base 15: mod_base = cm
  modified_base 16: mod_base = OTHER; note = 2-fluororibose adenine
  modified_base 17: mod_base = cm
  modified_base 18: mod_base = OTHER; note = 2-fluororibose uracil
  modified_base 19: mod_base = gm
  modified_base 20: mod_base = OTHER; note = 2-fluororibose uracil
  modified_base 21: mod_base = um
  modified_base 21..22: mod_base = OTHER; note = S-phosphorothioate
  modified_base 22: mod_base = um
  modified_base 22..23: mod_base = OTHER; note = S-phosphorothioate
  modified_base 23: mod_base = um
  source 1..23: mol_type = other RNA
ttatagagcaagaacactgtttt

SEQ ID NO: 358 - RNA, 23 nt, synthetic construct
  misc_feature 1..23: note = Synthetic: WV-37071
  misc_feature 1..23: note = Synthetic: SSR-0103083
  modified_base 1: mod_base = um
  modified_base 1..2: mod_base = OTHER; note = R-phosphorothioate
  modified_base 2: mod_base = OTHER; note = 2-fluororibose uracil
  modified_base 2..3: mod_base = OTHER; note = S-phosphorothioate
  modified_base 3: mod_base = OTHER; note = 2-O-methylribose adenine
  modified_base 3..4: mod_base = OTHER; note = R-phosphorothioate
  modified_base 4: mod_base = OTHER; note = 2-fluororibose uracil
  modified_base 4..5: mod_base = OTHER; note = S-phosphorothioate
  modified_base 5: mod_base = OTHER; note = 2-O-methylribose adenine
  modified_base 5..6: mod_base = OTHER; note = S-phosphorothioate
  modified_base 6: mod_base = OTHER; note = 2-fluororibose guanine
  modified_base 6..7: mod_base = OTHER; note = S-phosphorothioate
  modified_base 7: mod_base = OTHER; note = 2-O-methylribose adenine
  modified_base 7..8: mod_base = OTHER; note = R-phosphorothioate
  modified_base 8: mod_base = OTHER; note = 2-fluororibose guanine
  modified_base 8..9: mod_base = OTHER; note = R-phosphorothioate
  modified_base 9: mod_base = cm
  modified_base 10: mod_base = OTHER; note = 2-fluororibose adenine
  modified_base 11: mod_base = OTHER; note = 2-O-methylribose adenine
  modified_base 12: mod_base = gm
  modified_base 13: mod_base = OTHER; note = 2-O-methylribose adenine
  modified_base 14: mod_base = OTHER; note = 2-fluororibose adenine
  modified_base 15: mod_base = cm
  modified_base 16: mod_base = OTHER; note = 2-fluororibose adenine
  modified_base 17: mod_base = cm
  modified_base 18: mod_base = OTHER; note = 2-fluororibose uracil
  modified_base 19: mod_base = gm
  modified_base 20: mod_base = OTHER; note = 2-fluororibose uracil
  modified_base 21: mod_base = um
  modified_base 21..22: mod_base = OTHER; note = S-phosphorothioate
  modified_base 22: mod_base = um
  modified_base 22..23: mod_base = OTHER; note = S-phosphorothioate
  modified_base 23: mod_base = um
  source 1..23: mol_type = other RNA
ttatagagcaagaacactgtttt

SEQ ID NO: 359 - RNA, 23 nt, synthetic construct
  misc_feature 1..23: note = Synthetic: WV-37072
  misc_feature 1..23: note = Synthetic: SSR-0103084
  modified_base 1: mod_base = um
  modified_base 1..2: mod_base = OTHER; note = R-phosphorothioate
  modified_base 2: mod_base = OTHER; note = 2-fluororibose uracil
  modified_base 2..3: mod_base = OTHER; note = S-phosphorothioate
  modified_base 3: mod_base = OTHER; note = 2-O-methylribose adenine
  modified_base 3..4: mod_base = OTHER; note = R-phosphorothioate
  modified_base 4: mod_base = OTHER; note = 2-fluororibose uracil
  modified_base 4..5: mod_base = OTHER; note = S-phosphorothioate
  modified_base 5: mod_base = OTHER; note = 2-O-methylribose adenine
  modified_base 5..6: mod_base = OTHER; note = S-phosphorothioate
  modified_base 6: mod_base = OTHER; note = 2-fluororibose guanine
  modified_base 6..7: mod_base = OTHER; note = S-phosphorothioate
  modified_base 7: mod_base = OTHER; note = 2-O-methylribose adenine
  modified_base 7..8: mod_base = OTHER; note = R-phosphorothioate
  modified_base 8: mod_base = OTHER; note = 2-fluororibose guanine
  modified_base 8..9: mod_base = OTHER; note = S-phosphorothioate
  modified_base 9: mod_base = cm
  modified_base 10: mod_base = OTHER; note = 2-fluororibose adenine
  modified_base 11: mod_base = OTHER; note = 2-O-methylribose adenine
  modified_base 12: mod_base = gm
  modified_base 13: mod_base = OTHER; note = 2-O-methylribose adenine
  modified_base 14: mod_base = OTHER; note = 2-fluororibose adenine
  modified_base 15: mod_base = cm
  modified_base 16: mod_base = OTHER; note = 2-fluororibose adenine
  modified_base 17: mod_base = cm
  modified_base 18: mod_base = OTHER; note = 2-fluororibose uracil
  modified_base 19: mod_base = gm
  modified_base 20: mod_base = OTHER; note = 2-fluororibose uracil
  modified_base 21: mod_base = um
  modified_base 21..22: mod_base = OTHER; note = S-phosphorothioate
  modified_base 22: mod_base = um
  modified_base 22..23: mod_base = OTHER; note = S-phosphorothioate
  modified_base 23: mod_base = um
  source 1..23: mol_type = other RNA
ttatagagcaagaacactgtttt

SEQ ID NO: 360 - RNA, 23 nt, synthetic construct
  misc_feature 1..23: note = Synthetic: WV-37073
  misc_feature 1..23: note = Synthetic: SSR-0103085
  modified_base 1: mod_base = um
  modified_base 1..2: mod_base = OTHER; note = R-phosphorothioate
  modified_base 2: mod_base = OTHER; note = 2-fluororibose uracil
  modified_base 2..3: mod_base = OTHER; note = S-phosphorothioate
  modified_base 3: mod_base = OTHER; note = 2-O-methylribose adenine
  modified_base 3..4: mod_base = OTHER; note = R-phosphorothioate
  modified_base 4: mod_base = OTHER; note = 2-fluororibose uracil
  modified_base 4..5: mod_base = OTHER; note = S-phosphorothioate
  modified_base 5: mod_base = OTHER; note = 2-O-methylribose adenine
  modified_base 5..6: mod_base = OTHER; note = S-phosphorothioate
  modified_base 6: mod_base = OTHER; note = 2-fluororibose guanine
  modified_base 6..7: mod_base = OTHER; note = S-phosphorothioate
  modified_base 7: mod_base = OTHER; note = 2-O-methylribose adenine
  modified_base 7..8: mod_base = OTHER; note = S-phosphorothioate
  modified_base 8: mod_base = OTHER; note = 2-fluororibose guanine
  modified_base 8..9: mod_base = OTHER; note = R-phosphorothioate
  modified_base 9: mod_base = cm
  modified_base 10: mod_base = OTHER; note = 2-fluororibose adenine
  modified_base 11: mod_base = OTHER; note = 2-O-methylribose adenine
  modified_base 12: mod_base = gm
  modified_base 13: mod_base = OTHER; note = 2-O-methylribose adenine
  modified_base 14: mod_base = OTHER; note = 2-fluororibose adenine
  modified_base 15: mod_base = cm
  modified_base 16: mod_base = OTHER; note = 2-fluororibose adenine
  modified_base 17: mod_base = cm
  modified_base 18: mod_base = OTHER; note = 2-fluororibose uracil
  modified_base 19: mod_base = gm
  modified_base 20: mod_base = OTHER; note = 2-fluororibose uracil
  modified_base 21: mod_base = um
  modified_base 21..22: mod_base = OTHER; note = S-phosphorothioate
  modified_base 22: mod_base = um
  modified_base 22..23: mod_base = OTHER; note = S-phosphorothioate
  modified_base 23: mod_base = um
  source 1..23: mol_type = other RNA
ttatagagcaagaacactgtttt

SEQ ID NO: 361 - RNA, 23 nt, synthetic construct
  misc_feature 1..23: note = Synthetic: WV-37074
  misc_feature 1..23: note = Synthetic: SSR-0103086
  modified_base 1: mod_base = um
  modified_base 1..2: mod_base = OTHER; note = R-phosphorothioate
  modified_base 2: mod_base = OTHER; note = 2-fluororibose uracil
  modified_base 2..3: mod_base = OTHER; note = S-phosphorothioate
  modified_base 3: mod_base = OTHER; note = 2-O-methylribose adenine
  modified_base 3..4: mod_base = OTHER; note = R-phosphorothioate
  modified_base 4: mod_base = OTHER; note = 2-fluororibose uracil
  modified_base 4..5: mod_base = OTHER; note = S-phosphorothioate
  modified_base 5: mod_base = OTHER; note = 2-O-methylribose adenine
  modified_base 5..6: mod_base = OTHER; note = S-phosphorothioate
  modified_base 6: mod_base = OTHER; note = 2-fluororibose guanine
  modified_base 6..7: mod_base = OTHER; note = S-phosphorothioate
  modified_base 7: mod_base = OTHER; note = 2-O-methylribose adenine
  modified_base 7..8: mod_base = OTHER; note = S-phosphorothioate
  modified_base 8: mod_base = OTHER; note = 2-fluororibose guanine
  modified_base 8..9: mod_base = OTHER; note = S-phosphorothioate
  modified_base 9: mod_base = cm
  modified_base 10: mod_base = OTHER; note = 2-fluororibose adenine
  modified_base 11: mod_base = OTHER; note = 2-O-methylribose adenine
  modified_base 12: mod_base = gm
  modified_base 13: mod_base = OTHER; note = 2-O-methylribose adenine
  modified_base 14: mod_base = OTHER; note = 2-fluororibose adenine
  modified_base 15: mod_base = cm
  modified_base 16: mod_base = OTHER; note = 2-fluororibose adenine
  modified_base 17: mod_base = cm
  modified_base 18: mod_base = OTHER; note = 2-fluororibose uracil
  modified_base 19: mod_base = gm
  modified_base 20: mod_base = OTHER; note = 2-fluororibose uracil
  modified_base 21: mod_base = um
  modified_base 21..22: mod_base = OTHER; note = S-phosphorothioate
  modified_base 22: mod_base = um
  modified_base 22..23: mod_base = OTHER; note = S-phosphorothioate
  modified_base 23: mod_base = um
  source 1..23: mol_type = other RNA
ttatagagcaagaacactgtttt

SEQ ID NO: 362 - RNA, 23 nt, synthetic construct
  misc_feature 1..23: note = Synthetic: WV-37075
  misc_feature 1..23: note = Synthetic: SSR-0103087
  modified_base 1: mod_base = um
  modified_base 1..2: mod_base = OTHER; note = R-phosphorothioate
  modified_base 2: mod_base = OTHER; note = 2-fluororibose uracil
  modified_base 2..3: mod_base = OTHER; note = S-phosphorothioate
  modified_base 3: mod_base = OTHER; note = 2-O-methylribose adenine
  modified_base 3..4: mod_base = OTHER; note = S-phosphorothioate
  modified_base 4: mod_base = OTHER; note = 2-fluororibose uracil
  modified_base 4..5: mod_base = OTHER; note = R-phosphorothioate
  modified_base 5: mod_base = OTHER; note = 2-O-methylribose adenine
  modified_base 5..6: mod_base = OTHER; note = R-phosphorothioate
  modified_base 6: mod_base = OTHER; note = 2-fluororibose guanine
  modified_base 6..7: mod_base = OTHER; note = R-phosphorothioate
  modified_base 7: mod_base = OTHER; note = 2-O-methylribose adenine
  modified_base 7..8: mod_base = OTHER; note = R-phosphorothioate
  modified_base 8: mod_base = OTHER; note = 2-fluororibose guanine
  modified_base 8..9: mod_base = OTHER; note = R-phosphorothioate
  modified_base 9: mod_base = cm
  modified_base 10: mod_base = OTHER; note = 2-fluororibose adenine
  modified_base 11: mod_base = OTHER; note = 2-O-methylribose adenine
  modified_base 12: mod_base = gm
  modified_base 13: mod_base = OTHER; note = 2-O-methylribose adenine
  modified_base 14: mod_base = OTHER; note = 2-fluororibose adenine
  modified_base 15: mod_base = cm
  modified_base 16: mod_base = OTHER; note = 2-fluororibose adenine
  modified_base 17: mod_base = cm
  modified_base 18: mod_base = OTHER; note = 2-fluororibose uracil
  modified_base 19: mod_base = gm
  modified_base 20: mod_base = OTHER; note = 2-fluororibose uracil
  modified_base 21: mod_base = um
  modified_base 21..22: mod_base = OTHER; note = S-phosphorothioate
  modified_base 22: mod_base = um
  modified_base 22..23: mod_base = OTHER; note = S-phosphorothioate
  modified_base 23: mod_base = um
  source 1..23: mol_type = other RNA
ttatagagcaagaacactgtttt

SEQ ID NO: 363 - RNA, 23 nt, synthetic construct
  misc_feature 1..23: note = Synthetic: WV-37076
  misc_feature 1..23: note = Synthetic: SSR-0103088
  modified_base 1: mod_base = um
  modified_base 1..2: mod_base = OTHER; note = R-phosphorothioate
  modified_base 2: mod_base = OTHER; note = 2-fluororibose uracil
  modified_base 2..3: mod_base = OTHER; note = S-phosphorothioate
  modified_base 3: mod_base = OTHER; note = 2-O-methylribose adenine
  modified_base 3..4: mod_base = OTHER; note = S-phosphorothioate
  modified_base 4: mod_base = OTHER; note = 2-fluororibose uracil
  modified_base 4..5: mod_base = OTHER; note = R-phosphorothioate
  modified_base 5: mod_base = OTHER; note = 2-O-methylribose adenine
  modified_base 5..6: mod_base = OTHER; note = R-phosphorothioate
  modified_base 6: mod_base = OTHER; note = 2-fluororibose guanine
  modified_base 6..7: mod_base = OTHER; note = R-phosphorothioate
  modified_base 7: mod_base = OTHER; note = 2-O-methylribose adenine
  modified_base 7..8: mod_base = OTHER; note = R-phosphorothioate
  modified_base 8: mod_base = OTHER; note = 2-fluororibose guanine
  modified_base 8..9: mod_base = OTHER; note = S-phosphorothioate
  modified_base 9: mod_base = cm
  modified_base 10: mod_base = OTHER; note = 2-fluororibose adenine
  modified_base 11: mod_base = OTHER; note = 2-O-methylribose adenine
  modified_base 12: mod_base = gm
  modified_base 13: mod_base = OTHER; note = 2-O-methylribose adenine
  modified_base 14: mod_base = OTHER; note = 2-fluororibose adenine
  modified_base 15: mod_base = cm
  modified_base 16: mod_base = OTHER; note = 2-fluororibose adenine
  modified_base 17: mod_base = cm
  modified_base 18: mod_base = OTHER; note = 2-fluororibose uracil
  modified_base 19: mod_base = gm
  modified_base 20: mod_base = OTHER; note = 2-fluororibose uracil
  modified_base 21: mod_base = um
  modified_base 21..22: mod_base = OTHER; note = S-phosphorothioate
  modified_base 22: mod_base = um
  modified_base 22..23: mod_base = OTHER; note = S-phosphorothioate
  modified_base 23: mod_base = um
  source 1..23: mol_type = other RNA
ttatagagcaagaacactgtttt

SEQ ID NO: 364 - RNA, 23 nt, synthetic construct
  misc_feature 1..23: note = Synthetic: WV-37077
  misc_feature 1..23: note = Synthetic: SSR-0103089
  modified_base 1: mod_base = um
  modified_base 1..2: mod_base = OTHER; note = R-phosphorothioate
  modified_base 2: mod_base = OTHER; note = 2-fluororibose uracil
  modified_base 2..3: mod_base = OTHER; note = S-phosphorothioate
  modified_base 3: mod_base = OTHER; note = 2-O-methylribose adenine
  modified_base 3..4: mod_base = OTHER; note = S-phosphorothioate
  modified_base 4: mod_base = OTHER; note = 2-fluororibose uracil
  modified_base 4..5: mod_base = OTHER; note = R-phosphorothioate
  modified_base 5: mod_base = OTHER; note = 2-O-methylribose adenine
  modified_base 5..6: mod_base = OTHER; note = R-phosphorothioate
  modified_base 6: mod_base = OTHER; note = 2-fluororibose guanine
  modified_base 6..7: mod_base = OTHER; note = R-phosphorothioate
  modified_base 7: mod_base = OTHER; note = 2-O-methylribose adenine
  modified_base 7..8: mod_base = OTHER; note = S-phosphorothioate
  modified_base 8: mod_base = OTHER; note = 2-fluororibose guanine
  modified_base 8..9: mod_base = OTHER; note = R-phosphorothioate
  modified_base 9: mod_base = cm
  modified_base 10: mod_base = OTHER; note = 2-fluororibose adenine
  modified_base 11: mod_base = OTHER; note = 2-O-methylribose adenine
  modified_base 12: mod_base = gm
  modified_base 13: mod_base = OTHER; note = 2-O-methylribose adenine
  modified_base 14: mod_base = OTHER; note = 2-fluororibose adenine
  modified_base 15: mod_base = cm
  modified_base 16: mod_base = OTHER; note = 2-fluororibose adenine
  modified_base 17: mod_base = cm
  modified_base 18: mod_base = OTHER; note = 2-fluororibose uracil
  modified_base 19: mod_base = gm
  modified_base 20: mod_base = OTHER; note = 2-fluororibose uracil
  modified_base 21: mod_base = um
  modified_base 21..22: mod_base = OTHER; note = S-phosphorothioate
  modified_base 22: mod_base = um
  modified_base 22..23: mod_base = OTHER; note = S-phosphorothioate
  modified_base 23: mod_base = um
  source 1..23: mol_type = other RNA
ttatagagcaagaacactgtttt

SEQ ID NO: 365 - RNA, 23 nt, synthetic construct
  misc_feature 1..23: note = Synthetic: WV-37078
  misc_feature 1..23: note = Synthetic: SSR-0103090
  modified_base 1: mod_base = um
  modified_base 1..2: mod_base = OTHER; note = R-phosphorothioate
  modified_base 2: mod_base = OTHER; note = 2-fluororibose uracil
  modified_base 2..3: mod_base = OTHER; note = S-phosphorothioate
  modified_base 3: mod_base = OTHER; note = 2-O-methylribose adenine
  modified_base 3..4: mod_base = OTHER; note = S-phosphorothioate
  modified_base 4: mod_base = OTHER; note = 2-fluororibose uracil
  modified_base 4..5: mod_base = OTHER; note = R-phosphorothioate
  modified_base 5: mod_base = OTHER; note = 2-O-methylribose adenine
  modified_base 5..6: mod_base = OTHER; note = R-phosphorothioate
  modified_base 6: mod_base = OTHER; note = 2-fluororibose guanine
  modified_base 6..7: mod_base = OTHER; note = R-phosphorothioate
  modified_base 7: mod_base = OTHER; note = 2-O-methylribose adenine
  modified_base 7..8: mod_base = OTHER; note = S-phosphorothioate
  modified_base 8: mod_base = OTHER; note = 2-fluororibose guanine
  modified_base 8..9: mod_base = OTHER; note = S-phosphorothioate
  modified_base 9: mod_base = cm
  modified_base 10: mod_base = OTHER; note = 2-fluororibose adenine
  modified_base 11: mod_base = OTHER; note = 2-O-methylribose adenine
  modified_base 12: mod_base = gm
  modified_base 13: mod_base = OTHER; note = 2-O-methylribose adenine
  modified_base 14: mod_base = OTHER; note = 2-fluororibose adenine
  modified_base 15: mod_base = cm
  modified_base 16: mod_base = OTHER; note = 2-fluororibose adenine
  modified_base 17: mod_base = cm
  modified_base 18: mod_base = OTHER; note = 2-fluororibose uracil
  modified_base 19: mod_base = gm
  modified_base 20: mod_base = OTHER; note = 2-fluororibose uracil
  modified_base 21: mod_base = um
  modified_base 21..22: mod_base = OTHER; note = S-phosphorothioate
  modified_base 22: mod_base = um
  modified_base 22..23: mod_base = OTHER; note = S-phosphorothioate
  modified_base 23: mod_base = um
  source 1..23: mol_type = other RNA
ttatagagcaagaacactgtttt

SEQ ID NO: 366 - RNA, 23 nt, synthetic construct
  misc_feature 1..23: note = Synthetic: WV-37079
  misc_feature 1..23: note = Synthetic: SSR-0103091
  modified_base 1: mod_base = um
  modified_base 1..2: mod_base = OTHER; note = R-phosphorothioate
  modified_base 2: mod_base = OTHER; note = 2-fluororibose uracil
  modified_base 2..3: mod_base = OTHER; note = S-phosphorothioate
  modified_base 3: mod_base = OTHER; note = 2-O-methylribose adenine
  modified_base 3..4: mod_base = OTHER; note = S-phosphorothioate
  modified_base 4: mod_base = OTHER; note = 2-fluororibose uracil
  modified_base 4..5: mod_base = OTHER; note = R-phosphorothioate
  modified_base 5: mod_base = OTHER; note = 2-O-methylribose adenine
  modified_base 5..6: mod_base = OTHER; note = R-phosphorothioate
  modified_base 6: mod_base = OTHER; note = 2-fluororibose guanine
  modified_base 6..7: mod_base = OTHER; note = S-phosphorothioate
  modified_base 7: mod_base = OTHER; note = 2-O-methylribose adenine
  modified_base 7..8: mod_base = OTHER; note = R-phosphorothioate
  modified_base 8: mod_base = OTHER; note = 2-fluororibose guanine
  modified_base 8..9: mod_base = OTHER; note = R-phosphorothioate
  modified_base 9: mod_base = cm
  modified_base 10: mod_base = OTHER; note = 2-fluororibose adenine
  modified_base 11: mod_base = OTHER; note = 2-O-methylribose adenine
  modified_base 12: mod_base = gm
  modified_base 13: mod_base = OTHER; note = 2-O-methylribose adenine
  modified_base 14: mod_base = OTHER; note = 2-fluororibose adenine
  modified_base 15: mod_base = cm
  modified_base 16: mod_base = OTHER; note = 2-fluororibose adenine
  modified_base 17: mod_base = cm
  modified_base 18: mod_base = OTHER; note = 2-fluororibose uracil
  modified_base 19: mod_base = gm
  modified_base 20: mod_base = OTHER; note = 2-fluororibose uracil
  modified_base 21: mod_base = um
  modified_base 21..22: mod_base = OTHER; note = S-phosphorothioate
  modified_base 22: mod_base = um
  modified_base 22..23: mod_base = OTHER; note = S-phosphorothioate
  modified_base 23: mod_base = um
  source 1..23: mol_type = other RNA
ttatagagcaagaacactgtttt

SEQ ID NO: 367 - RNA, 23 nt, synthetic construct
  misc_feature 1..23: note = Synthetic: WV-37080
  misc_feature 1..23: note = Synthetic: SSR-0103092
  modified_base 1: mod_base = um
  modified_base 1..2: mod_base = OTHER; note = R-phosphorothioate
  modified_base 2: mod_base = OTHER; note = 2-fluororibose uracil
  modified_base 2..3: mod_base = OTHER; note = S-phosphorothioate
  modified_base 3: mod_base = OTHER; note = 2-O-methylribose adenine
  modified_base 3..4: mod_base = OTHER; note = S-phosphorothioate
  modified_base 4: mod_base = OTHER; note = 2-fluororibose uracil
  modified_base 4..5: mod_base = OTHER; note = R-phosphorothioate
  modified_base 5: mod_base = OTHER; note = 2-O-methylribose adenine
  modified_base 5..6: mod_base = OTHER; note = R-phosphorothioate
  modified_base 6: mod_base = OTHER; note = 2-fluororibose guanine
  modified_base 6..7: mod_base = OTHER; note = S-phosphorothioate
  modified_base 7: mod_base = OTHER; note = 2-O-methylribose adenine
  modified_base 7..8: mod_base = OTHER; note = R-phosphorothioate
  modified_base 8: mod_base = OTHER; note = 2-fluororibose guanine
  modified_base 8..9: mod_base = OTHER; note = S-phosphorothioate
  modified_base 9: mod_base = cm
  modified_base 10: mod_base = OTHER; note = 2-fluororibose adenine
  modified_base 11: mod_base = OTHER; note = 2-O-methylribose adenine
  modified_base 12: mod_base = gm
  modified_base 13: mod_base = OTHER; note = 2-O-methylribose adenine
  modified_base 14: mod_base = OTHER; note = 2-fluororibose adenine
  modified_base 15: mod_base = cm
  modified_base 16: mod_base = OTHER; note = 2-fluororibose adenine
  modified_base 17: mod_base = cm
  modified_base 18: mod_base = OTHER; note = 2-fluororibose uracil
  modified_base 19: mod_base = gm
  modified_base 20: mod_base = OTHER; note = 2-fluororibose uracil
  modified_base 21: mod_base = um
  modified_base 21..22: mod_base = OTHER; note = S-phosphorothioate
  modified_base 22: mod_base = um
  modified_base 22..23: mod_base = OTHER; note = S-phosphorothioate
  modified_base 23: mod_base = um
  source 1..23: mol_type = other RNA
ttatagagcaagaacactgtttt

SEQ ID NO: 368 - RNA, 23 nt, synthetic construct
  misc_feature 1..23: note = Synthetic: WV-37081
  misc_feature 1..23: note = Synthetic: SSR-0103093
  modified_base 1: mod_base = um
  modified_base 1..2: mod_base = OTHER; note = R-phosphorothioate
  modified_base 2: mod_base = OTHER; note = 2-fluororibose uracil
  modified_base 2..3: mod_base = OTHER; note = S-phosphorothioate
  modified_base 3: mod_base = OTHER; note = 2-O-methylribose adenine
  modified_base 3..4: mod_base = OTHER; note = S-phosphorothioate
  modified_base 4: mod_base = OTHER; note = 2-fluororibose uracil
  modified_base 4..5: mod_base = OTHER; note = R-phosphorothioate
  modified_base 5: mod_base = OTHER; note = 2-O-methylribose adenine
  modified_base 5..6: mod_base = OTHER; note = R-phosphorothioate
  modified_base 6: mod_base = OTHER; note = 2-fluororibose guanine
  modified_base 6..7: mod_base = OTHER; note = S-phosphorothioate
  modified_base 7: mod_base = OTHER; note = 2-O-methylribose adenine
  modified_base 7..8: mod_base = OTHER; note = S-phosphorothioate
  modified_base 8: mod_base = OTHER; note = 2-fluororibose guanine
  modified_base 8..9: mod_base = OTHER; note = R-phosphorothioate
  modified_base 9: mod_base = cm
  modified_base 10: mod_base = OTHER; note = 2-fluororibose adenine
  modified_base 11: mod_base = OTHER; note = 2-O-methylribose adenine
  modified_base 12: mod_base = gm
  modified_base 13: mod_base = OTHER; note = 2-O-methylribose adenine
  modified_base 14: mod_base = OTHER; note = 2-fluororibose adenine
  modified_base 15: mod_base = cm
  modified_base 16: mod_base = OTHER; note = 2-fluororibose adenine
  modified_base 17: mod_base = cm
  modified_base 18: mod_base = OTHER; note = 2-fluororibose uracil
  modified_base 19: mod_base = gm
  modified_base 20: mod_base = OTHER; note = 2-fluororibose uracil
  modified_base 21: mod_base = um
  modified_base 21..22: mod_base = OTHER; note = S-phosphorothioate
  modified_base 22: mod_base = um
  modified_base 22..23: mod_base = OTHER; note = S-phosphorothioate
  modified_base 23: mod_base = um
  source 1..23: mol_type = other RNA
ttatagagcaagaacactgtttt

SEQ ID NO: 369 - RNA, 23 nt, synthetic construct
  misc_feature 1..23: note = Synthetic: WV-37082
  misc_feature 1..23: note = Synthetic: SSR-0103094
  modified_base 1: mod_base = um
  modified_base 1..2: mod_base = OTHER; note = R-phosphorothioate
  modified_base 2: mod_base = OTHER; note = 2-fluororibose uracil
  modified_base 2..3: mod_base = OTHER; note = S-phosphorothioate
  modified_base 3: mod_base = OTHER; note = 2-O-methylribose adenine
  modified_base 3..4: mod_base = OTHER; note = S-phosphorothioate
  modified_base 4: mod_base = OTHER; note = 2-fluororibose uracil
  modified_base 4..5: mod_base = OTHER; note = R-phosphorothioate
  modified_base 5: mod_base = OTHER; note = 2-O-methylribose adenine
  modified_base 5..6: mod_base = OTHER; note = R-phosphorothioate
  modified_base 6: mod_base = OTHER; note = 2-fluororibose guanine
  modified_base 6..7: mod_base = OTHER; note = S-phosphorothioate
  modified_base 7: mod_base = OTHER; note = 2-O-methylribose adenine
  modified_base 7..8: mod_base = OTHER; note = S-phosphorothioate
  modified_base 8: mod_base = OTHER; note = 2-fluororibose guanine
  modified_base 8..9: mod_base = OTHER; note = S-phosphorothioate
  modified_base 9: mod_base = cm
  modified_base 10: mod_base = OTHER; note = 2-fluororibose adenine
  modified_base 11: mod_base = OTHER; note = 2-O-methylribose adenine
  modified_base 12: mod_base = gm
  modified_base 13: mod_base = OTHER; note = 2-O-methylribose adenine
  modified_base 14: mod_base = OTHER; note = 2-fluororibose adenine
  modified_base 15: mod_base = cm
  modified_base 16: mod_base = OTHER; note = 2-fluororibose adenine
  modified_base 17: mod_base = cm
  modified_base 18: mod_base = OTHER; note = 2-fluororibose uracil
  modified_base 19: mod_base = gm
  modified_base 20: mod_base = OTHER; note = 2-fluororibose uracil
  modified_base 21: mod_base = um
  modified_base 21..22: mod_base = OTHER; note = S-phosphorothioate
  modified_base 22: mod_base = um
  modified_base 22..23: mod_base = OTHER; note = S-phosphorothioate
  modified_base 23: mod_base = um
  source 1..23: mol_type = other RNA
ttatagagcaagaacactgtttt

SEQ ID NO: 370 - RNA, 23 nt, synthetic construct
  misc_feature 1..23: note = Synthetic: WV-37083
  misc_feature 1..23: note = Synthetic: SSR-0103095
  modified_base 1: mod_base = um
  modified_base 1..2: mod_base = OTHER; note = R-phosphorothioate
  modified_base 2: mod_base = OTHER; note = 2-fluororibose uracil
  modified_base 2..3: mod_base = OTHER; note = S-phosphorothioate
  modified_base 3: mod_base = OTHER; note = 2-O-methylribose adenine
  modified_base 3..4: mod_base = OTHER; note = S-phosphorothioate
  modified_base 4: mod_base = OTHER; note = 2-fluororibose uracil
  modified_base 4..5: mod_base = OTHER; note = R-phosphorothioate
  modified_base 5: mod_base = OTHER; note = 2-O-methylribose adenine
  modified_base 5..6: mod_base = OTHER; note = S-phosphorothioate
  modified_base 6: mod_base = OTHER; note = 2-fluororibose guanine
  modified_base 6..7: mod_base = OTHER; note = R-phosphorothioate
  modified_base 7: mod_base = OTHER; note = 2-O-methylribose adenine
  modified_base 7..8: mod_base = OTHER; note = R-phosphorothioate
  modified_base 8: mod_base = OTHER; note = 2-fluororibose guanine
  modified_base 8..9: mod_base = OTHER; note = R-phosphorothioate
  modified_base 9: mod_base = cm
  modified_base 10: mod_base = OTHER; note = 2-fluororibose adenine
  modified_base 11: mod_base = OTHER; note = 2-O-methylribose adenine
  modified_base 12: mod_base = gm
  modified_base 13: mod_base = OTHER; note = 2-O-methylribose adenine
  modified_base 14: mod_base = OTHER; note = 2-fluororibose adenine
  modified_base 15: mod_base = cm
  modified_base 16: mod_base = OTHER; note = 2-fluororibose adenine
  modified_base 17: mod_base = cm
  modified_base 18: mod_base = OTHER; note = 2-fluororibose uracil
  modified_base 19: mod_base = gm
  modified_base 20: mod_base = OTHER; note = 2-fluororibose uracil
  modified_base 21: mod_base = um
  modified_base 21..22: mod_base = OTHER; note = S-phosphorothioate
  modified_base 22: mod_base = um
  modified_base 22..23: mod_base = OTHER; note = S-phosphorothioate
  modified_base 23: mod_base = um
  source 1..23: mol_type = other RNA
ttatagagcaagaacactgtttt

SEQ ID NO: 371 - RNA, 23 nt, synthetic construct
  misc_feature 1..23: note = Synthetic: WV-37084
  misc_feature 1..23: note = Synthetic: SSR-0103096
  modified_base 1: mod_base = um
  modified_base 1..2: mod_base = OTHER; note = R-phosphorothioate
  modified_base 2: mod_base = OTHER; note = 2-fluororibose uracil
  modified_base 2..3: mod_base = OTHER; note = S-phosphorothioate
  modified_base 3: mod_base = OTHER; note = 2-O-methylribose adenine
  modified_base 3..4: mod_base = OTHER; note = S-phosphorothioate
  modified_base 4: mod_base = OTHER; note = 2-fluororibose uracil
  modified_base 4..5: mod_base = OTHER; note = R-phosphorothioate
  modified_base 5: mod_base = OTHER; note = 2-O-methylribose adenine
  modified_base 5..6: mod_base = OTHER; note = S-phosphorothioate
  modified_base 6: mod_base = OTHER; note = 2-fluororibose guanine
  modified_base 6..7: mod_base = OTHER; note = R-phosphorothioate
  modified_base 7: mod_base = OTHER; note = 2-O-methylribose adenine
  modified_base 7..8: mod_base = OTHER; note = R-phosphorothioate
  modified_base 8: mod_base = OTHER; note = 2-fluororibose guanine
  modified_base 8..9: mod_base = OTHER; note = S-phosphorothioate
  modified_base 9: mod_base = cm
  modified_base 10: mod_base = OTHER; note = 2-fluororibose adenine
  modified_base 11: mod_base = OTHER; note = 2-O-methylribose adenine
  modified_base 12: mod_base = gm
  modified_base 13: mod_base = OTHER; note = 2-O-methylribose adenine
  modified_base 14: mod_base = OTHER; note = 2-fluororibose adenine
  modified_base 15: mod_base = cm
  modified_base 16: mod_base = OTHER; note = 2-fluororibose adenine
  modified_base 17: mod_base = cm
  modified_base 18: mod_base = OTHER; note = 2-fluororibose uracil
  modified_base 19: mod_base = gm
  modified_base 20: mod_base = OTHER; note = 2-fluororibose uracil
  modified_base 21: mod_base = um
  modified_base 21..22: mod_base = OTHER; note = S-phosphorothioate
  modified_base 22: mod_base = um
  modified_base 22..23: mod_base = OTHER; note = S-phosphorothioate
  modified_base 23: mod_base = um
  source 1..23: mol_type = other RNA
ttatagagcaagaacactgtttt

SEQ ID NO: 372 - RNA, 23 nt, synthetic construct
  misc_feature 1..23: note = Synthetic: WV-37085
  misc_feature 1..23: note = Synthetic: SSR-0103097
  modified_base 1: mod_base = um
  modified_base 1..2: mod_base = OTHER; note = R-phosphorothioate
  modified_base 2: mod_base = OTHER; note = 2-fluororibose uracil
  modified_base 2..3: mod_base = OTHER; note = S-phosphorothioate
  modified_base 3: mod_base = OTHER; note = 2-O-methylribose adenine
  modified_base 3..4: mod_base = OTHER; note = S-phosphorothioate
  modified_base 4: mod_base = OTHER; note = 2-fluororibose uracil
  modified_base 4..5: mod_base = OTHER; note = R-phosphorothioate
  modified_base 5: mod_base = OTHER; note = 2-O-methylribose adenine
  modified_base 5..6: mod_base = OTHER; note = S-phosphorothioate
  modified_base 6: mod_base = OTHER; note = 2-fluororibose guanine
  modified_base 6..7: mod_base = OTHER; note = R-phosphorothioate
  modified_base 7: mod_base = OTHER; note = 2-O-methylribose adenine
  modified_base 7..8: mod_base = OTHER; note = S-phosphorothioate
  modified_base 8: mod_base = OTHER; note = 2-fluororibose guanine
  modified_base 8..9: mod_base = OTHER; note = R-phosphorothioate
  modified_base 9: mod_base = cm
  modified_base 10: mod_base = OTHER; note = 2-fluororibose adenine
  modified_base 11: mod_base = OTHER; note = 2-O-methylribose adenine
  modified_base 12: mod_base = gm
  modified_base 13: mod_base = OTHER; note = 2-O-methylribose adenine
  modified_base 14: mod_base = OTHER; note = 2-fluororibose adenine
  modified_base 15: mod_base = cm
  modified_base 16: mod_base = OTHER; note = 2-fluororibose adenine
  modified_base 17: mod_base = cm
  modified_base 18: mod_base = OTHER; note = 2-fluororibose uracil
  modified_base 19: mod_base = gm
  modified_base 20: mod_base = OTHER; note = 2-fluororibose uracil
  modified_base 21: mod_base = um
  modified_base 21..22: mod_base = OTHER; note = S-phosphorothioate
  modified_base 22: mod_base = um
  modified_base 22..23: mod_base = OTHER; note = S-phosphorothioate
  modified_base 23: mod_base = um
  source 1..23: mol_type = other RNA
ttatagagcaagaacactgtttt

SEQ ID NO: 373 - RNA, 23 nt, synthetic construct
  misc_feature 1..23: note = Synthetic: WV-37086
  misc_feature 1..23: note = Synthetic: SSR-0103098
  modified_base 1: mod_base = um
  modified_base 1..2: mod_base = OTHER; note = R-phosphorothioate
  modified_base 2: mod_base = OTHER; note = 2-fluororibose uracil
  modified_base 2..3: mod_base = OTHER; note = S-phosphorothioate
  modified_base 3: mod_base = OTHER; note = 2-O-methylribose adenine
  modified_base 3..4: mod_base = OTHER; note = S-phosphorothioate
  modified_base 4: mod_base = OTHER; note = 2-fluororibose uracil
  modified_base 4..5: mod_base = OTHER; note = R-phosphorothioate
  modified_base 5: mod_base = OTHER; note = 2-O-methylribose adenine
  modified_base 5..6: mod_base = OTHER; note = S-phosphorothioate
  modified_base 6: mod_base = OTHER; note = 2-fluororibose guanine
  modified_base 6..7: mod_base = OTHER; note = R-phosphorothioate
  modified_base 7: mod_base = OTHER; note = 2-O-methylribose adenine
  modified_base 7..8: mod_base = OTHER; note = S-phosphorothioate
  modified_base 8: mod_base = OTHER; note = 2-fluororibose guanine
  modified_base 8..9: mod_base = OTHER; note = S-phosphorothioate
  modified_base 9: mod_base = cm
  modified_base 10: mod_base = OTHER; note = 2-fluororibose adenine
  modified_base 11: mod_base = OTHER; note = 2-O-methylribose adenine
  modified_base 12: mod_base = gm
  modified_base 13: mod_base = OTHER; note = 2-O-methylribose adenine
  modified_base 14: mod_base = OTHER; note = 2-fluororibose adenine
  modified_base 15: mod_base = cm
  modified_base 16: mod_base = OTHER; note = 2-fluororibose adenine
  modified_base 17: mod_base = cm
  modified_base 18: mod_base = OTHER; note = 2-fluororibose uracil
  modified_base 19: mod_base = gm
  modified_base 20: mod_base = OTHER; note = 2-fluororibose uracil
  modified_base 21: mod_base = um
  modified_base 21..22: mod_base = OTHER; note = S-phosphorothioate
  modified_base 22: mod_base = um
  modified_base 22..23: mod_base = OTHER; note = S-phosphorothioate
  modified_base 23: mod_base = um
  source 1..23: mol_type = other RNA
ttatagagcaagaacactgtttt

SEQ ID NO: 374 - RNA, 23 nt, synthetic construct
  misc_feature 1..23: note = Synthetic: WV-37087
  misc_feature 1..23: note = Synthetic: SSR-0103099
  modified_base 1: mod_base = um
  modified_base 1..2: mod_base = OTHER; note = R-phosphorothioate
  modified_base 2: mod_base = OTHER; note = 2-fluororibose uracil
  modified_base 2..3: mod_base = OTHER; note = S-phosphorothioate
  modified_base 3: mod_base = OTHER; note = 2-O-methylribose adenine
  modified_base 3..4: mod_base = OTHER; note = S-phosphorothioate
  modified_base 4: mod_base = OTHER; note = 2-fluororibose uracil
  modified_base 4..5: mod_base = OTHER; note = R-phosphorothioate
  modified_base 5: mod_base = OTHER; note = 2-O-methylribose adenine
  modified_base 5..6: mod_base = OTHER; note = S-phosphorothioate
  modified_base 6: mod_base = OTHER; note = 2-fluororibose guanine
  modified_base 6..7: mod_base = OTHER; note = S-phosphorothioate
  modified_base 7: mod_base = OTHER; note = 2-O-methylribose adenine
  modified_base 7..8: mod_base = OTHER; note = R-phosphorothioate
  modified_base 8: mod_base = OTHER; note = 2-fluororibose guanine
  modified_base 8..9: mod_base = OTHER; note = R-phosphorothioate
  modified_base 9: mod_base = cm
  modified_base 10: mod_base = OTHER; note = 2-fluororibose adenine
  modified_base 11: mod_base = OTHER; note = 2-O-methylribose adenine
  modified_base 12: mod_base = gm
  modified_base 13: mod_base = OTHER; note = 2-O-methylribose adenine
  modified_base 14: mod_base = OTHER; note = 2-fluororibose adenine
  modified_base 15: mod_base = cm
  modified_base 16: mod_base = OTHER; note = 2-fluororibose adenine
  modified_base 17: mod_base = cm
  modified_base 18: mod_base = OTHER; note = 2-fluororibose uracil
  modified_base 19: mod_base = gm
  modified_base 20: mod_base = OTHER; note = 2-fluororibose uracil
  modified_base 21: mod_base = um
  modified_base 21..22: mod_base = OTHER; note = S-phosphorothioate
  modified_base 22: mod_base = um
  modified_base 22..23: mod_base = OTHER; note = S-phosphorothioate
  modified_base 23: mod_base = um
  source 1..23: mol_type = other RNA
ttatagagcaagaacactgtttt

SEQ ID NO: 375 - RNA, 23 nt, synthetic construct
  misc_feature 1..23: note = Synthetic: WV-37088
  misc_feature 1..23: note = Synthetic: SSR-0103100
  modified_base 1: mod_base = um
  modified_base 1..2: mod_base = OTHER; note = R-phosphorothioate
  modified_base 2: mod_base = OTHER; note = 2-fluororibose uracil
  modified_base 2..3: mod_base = OTHER; note = S-phosphorothioate
  modified_base 3: mod_base = OTHER; note = 2-O-methylribose adenine
  modified_base 3..4: mod_base = OTHER; note = S-phosphorothioate
  modified_base 4: mod_base = OTHER; note = 2-fluororibose uracil
  modified_base 4..5: mod_base = OTHER; note = R-phosphorothioate
  modified_base 5: mod_base = OTHER; note = 2-O-methylribose adenine
  modified_base 5..6: mod_base = OTHER; note = S-phosphorothioate
  modified_base 6: mod_base = OTHER; note = 2-fluororibose guanine
  modified_base 6..7: mod_base = OTHER; note = S-phosphorothioate
  modified_base 7: mod_base = OTHER; note = 2-O-methylribose adenine
  modified_base 7..8: mod_base = OTHER; note = R-phosphorothioate
  modified_base 8: mod_base = OTHER; note = 2-fluororibose guanine
  modified_base 8..9: mod_base = OTHER; note = S-phosphorothioate
  modified_base 9: mod_base = cm
  modified_base 10: mod_base = OTHER; note = 2-fluororibose adenine
  modified_base 11: mod_base = OTHER; note = 2-O-methylribose adenine
  modified_base 12: mod_base = gm
  modified_base 13: mod_base = OTHER; note = 2-O-methylribose adenine
  modified_base 14: mod_base = OTHER; note = 2-fluororibose adenine
  modified_base 15: mod_base = cm
  modified_base 16: mod_base = OTHER; note = 2-fluororibose adenine
  modified_base 17: mod_base = cm
  modified_base 18: mod_base = OTHER; note = 2-fluororibose uracil
  modified_base 19: mod_base = gm
  modified_base 20: mod_base = OTHER; note = 2-fluororibose uracil
  modified_base 21: mod_base = um
  modified_base 21..22: mod_base = OTHER; note = S-phosphorothioate
  modified_base 22: mod_base = um
  modified_base 22..23: mod_base = OTHER; note = S-phosphorothioate
  modified_base 23: mod_base = um
  source 1..23: mol_type = other RNA
ttatagagcaagaacactgtttt

SEQ ID NO: 376 - RNA, 23 nt, synthetic construct
  misc_feature 1..23: note = Synthetic: WV-37089
  misc_feature 1..23: note = Synthetic: SSR-0103101
  modified_base 1: mod_base = um
  modified_base 1..2: mod_base = OTHER; note = R-phosphorothioate
  modified_base 2: mod_base = OTHER; note = 2-fluororibose uracil
  modified_base 2..3: mod_base = OTHER; note = S-phosphorothioate
  modified_base 3: mod_base = OTHER; note = 2-O-methylribose adenine
  modified_base 3..4: mod_base = OTHER; note = S-phosphorothioate
  modified_base 4: mod_base = OTHER; note = 2-fluororibose uracil
  modified_base 4..5: mod_base = OTHER; note = R-phosphorothioate
  modified_base 5: mod_base = OTHER; note = 2-O-methylribose adenine
  modified_base 5..6: mod_base = OTHER; note = S-phosphorothioate
  modified_base 6: mod_base = OTHER; note = 2-fluororibose guanine
  modified_base 6..7: mod_base = OTHER; note = S-phosphorothioate
  modified_base 7: mod_base = OTHER; note = 2-O-methylribose adenine
  modified_base 7..8: mod_base = OTHER; note = S-phosphorothioate
  modified_base 8: mod_base = OTHER; note = 2-fluororibose guanine
  modified_base 8..9: mod_base = OTHER; note = R-phosphorothioate
  modified_base 9: mod_base = cm
  modified_base 10: mod_base = OTHER; note = 2-fluororibose adenine
  modified_base 11: mod_base = OTHER; note = 2-O-methylribose adenine
  modified_base 12: mod_base = gm
  modified_base 13: mod_base = OTHER; note = 2-O-methylribose adenine
  modified_base 14: mod_base = OTHER; note = 2-fluororibose adenine
  modified_base 15: mod_base = cm
  modified_base 16: mod_base = OTHER; note = 2-fluororibose adenine
  modified_base 17: mod_base = cm
  modified_base 18: mod_base = OTHER; note = 2-fluororibose uracil
  modified_base 19: mod_base = gm
  modified_base 20: mod_base = OTHER; note = 2-fluororibose uracil
  modified_base 21: mod_base = um
  modified_base 21..22: mod_base = OTHER; note = S-phosphorothioate
  modified_base 22: mod_base = um
  modified_base 22..23: mod_base = OTHER; note = S-phosphorothioate
  modified_base 23: mod_base = um
  source 1..23: mol_type = other RNA
ttatagagcaagaacactgtttt

SEQ ID NO: 377 - RNA, 23 nt, synthetic construct
  misc_feature 1..23: note = Synthetic: WV-37090
  misc_feature 1..23: note = Synthetic: SSR-0103102
  modified_base 1: mod_base = um
  modified_base 1..2: mod_base = OTHER; note = R-phosphorothioate
  modified_base 2: mod_base = OTHER; note = 2-fluororibose uracil
  modified_base 2..3: mod_base = OTHER; note = S-phosphorothioate
  modified_base 3: mod_base = OTHER; note = 2-O-methylribose adenine
  modified_base 3..4: mod_base = OTHER; note = S-phosphorothioate
  modified_base 4: mod_base = OTHER; note = 2-fluororibose uracil
  modified_base 4..5: mod_base = OTHER; note = R-phosphorothioate
  modified_base 5: mod_base = OTHER; note = 2-O-methylribose adenine
  modified_base 5..6: mod_base = OTHER; note = S-phosphorothioate
  modified_base 6: mod_base = OTHER; note = 2-fluororibose guanine
  modified_base 6..7: mod_base = OTHER; note = S-phosphorothioate
  modified_base 7: mod_base = OTHER; note = 2-O-methylribose adenine
  modified_base 7..8: mod_base = OTHER; note = S-phosphorothioate
  modified_base 8: mod_base = OTHER; note = 2-fluororibose guanine
  modified_base 8..9: mod_base = OTHER; note = S-phosphorothioate
  modified_base 9: mod_base = cm
  modified_base 10: mod_base = OTHER; note = 2-fluororibose adenine
  modified_base 11: mod_base = OTHER; note = 2-O-methylribose adenine
  modified_base 12: mod_base = gm
  modified_base 13: mod_base = OTHER; note = 2-O-methylribose adenine
  modified_base 14: mod_base = OTHER; note = 2-fluororibose adenine
  modified_base 15: mod_base = cm
  modified_base 16: mod_base = OTHER; note = 2-fluororibose adenine
  modified_base 17: mod_base = cm
  modified_base 18: mod_base = OTHER; note = 2-fluororibose uracil
  modified_base 19: mod_base = gm
  modified_base 20: mod_base = OTHER; note = 2-fluororibose uracil
  modified_base 21: mod_base = um
  modified_base 21..22: mod_base = OTHER; note = S-phosphorothioate
  modified_base 22: mod_base = um
  modified_base 22..23: mod_base = OTHER; note = S-phosphorothioate
  modified_base 23: mod_base = um
  source 1..23: mol_type = other RNA
ttatagagcaagaacactgtttt

SEQ ID NO: 378 - RNA, 23 nt, synthetic construct
  misc_feature 1..23: note = Synthetic: WV-37091
  misc_feature 1..23: note = Synthetic: SSR-0103103
  modified_base 1: mod_base = um
  modified_base 1..2: mod_base = OTHER; note = R-phosphorothioate
  modified_base 2: mod_base = OTHER; note = 2-fluororibose uracil
  modified_base 2..3: mod_base = OTHER; note = S-phosphorothioate
  modified_base 3: mod_base = OTHER; note = 2-O-methylribose adenine
  modified_base 3..4: mod_base = OTHER; note = S-phosphorothioate
  modified_base 4: mod_base = OTHER; note = 2-fluororibose uracil
  modified_base 4..5: mod_base = OTHER; note = S-phosphorothioate
  modified_base 5: mod_base = OTHER; note = 2-O-methylribose adenine
  modified_base 5..6: mod_base = OTHER; note = R-phosphorothioate
  modified_base 6: mod_base = OTHER; note = 2-fluororibose guanine
  modified_base 6..7: mod_base = OTHER; note = R-phosphorothioate
  modified_base 7: mod_base = OTHER; note = 2-O-methylribose adenine
  modified_base 7..8: mod_base = OTHER; note = R-phosphorothioate
  modified_base 8: mod_base = OTHER; note = 2-fluororibose guanine
  modified_base 8..9: mod_base = OTHER; note = R-phosphorothioate
  modified_base 9: mod_base = cm
  modified_base 10: mod_base = OTHER; note = 2-fluororibose adenine
  modified_base 11: mod_base = OTHER; note = 2-O-methylribose adenine
  modified_base 12: mod_base = gm
  modified_base 13: mod_base = OTHER; note = 2-O-methylribose adenine
  modified_base 14: mod_base = OTHER; note = 2-fluororibose adenine
  modified_base 15: mod_base = cm
  modified_base 16: mod_base = OTHER; note = 2-fluororibose adenine
  modified_base 17: mod_base = cm
  modified_base 18: mod_base = OTHER; note = 2-fluororibose uracil
  modified_base 19: mod_base = gm
  modified_base 20: mod_base = OTHER; note = 2-fluororibose uracil
  modified_base 21: mod_base = um
  modified_base 21..22: mod_base = OTHER; note = S-phosphorothioate
  modified_base 22: mod_base = um
  modified_base 22..23: mod_base = OTHER; note = S-phosphorothioate
  modified_base 23: mod_base = um
  source 1..23: mol_type = other RNA
ttatagagcaagaacactgtttt

SEQ ID NO: 379 - RNA, 23 nt, synthetic construct
  misc_feature 1..23: note = Synthetic: WV-37092
  misc_feature 1..23: note = Synthetic: SSR-0103104
  modified_base 1: mod_base = um
  modified_base 1..2: mod_base = OTHER; note = R-phosphorothioate
  modified_base 2: mod_base = OTHER; note = 2-fluororibose uracil
  modified_base 2..3: mod_base = OTHER; note = S-phosphorothioate
  modified_base 3: mod_base = OTHER; note = 2-O-methylribose adenine
  modified_base 3..4: mod_base = OTHER; note = S-phosphorothioate
  modified_base 4: mod_base = OTHER; note = 2-fluororibose uracil
  modified_base 4..5: mod_base = OTHER; note = S-phosphorothioate
  modified_base 5: mod_base = OTHER; note = 2-O-methylribose adenine
  modified_base 5..6: mod_base = OTHER; note = R-phosphorothioate
  modified_base 6: mod_base = OTHER; note = 2-fluororibose guanine
  modified_base 6..7: mod_base = OTHER; note = R-phosphorothioate
  modified_base 7: mod_base = OTHER; note = 2-O-methylribose adenine
  modified_base 7..8: mod_base = OTHER; note = R-phosphorothioate
  modified_base 8: mod_base = OTHER; note = 2-fluororibose guanine
  modified_base 8..9: mod_base = OTHER; note = S-phosphorothioate
  modified_base 9: mod_base = cm
  modified_base 10: mod_base = OTHER; note = 2-fluororibose adenine
  modified_base 11: mod_base = OTHER; note = 2-O-methylribose adenine
  modified_base 12: mod_base = gm
  modified_base 13: mod_base = OTHER; note = 2-O-methylribose adenine
  modified_base 14: mod_base = OTHER; note = 2-fluororibose adenine
  modified_base 15: mod_base = cm
  modified_base 16: mod_base = OTHER; note = 2-fluororibose adenine
  modified_base 17: mod_base = cm
  modified_base 18: mod_base = OTHER; note = 2-fluororibose uracil
  modified_base 19: mod_base = gm
  modified_base 20: mod_base = OTHER; note = 2-fluororibose uracil
  modified_base 21: mod_base = um
  modified_base 21..22: mod_base = OTHER; note = S-phosphorothioate
  modified_base 22: mod_base = um
  modified_base 22..23: mod_base = OTHER; note = S-phosphorothioate
  modified_base 23: mod_base = um
  source 1..23: mol_type = other RNA
ttatagagcaagaacactgtttt

SEQ ID NO: 380 - RNA, 23 nt, synthetic construct
  misc_feature 1..23: note = Synthetic: WV-37093
  misc_feature 1..23: note = Synthetic: SSR-0103105
  modified_base 1: mod_base = um
  modified_base 1..2: mod_base = OTHER; note = R-phosphorothioate
  modified_base 2: mod_base = OTHER; note = 2-fluororibose uracil
  modified_base 2..3: mod_base = OTHER; note = S-phosphorothioate
  modified_base 3: mod_base = OTHER; note = 2-O-methylribose adenine
  modified_base 3..4: mod_base = OTHER; note = S-phosphorothioate
  modified_base 4: mod_base = OTHER; note = 2-fluororibose uracil
  modified_base 4..5: mod_base = OTHER; note = S-phosphorothioate
  modified_base 5: mod_base = OTHER; note = 2-O-methylribose adenine
  modified_base 5..6: mod_base = OTHER; note = R-phosphorothioate
  modified_base 6: mod_base = OTHER; note = 2-fluororibose guanine
  modified_base 6..7: mod_base = OTHER; note = R-phosphorothioate
  modified_base 7: mod_base = OTHER; note = 2-O-methylribose adenine
  modified_base 7..8: mod_base = OTHER; note = S-phosphorothioate
  modified_base 8: mod_base = OTHER; note = 2-fluororibose guanine
  modified_base 8..9: mod_base = OTHER; note = R-phosphorothioate
  modified_base 9: mod_base = cm
  modified_base 10: mod_base = OTHER; note = 2-fluororibose adenine
  modified_base 11: mod_base = OTHER; note = 2-O-methylribose adenine
  modified_base 12: mod_base = gm
  modified_base 13: mod_base = OTHER; note = 2-O-methylribose adenine
  modified_base 14: mod_base = OTHER; note = 2-fluororibose adenine
  modified_base 15: mod_base = cm
  modified_base 16: mod_base = OTHER; note = 2-fluororibose adenine
  modified_base 17: mod_base = cm
  modified_base 18: mod_base = OTHER; note = 2-fluororibose uracil
  modified_base 19: mod_base = gm
  modified_base 20: mod_base = OTHER; note = 2-fluororibose uracil
  modified_base 21: mod_base = um
  modified_base 21..22: mod_base = OTHER; note = S-phosphorothioate
  modified_base 22: mod_base = um
  modified_base 22..23: mod_base = OTHER; note = S-phosphorothioate
  modified_base 23: mod_base = um
  source 1..23: mol_type = other RNA
ttatagagcaagaacactgtttt

SEQ ID NO: 381 - RNA, 23 nt, synthetic construct
  misc_feature 1..23: note = Synthetic: WV-37094
  misc_feature 1..23: note = Synthetic: SSR-0103106
  modified_base 1: mod_base = um
  modified_base 1..2: mod_base = OTHER; note = R-phosphorothioate
  modified_base 2: mod_base = OTHER; note = 2-fluororibose uracil
  modified_base 2..3: mod_base = OTHER; note = S-phosphorothioate
  modified_base 3: mod_base = OTHER; note = 2-O-methylribose adenine
  modified_base 3..4: mod_base = OTHER; note = S-phosphorothioate
  modified_base 4: mod_base = OTHER; note = 2-fluororibose uracil
  modified_base 4..5: mod_base = OTHER; note = S-phosphorothioate
  modified_base 5: mod_base = OTHER; note = 2-O-methylribose adenine
  modified_base 5..6: mod_base = OTHER; note = R-phosphorothioate
  modified_base 6: mod_base = OTHER; note = 2-fluororibose guanine
  modified_base 6..7: mod_base = OTHER; note = R-phosphorothioate
  modified_base 7: mod_base = OTHER; note = 2-O-methylribose adenine
  modified_base 7..8: mod_base = OTHER; note = S-phosphorothioate
  modified_base 8: mod_base = OTHER; note = 2-fluororibose guanine
  modified_base 8..9: mod_base = OTHER; note = S-phosphorothioate
  modified_base 9: mod_base = cm
  modified_base 10: mod_base = OTHER; note = 2-fluororibose adenine
  modified_base 11: mod_base = OTHER; note = 2-O-methylribose adenine
  modified_base 12: mod_base = gm
  modified_base 13: mod_base = OTHER; note = 2-O-methylribose adenine
  modified_base 14: mod_base = OTHER; note = 2-fluororibose adenine
  modified_base 15: mod_base = cm
  modified_base 16: mod_base = OTHER; note = 2-fluororibose adenine
  modified_base 17: mod_base = cm
  modified_base 18: mod_base = OTHER; note = 2-fluororibose uracil
  modified_base 19: mod_base = gm
  modified_base 20: mod_base = OTHER; note = 2-fluororibose uracil
  modified_base 21: mod_base = um
  modified_base 21..22: mod_base = OTHER; note = S-phosphorothioate
  modified_base 22: mod_base = um
  modified_base 22..23: mod_base = OTHER; note = S-phosphorothioate
  modified_base 23: mod_base = um
  source 1..23: mol_type = other RNA
ttatagagcaagaacactgtttt

SEQ ID NO: 382 - RNA, 23 nt, synthetic construct
  misc_feature 1..23: note = Synthetic: WV-37095
  misc_feature 1..23: note = Synthetic: SSR-0103107
  modified_base 1: mod_base = um
  modified_base 1..2: mod_base = OTHER; note = R-phosphorothioate
  modified_base 2: mod_base = OTHER; note = 2-fluororibose uracil
  modified_base 2..3: mod_base = OTHER; note = S-phosphorothioate
  modified_base 3: mod_base = OTHER; note = 2-O-methylribose adenine
  modified_base 3..4: mod_base = OTHER; note = S-phosphorothioate
  modified_base 4: mod_base = OTHER; note = 2-fluororibose uracil
  modified_base 4..5: mod_base = OTHER; note = S-phosphorothioate
  modified_base 5: mod_base = OTHER; note = 2-O-methylribose adenine
  modified_base 5..6: mod_base = OTHER; note = R-phosphorothioate
  modified_base 6: mod_base = OTHER; note = 2-fluororibose guanine
  modified_base 6..7: mod_base = OTHER; note = S-phosphorothioate
  modified_base 7: mod_base = OTHER; note = 2-O-methylribose adenine
  modified_base 7..8: mod_base = OTHER; note = R-phosphorothioate
  modified_base 8: mod_base = OTHER; note = 2-fluororibose guanine
  modified_base 8..9: mod_base = OTHER; note = R-phosphorothioate
  modified_base 9: mod_base = cm
  modified_base 10: mod_base = OTHER; note = 2-fluororibose adenine
  modified_base 11: mod_base = OTHER; note = 2-O-methylribose adenine
  modified_base 12: mod_base = gm
  modified_base 13: mod_base = OTHER; note = 2-O-methylribose adenine
  modified_base 14: mod_base = OTHER; note = 2-fluororibose adenine
  modified_base 15: mod_base = cm
  modified_base 16: mod_base = OTHER; note = 2-fluororibose adenine
  modified_base 17: mod_base = cm
  modified_base 18: mod_base = OTHER; note = 2-fluororibose uracil
  modified_base 19: mod_base = gm
  modified_base 20: mod_base = OTHER; note = 2-fluororibose uracil
  modified_base 21: mod_base = um
  modified_base 21..22: mod_base = OTHER; note = S-phosphorothioate
  modified_base 22: mod_base = um
  modified_base 22..23: mod_base = OTHER; note = S-phosphorothioate
  modified_base 23: mod_base = um
  source 1..23: mol_type = other RNA
ttatagagcaagaacactgtttt

SEQ ID NO: 383 - RNA, 23 nt, synthetic construct
  misc_feature 1..23: note = Synthetic: WV-37096
  misc_feature 1..23: note = Synthetic: SSR-0103108
  modified_base 1: mod_base = um
  modified_base 1..2: mod_base = OTHER; note = R-phosphorothioate
  modified_base 2: mod_base = OTHER; note = 2-fluororibose uracil
  modified_base 2..3: mod_base = OTHER; note = S-phosphorothioate
  modified_base 3: mod_base = OTHER; note = 2-O-methylribose adenine
  modified_base 3..4: mod_base = OTHER; note = S-phosphorothioate
  modified_base 4: mod_base = OTHER; note = 2-fluororibose uracil
  modified_base 4..5: mod_base = OTHER; note = S-phosphorothioate
  modified_base 5: mod_base = OTHER; note = 2-O-methylribose adenine
  modified_base 5..6: mod_base = OTHER; note = R-phosphorothioate
  modified_base 6: mod_base = OTHER; note = 2-fluororibose guanine
  modified_base 6..7: mod_base = OTHER; note = S-phosphorothioate
  modified_base 7: mod_base = OTHER; note = 2-O-methylribose adenine
  modified_base 7..8: mod_base = OTHER; note = R-phosphorothioate
  modified_base 8: mod_base = OTHER; note = 2-fluororibose guanine
  modified_base 8..9: mod_base = OTHER; note = S-phosphorothioate
  modified_base 9: mod_base = cm
  modified_base 10: mod_base = OTHER; note = 2-fluororibose adenine
  modified_base 11: mod_base = OTHER; note = 2-O-methylribose adenine
  modified_base 12: mod_base = gm
  modified_base 13: mod_base = OTHER; note = 2-O-methylribose adenine
  modified_base 14: mod_base = OTHER; note = 2-fluororibose adenine
  modified_base 15: mod_base = cm
  modified_base 16: mod_base = OTHER; note = 2-fluororibose adenine
  modified_base 17: mod_base = cm
  modified_base 18: mod_base = OTHER; note = 2-fluororibose uracil
  modified_base 19: mod_base = gm
  modified_base 20: mod_base = OTHER; note = 2-fluororibose uracil
  modified_base 21: mod_base = um
  modified_base 21..22: mod_base = OTHER; note = S-phosphorothioate
  modified_base 22: mod_base = um
  modified_base 22..23: mod_base = OTHER; note = S-phosphorothioate
  modified_base 23: mod_base = um
  source 1..23: mol_type = other RNA
ttatagagcaagaacactgtttt

SEQ ID NO: 384 - RNA, 23 nt, synthetic construct
  misc_feature 1..23: note = Synthetic: WV-37097
  misc_feature 1..23: note = Synthetic: SSR-0103109
  modified_base 1: mod_base = um
  modified_base 1..2: mod_base = OTHER; note = R-phosphorothioate
  modified_base 2: mod_base = OTHER; note = 2-fluororibose uracil
  modified_base 2..3: mod_base = OTHER; note = S-phosphorothioate
  modified_base 3: mod_base = OTHER; note = 2-O-methylribose adenine
  modified_base 3..4: mod_base = OTHER; note = S-phosphorothioate
  modified_base 4: mod_base = OTHER; note = 2-fluororibose uracil
  modified_base 4..5: mod_base = OTHER; note = S-phosphorothioate
  modified_base 5: mod_base = OTHER; note = 2-O-methylribose adenine
  modified_base 5..6: mod_base = OTHER; note = R-phosphorothioate
  modified_base 6: mod_base = OTHER; note = 2-fluororibose guanine
  modified_base 6..7: mod_base = OTHER; note = S-phosphorothioate
  modified_base 7: mod_base = OTHER; note = 2-O-methylribose adenine
  modified_base 7..8: mod_base = OTHER; note = S-phosphorothioate
  modified_base 8: mod_base = OTHER; note = 2-fluororibose guanine
  modified_base 8..9: mod_base = OTHER; note = R-phosphorothioate
  modified_base 9: mod_base = cm
  modified_base 10: mod_base = OTHER; note = 2-fluororibose adenine
  modified_base 11: mod_base = OTHER; note = 2-O-methylribose adenine
  modified_base 12: mod_base = gm
  modified_base 13: mod_base = OTHER; note = 2-O-methylribose adenine
  modified_base 14: mod_base = OTHER; note = 2-fluororibose adenine
  modified_base 15: mod_base = cm
  modified_base 16: mod_base = OTHER; note = 2-fluororibose adenine
  modified_base 17: mod_base = cm
  modified_base 18: mod_base = OTHER; note = 2-fluororibose uracil
  modified_base 19: mod_base = gm
  modified_base 20: mod_base = OTHER; note = 2-fluororibose uracil
  modified_base 21: mod_base = um
  modified_base 21..22: mod_base = OTHER; note = S-phosphorothioate
  modified_base 22: mod_base = um
  modified_base 22..23: mod_base = OTHER; note = S-phosphorothioate
  modified_base 23: mod_base = um
  source 1..23: mol_type = other RNA
ttatagagcaagaacactgtttt

SEQ ID NO: 385 - RNA, 23 nt, synthetic construct
  misc_feature 1..23: note = Synthetic: WV-37098
  misc_feature 1..23: note = Synthetic: SSR-0103110
  modified_base 1: mod_base = um
  modified_base 1..2: mod_base = OTHER; note = R-phosphorothioate
  modified_base 2: mod_base = OTHER; note = 2-fluororibose uracil
  modified_base 2..3: mod_base = OTHER; note = S-phosphorothioate
  modified_base 3: mod_base = OTHER; note = 2-O-methylribose adenine
  modified_base 3..4: mod_base = OTHER; note = S-phosphorothioate
  modified_base 4: mod_base = OTHER; note = 2-fluororibose uracil
  modified_base 4..5: mod_base = OTHER; note = S-phosphorothioate
  modified_base 5: mod_base = OTHER; note = 2-O-methylribose adenine
  modified_base 5..6: mod_base = OTHER; note = R-phosphorothioate
  modified_base 6: mod_base = OTHER; note = 2-fluororibose guanine
  modified_base 6..7: mod_base = OTHER; note = S-phosphorothioate
  modified_base 7: mod_base = OTHER; note = 2-O-methylribose adenine
  modified_base 7..8: mod_base = OTHER; note = S-phosphorothioate
  modified_base 8: mod_base = OTHER; note = 2-fluororibose guanine
  modified_base 8..9: mod_base = OTHER; note = S-phosphorothioate
  modified_base 9: mod_base = cm
  modified_base 10: mod_base = OTHER; note = 2-fluororibose adenine
  modified_base 11: mod_base = OTHER; note = 2-O-methylribose adenine
  modified_base 12: mod_base = gm
  modified_base 13: mod_base = OTHER; note = 2-O-methylribose adenine
  modified_base 14: mod_base = OTHER; note = 2-fluororibose adenine
  modified_base 15: mod_base = cm
  modified_base 16: mod_base = OTHER; note = 2-fluororibose adenine
  modified_base 17: mod_base = cm
  modified_base 18: mod_base = OTHER; note = 2-fluororibose uracil
  modified_base 19: mod_base = gm
  modified_base 20: mod_base = OTHER; note = 2-fluororibose uracil
  modified_base 21: mod_base = um
  modified_base 21..22: mod_base = OTHER; note = S-phosphorothioate
  modified_base 22: mod_base = um
  modified_base 22..23: mod_base = OTHER; note = S-phosphorothioate
  modified_base 23: mod_base = um
  source 1..23: mol_type = other RNA
ttatagagcaagaacactgtttt

SEQ ID NO: 386 - RNA, 23 nt, synthetic construct
  misc_feature 1..23: note = Synthetic: WV-37099
  misc_feature 1..23: note = Synthetic: SSR-0103111
  modified_base 1: mod_base = um
  modified_base 1..2: mod_base = OTHER; note = R-phosphorothioate
  modified_base 2: mod_base = OTHER; note = 2-fluororibose uracil
  modified_base 2..3: mod_base = OTHER; note = S-phosphorothioate
  modified_base 3: mod_base = OTHER; note = 2-O-methylribose adenine
  modified_base 3..4: mod_base = OTHER; note = S-phosphorothioate
  modified_base 4: mod_base = OTHER; note = 2-fluororibose uracil
  modified_base 4..5: mod_base = OTHER; note = S-phosphorothioate
  modified_base 5: mod_base = OTHER; note = 2-O-methylribose adenine
  modified_base 5..6: mod_base = OTHER; note = S-phosphorothioate
  modified_base 6: mod_base = OTHER; note = 2-fluororibose guanine
  modified_base 6..7: mod_base = OTHER; note = R-phosphorothioate
  modified_base 7: mod_base = OTHER; note = 2-O-methylribose adenine
  modified_base 7..8: mod_base = OTHER; note = R-phosphorothioate
  modified_base 8: mod_base = OTHER; note = 2-fluororibose guanine
  modified_base 8..9: mod_base = OTHER; note = R-phosphorothioate
  modified_base 9: mod_base = cm
  modified_base 10: mod_base = OTHER; note = 2-fluororibose adenine
  modified_base 11: mod_base = OTHER; note = 2-O-methylribose adenine
  modified_base 12: mod_base = gm
  modified_base 13: mod_base = OTHER; note = 2-O-methylribose adenine
  modified_base 14: mod_base = OTHER; note = 2-fluororibose adenine
  modified_base 15: mod_base = cm
  modified_base 16: mod_base = OTHER; note = 2-fluororibose adenine
  modified_base 17: mod_base = cm
  modified_base 18: mod_base = OTHER; note = 2-fluororibose uracil
  modified_base 19: mod_base = gm
  modified_base 20: mod_base = OTHER; note = 2-fluororibose uracil
  modified_base 21: mod_base = um
  modified_base 21..22: mod_base = OTHER; note = S-phosphorothioate
  modified_base 22: mod_base = um
  modified_base 22..23: mod_base = OTHER; note = S-phosphorothioate
  modified_base 23: mod_base = um
  source 1..23: mol_type = other RNA
ttatagagcaagaacactgtttt

SEQ ID NO: 387 - RNA, 23 nt, synthetic construct
  misc_feature 1..23: note = Synthetic: WV-37100
  misc_feature 1..23: note = Synthetic: SSR-0103112
  modified_base 1: mod_base = um
  modified_base 1..2: mod_base = OTHER; note = R-phosphorothioate
  modified_base 2: mod_base = OTHER; note = 2-fluororibose uracil
  modified_base 2..3: mod_base = OTHER; note = S-phosphorothioate
  modified_base 3: mod_base = OTHER; note = 2-O-methylribose adenine
  modified_base 3..4: mod_base = OTHER; note = S-phosphorothioate
  modified_base 4: mod_base = OTHER; note = 2-fluororibose uracil
  modified_base 4..5: mod_base = OTHER; note = S-phosphorothioate
  modified_base 5: mod_base = OTHER; note = 2-O-methylribose adenine
  modified_base 5..6: mod_base = OTHER; note = S-phosphorothioate
  modified_base 6: mod_base = OTHER; note = 2-fluororibose guanine
  modified_base 6..7: mod_base = OTHER; note = R-phosphorothioate
  modified_base 7: mod_base = OTHER; note = 2-O-methylribose adenine
  modified_base 7..8: mod_base = OTHER; note = R-phosphorothioate
  modified_base 8: mod_base = OTHER; note = 2-fluororibose guanine
  modified_base 8..9: mod_base = OTHER; note = S-phosphorothioate
  modified_base 9: mod_base = cm
  modified_base 10: mod_base = OTHER; note = 2-fluororibose adenine
  modified_base 11: mod_base = OTHER; note = 2-O-methylribose adenine
  modified_base 12: mod_base = gm
  modified_base 13: mod_base = OTHER; note = 2-O-methylribose adenine
  modified_base 14: mod_base = OTHER; note = 2-fluororibose adenine
  modified_base 15: mod_base = cm
  modified_base 16: mod_base = OTHER; note = 2-fluororibose adenine
  modified_base 17: mod_base = cm
  modified_base 18: mod_base = OTHER; note = 2-fluororibose uracil
  modified_base 19: mod_base = gm
  modified_base 20: mod_base = OTHER; note = 2-fluororibose uracil
  modified_base 21: mod_base = um
  modified_base 21..22: mod_base = OTHER; note = S-phosphorothioate
  modified_base 22: mod_base = um
  modified_base 22..23: mod_base = OTHER; note = S-phosphorothioate
  modified_base 23: mod_base = um
  source 1..23: mol_type = other RNA
ttatagagcaagaacactgtttt

SEQ ID NO: 388 - RNA, 23 nt, synthetic construct
  misc_feature 1..23: note = Synthetic: WV-37101
  misc_feature 1..23: note = Synthetic: SSR-0103113
  modified_base 1: mod_base = um
  modified_base 1..2: mod_base = OTHER; note = R-phosphorothioate
  modified_base 2: mod_base = OTHER; note = 2-fluororibose uracil
  modified_base 2..3: mod_base = OTHER; note = S-phosphorothioate
  modified_base 3: mod_base = OTHER; note = 2-O-methylribose adenine
  modified_base 3..4: mod_base = OTHER; note = S-phosphorothioate
  modified_base 4: mod_base = OTHER; note = 2-fluororibose uracil
  modified_base 4..5: mod_base = OTHER; note = S-phosphorothioate
  modified_base 5: mod_base = OTHER; note = 2-O-methylribose adenine
  modified_base 5..6: mod_base = OTHER; note = S-phosphorothioate
  modified_base 6: mod_base = OTHER; note = 2-fluororibose guanine
  modified_base 6..7: mod_base = OTHER; note = R-phosphorothioate
  modified_base 7: mod_base = OTHER; note = 2-O-methylribose adenine
  modified_base 7..8: mod_base = OTHER; note = S-phosphorothioate
  modified_base 8: mod_base = OTHER; note = 2-fluororibose guanine
  modified_base 8..9: mod_base = OTHER; note = R-phosphorothioate
  modified_base 9: mod_base = cm
  modified_base 10: mod_base = OTHER; note = 2-fluororibose adenine
  modified_base 11: mod_base = OTHER; note = 2-O-methylribose adenine
  modified_base 12: mod_base = gm
  modified_base 13: mod_base = OTHER; note = 2-O-methylribose adenine
  modified_base 14: mod_base = OTHER; note = 2-fluororibose adenine
  modified_base 15: mod_base = cm
  modified_base 16: mod_base = OTHER; note = 2-fluororibose adenine
  modified_base 17: mod_base = cm
  modified_base 18: mod_base = OTHER; note = 2-fluororibose uracil
  modified_base 19: mod_base = gm
  modified_base 20: mod_base = OTHER; note = 2-fluororibose uracil
  modified_base 21: mod_base = um
  modified_base 21..22: mod_base = OTHER; note = S-phosphorothioate
  modified_base 22: mod_base = um
  modified_base 22..23: mod_base = OTHER; note = S-phosphorothioate
  modified_base 23: mod_base = um
  source 1..23: mol_type = other RNA
ttatagagcaagaacactgtttt

SEQ ID NO: 389 - RNA, 23 nt, synthetic construct
  misc_feature 1..23: note = Synthetic: WV-37102
  misc_feature 1..23: note = Synthetic: SSR-0103114
  modified_base 1: mod_base = um
  modified_base 1..2: mod_base = OTHER; note = R-phosphorothioate
  modified_base 2: mod_base = OTHER; note = 2-fluororibose uracil
  modified_base 2..3: mod_base = OTHER; note = S-phosphorothioate
  modified_base 3: mod_base = OTHER; note = 2-O-methylribose adenine
  modified_base 3..4: mod_base = OTHER; note = S-phosphorothioate
  modified_base 4: mod_base = OTHER; note = 2-fluororibose uracil
  modified_base 4..5: mod_base = OTHER; note = S-phosphorothioate
  modified_base 5: mod_base = OTHER; note = 2-O-methylribose adenine
  modified_base 5..6: mod_base = OTHER; note = S-phosphorothioate
  modified_base 6: mod_base = OTHER; note = 2-fluororibose guanine
  modified_base 6..7: mod_base = OTHER; note = R-phosphorothioate
  modified_base 7: mod_base = OTHER; note = 2-O-methylribose adenine
  modified_base 7..8: mod_base = OTHER; note = S-phosphorothioate
  modified_base 8: mod_base = OTHER; note = 2-fluororibose guanine
  modified_base 8..9: mod_base = OTHER; note = S-phosphorothioate
  modified_base 9: mod_base = cm
  modified_base 10: mod_base = OTHER; note = 2-fluororibose adenine
  modified_base 11: mod_base = OTHER; note = 2-O-methylribose adenine
  modified_base 12: mod_base = gm
  modified_base 13: mod_base = OTHER; note = 2-O-methylribose adenine
  modified_base 14: mod_base = OTHER; note = 2-fluororibose adenine
  modified_base 15: mod_base = cm
  modified_base 16: mod_base = OTHER; note = 2-fluororibose adenine
  modified_base 17: mod_base = cm
  modified_base 18: mod_base = OTHER; note = 2-fluororibose uracil
  modified_base 19: mod_base = gm
  modified_base 20: mod_base = OTHER; note = 2-fluororibose uracil
  modified_base 21: mod_base = um
  modified_base 21..22: mod_base = OTHER; note = S-phosphorothioate
  modified_base 22: mod_base = um
  modified_base 22..23: mod_base = OTHER; note = S-phosphorothioate
  modified_base 23: mod_base = um
  source 1..23: mol_type = other RNA
ttatagagcaagaacactgtttt

SEQ ID NO: 390 - RNA, 23 nt, synthetic construct
  misc_feature 1..23: note = Synthetic: WV-37103
  misc_feature 1..23: note = Synthetic: SSR-0103115
  modified_base 1: mod_base = um
  modified_base 1..2: mod_base = OTHER; note = R-phosphorothioate
  modified_base 2: mod_base = OTHER; note = 2-fluororibose uracil
  modified_base 2..3: mod_base = OTHER; note = S-phosphorothioate
  modified_base 3: mod_base = OTHER; note = 2-O-methylribose adenine
  modified_base 3..4: mod_base = OTHER; note = S-phosphorothioate
  modified_base 4: mod_base = OTHER; note = 2-fluororibose uracil
  modified_base 4..5: mod_base = OTHER; note = S-phosphorothioate
  modified_base 5: mod_base = OTHER; note = 2-O-methylribose adenine
  modified_base 5..6: mod_base = OTHER; note = S-phosphorothioate
  modified_base 6: mod_base = OTHER; note = 2-fluororibose guanine
  modified_base 6..7: mod_base = OTHER; note = S-phosphorothioate
  modified_base 7: mod_base = OTHER; note = 2-O-methylribose adenine
  modified_base 7..8: mod_base = OTHER; note = R-phosphorothioate
  modified_base 8: mod_base = OTHER; note = 2-fluororibose guanine
  modified_base 8..9: mod_base = OTHER; note = R-phosphorothioate
  modified_base 9: mod_base = cm
  modified_base 10: mod_base = OTHER; note = 2-fluororibose adenine
  modified_base 11: mod_base = OTHER; note = 2-O-methylribose adenine
  modified_base 12: mod_base = gm
  modified_base 13: mod_base = OTHER; note = 2-O-methylribose adenine
  modified_base 14: mod_base = OTHER; note = 2-fluororibose adenine
  modified_base 15: mod_base = cm
  modified_base 16: mod_base = OTHER; note = 2-fluororibose adenine
  modified_base 17: mod_base = cm
  modified_base 18: mod_base = OTHER; note = 2-fluororibose uracil
  modified_base 19: mod_base = gm
  modified_base 20: mod_base = OTHER; note = 2-fluororibose uracil
  modified_base 21: mod_base = um
  modified_base 21..22: mod_base = OTHER; note = S-phosphorothioate
  modified_base 22: mod_base = um
  modified_base 22..23: mod_base = OTHER; note = S-phosphorothioate
  modified_base 23: mod_base = um
  source 1..23: mol_type = other RNA
ttatagagcaagaacactgtttt

SEQ ID NO: 391 - RNA, 23 nt, synthetic construct
  misc_feature 1..23: note = Synthetic: WV-37104
  misc_feature 1..23: note = Synthetic: SSR-0103116
  modified_base 1: mod_base = um
  modified_base 1..2: mod_base = OTHER; note = R-phosphorothioate
  modified_base 2: mod_base = OTHER; note = 2-fluororibose uracil
  modified_base 2..3: mod_base = OTHER; note = S-phosphorothioate
  modified_base 3: mod_base = OTHER; note = 2-O-methylribose adenine
  modified_base 3..4: mod_base = OTHER; note = S-phosphorothioate
  modified_base 4: mod_base = OTHER; note = 2-fluororibose uracil
  modified_base 4..5: mod_base = OTHER; note = S-phosphorothioate
  modified_base 5: mod_base = OTHER; note = 2-O-methylribose adenine
  modified_base 5..6: mod_base = OTHER; note = S-phosphorothioate
  modified_base 6: mod_base = OTHER; note = 2-fluororibose guanine
  modified_base 6..7: mod_base = OTHER; note = S-phosphorothioate
  modified_base 7: mod_base = OTHER; note = 2-O-methylribose adenine
  modified_base 7..8: mod_base = OTHER; note = R-phosphorothioate
  modified_base 8: mod_base = OTHER; note = 2-fluororibose guanine
  modified_base 8..9: mod_base = OTHER; note = S-phosphorothioate
  modified_base 9: mod_base = cm
  modified_base 10: mod_base = OTHER; note = 2-fluororibose adenine
  modified_base 11: mod_base = OTHER; note = 2-O-methylribose adenine
  modified_base 12: mod_base = gm
  modified_base 13: mod_base = OTHER; note = 2-O-methylribose adenine
  modified_base 14: mod_base = OTHER; note = 2-fluororibose adenine
  modified_base 15: mod_base = cm
  modified_base 16: mod_base = OTHER; note = 2-fluororibose adenine
  modified_base 17: mod_base = cm
  modified_base 18: mod_base = OTHER; note = 2-fluororibose uracil
  modified_base 19: mod_base = gm
  modified_base 20: mod_base = OTHER; note = 2-fluororibose uracil
  modified_base 21: mod_base = um
  modified_base 21..22: mod_base = OTHER; note = S-phosphorothioate
  modified_base 22: mod_base = um
  modified_base 22..23: mod_base = OTHER; note = S-phosphorothioate
  modified_base 23: mod_base = um
  source 1..23: mol_type = other RNA
ttatagagcaagaacactgtttt

SEQ ID NO: 392 - RNA, 23 nt, synthetic construct
  misc_feature 1..23: note = Synthetic: WV-37105
  misc_feature 1..23: note = Synthetic: SSR-0103117
  modified_base 1: mod_base = um
  modified_base 1..2: mod_base = OTHER; note = R-phosphorothioate
  modified_base 2: mod_base = OTHER; note = 2-fluororibose uracil
  modified_base 2..3: mod_base = OTHER; note = S-phosphorothioate
  modified_base 3: mod_base = OTHER; note = 2-O-methylribose adenine
  modified_base 3..4: mod_base = OTHER; note = S-phosphorothioate
  modified_base 4: mod_base = OTHER; note = 2-fluororibose uracil
  modified_base 4..5: mod_base = OTHER; note = S-phosphorothioate
  modified_base 5: mod_base = OTHER; note = 2-O-methylribose adenine
  modified_base 5..6: mod_base = OTHER; note = S-phosphorothioate
  modified_base 6: mod_base = OTHER; note = 2-fluororibose guanine
  modified_base 6..7: mod_base = OTHER; note = S-phosphorothioate
  modified_base 7: mod_base = OTHER; note = 2-O-methylribose adenine
  modified_base 7..8: mod_base = OTHER; note = S-phosphorothioate
  modified_base 8: mod_base = OTHER; note = 2-fluororibose guanine
  modified_base 8..9: mod_base = OTHER; note = R-phosphorothioate
  modified_base 9: mod_base = cm
  modified_base 10: mod_base = OTHER; note = 2-fluororibose adenine
  modified_base 11: mod_base = OTHER; note = 2-O-methylribose adenine
  modified_base 12: mod_base = gm
  modified_base 13: mod_base = OTHER; note = 2-O-methylribose adenine
  modified_base 14: mod_base = OTHER; note = 2-fluororibose adenine
  modified_base 15: mod_base = cm
  modified_base 16: mod_base = OTHER; note = 2-fluororibose adenine
  modified_base 17: mod_base = cm
  modified_base 18: mod_base = OTHER; note = 2-fluororibose uracil
  modified_base 19: mod_base = gm
  modified_base 20: mod_base = OTHER; note = 2-fluororibose uracil
  modified_base 21: mod_base = um
  modified_base 21..22: mod_base = OTHER; note = S-phosphorothioate
  modified_base 22: mod_base = um
  modified_base 22..23: mod_base = OTHER; note = S-phosphorothioate
  modified_base 23: mod_base = um
  source 1..23: mol_type = other RNA
ttatagagcaagaacactgtttt

SEQ ID NO: 393 - RNA, 23 nt, synthetic construct
  misc_feature 1..23: note = Synthetic: WV-37106
  misc_feature 1..23: note = Synthetic: SSR-0103118
  modified_base 1: mod_base = um
  modified_base 1..2: mod_base = OTHER; note = R-phosphorothioate
  modified_base 2: mod_base = OTHER; note = 2-fluororibose uracil
  modified_base 2..3: mod_base = OTHER; note = S-phosphorothioate
  modified_base 3: mod_base = OTHER; note = 2-O-methylribose adenine
  modified_base 3..4: mod_base = OTHER; note = S-phosphorothioate
  modified_base 4: mod_base = OTHER; note = 2-fluororibose uracil
  modified_base 4..5: mod_base = OTHER; note = S-phosphorothioate
  modified_base 5: mod_base = OTHER; note = 2-O-methylribose adenine
  modified_base 5..6: mod_base = OTHER; note = S-phosphorothioate
  modified_base 6: mod_base = OTHER; note = 2-fluororibose guanine
  modified_base 6..7: mod_base = OTHER; note = S-phosphorothioate
  modified_base 7: mod_base = OTHER; note = 2-O-methylribose adenine
  modified_base 7..8: mod_base = OTHER; note = S-phosphorothioate
  modified_base 8: mod_base = OTHER; note = 2-fluororibose guanine
  modified_base 8..9: mod_base = OTHER; note = S-phosphorothioate
  modified_base 9: mod_base = cm
  modified_base 10: mod_base = OTHER; note = 2-fluororibose adenine
  modified_base 11: mod_base = OTHER; note = 2-O-methylribose adenine
  modified_base 12: mod_base = gm
  modified_base 13: mod_base = OTHER; note = 2-O-methylribose adenine
  modified_base 14: mod_base = OTHER; note = 2-fluororibose adenine
  modified_base 15: mod_base = cm
  modified_base 16: mod_base = OTHER; note = 2-fluororibose adenine
  modified_base 17: mod_base = cm
  modified_base 18: mod_base = OTHER; note = 2-fluororibose uracil
  modified_base 19: mod_base = gm
  modified_base 20: mod_base = OTHER; note = 2-fluororibose uracil
  modified_base 21: mod_base = um
  modified_base 21..22: mod_base = OTHER; note = S-phosphorothioate
  modified_base 22: mod_base = um
  modified_base 22..23: mod_base = OTHER; note = S-phosphorothioate
  modified_base 23: mod_base = um
  source 1..23: mol_type = other RNA
ttatagagcaagaacactgtttt

SEQ ID NO: 394 - RNA, 23 nt, synthetic construct
  misc_feature 1..23: note = Synthetic: WV-37107
  misc_feature 1..23: note = Synthetic: SSR-0103212
  modified_base 1: mod_base = um
  modified_base 1..2: mod_base = OTHER; note = S-phosphorothioate
  modified_base 2: mod_base = OTHER; note = 2-fluororibose uracil
  modified_base 2..3: mod_base = OTHER; note = R-phosphorothioate
  modified_base 3: mod_base = OTHER; note = 2-O-methylribose adenine
  modified_base 3..4: mod_base = OTHER; note = R-phosphorothioate
  modified_base 4: mod_base = OTHER; note = 2-fluororibose uracil
  modified_base 4..5: mod_base = OTHER; note = R-phosphorothioate
  modified_base 5: mod_base = OTHER; note = 2-O-methylribose adenine
  modified_base 5..6: mod_base = OTHER; note = R-phosphorothioate
  modified_base 6: mod_base = OTHER; note = 2-fluororibose guanine
  modified_base 6..7: mod_base = OTHER; note = R-phosphorothioate
  modified_base 7: mod_base = OTHER; note = 2-O-methylribose adenine
  modified_base 7..8: mod_base = OTHER; note = R-phosphorothioate
  modified_base 8: mod_base = OTHER; note = 2-fluororibose guanine
  modified_base 8..9: mod_base = OTHER; note = R-phosphorothioate
  modified_base 9: mod_base = cm
  modified_base 10: mod_base = OTHER; note = 2-fluororibose adenine
  modified_base 11: mod_base = OTHER; note = 2-O-methylribose adenine
  modified_base 12: mod_base = gm
  modified_base 13: mod_base = OTHER; note = 2-O-methylribose adenine
  modified_base 14: mod_base = OTHER; note = 2-fluororibose adenine
  modified_base 15: mod_base = cm
  modified_base 16: mod_base = OTHER; note = 2-fluororibose adenine
  modified_base 17: mod_base = cm
  modified_base 18: mod_base = OTHER; note = 2-fluororibose uracil
  modified_base 19: mod_base = gm
  modified_base 20: mod_base = OTHER; note = 2-fluororibose uracil
  modified_base 21: mod_base = um
  modified_base 21..22: mod_base = OTHER; note = S-phosphorothioate
  modified_base 22: mod_base = um
  modified_base 22..23: mod_base = OTHER; note = S-phosphorothioate
  modified_base 23: mod_base = um
  source 1..23: mol_type = other RNA
ttatagagcaagaacactgtttt

SEQ ID NO: 395 - RNA, 23 nt, synthetic construct
  misc_feature 1..23: note = Synthetic: WV-37108
  misc_feature 1..23: note = Synthetic: SSR-0103213
  modified_base 1: mod_base = um
  modified_base 1..2: mod_base = OTHER; note = S-phosphorothioate
  modified_base 2: mod_base = OTHER; note = 2-fluororibose uracil
  modified_base 2..3: mod_base = OTHER; note = R-phosphorothioate
  modified_base 3: mod_base = OTHER; note = 2-O-methylribose adenine
  modified_base 3..4: mod_base = OTHER; note = R-phosphorothioate
  modified_base 4: mod_base = OTHER; note = 2-fluororibose uracil
  modified_base 4..5: mod_base = OTHER; note = R-phosphorothioate
  modified_base 5: mod_base = OTHER; note = 2-O-methylribose adenine
  modified_base 5..6: mod_base = OTHER; note = R-phosphorothioate
  modified_base 6: mod_base = OTHER; note = 2-fluororibose guanine
  modified_base 6..7: mod_base = OTHER; note = R-phosphorothioate
  modified_base 7: mod_base = OTHER; note = 2-O-methylribose adenine
  modified_base 7..8: mod_base = OTHER; note = R-phosphorothioate
  modified_base 8: mod_base = OTHER; note = 2-fluororibose guanine
  modified_base 8..9: mod_base = OTHER; note = S-phosphorothioate
  modified_base 9: mod_base = cm
  modified_base 10: mod_base = OTHER; note = 2-fluororibose adenine
  modified_base 11: mod_base = OTHER; note = 2-O-methylribose adenine
  modified_base 12: mod_base = gm
  modified_base 13: mod_base = OTHER; note = 2-O-methylribose adenine
  modified_base 14: mod_base = OTHER; note = 2-fluororibose adenine
  modified_base 15: mod_base = cm
  modified_base 16: mod_base = OTHER; note = 2-fluororibose adenine
  modified_base 17: mod_base = cm
  modified_base 18: mod_base = OTHER; note = 2-fluororibose uracil
  modified_base 19: mod_base = gm
  modified_base 20: mod_base = OTHER; note = 2-fluororibose uracil
  modified_base 21: mod_base = um
  modified_base 21..22: mod_base = OTHER; note = S-phosphorothioate
  modified_base 22: mod_base = um
  modified_base 22..23: mod_base = OTHER; note = S-phosphorothioate
  modified_base 23: mod_base = um
  source 1..23: mol_type = other RNA
ttatagagcaagaacactgtttt

SEQ ID NO: 396 - RNA, 23 nt, synthetic construct
  misc_feature 1..23: note = Synthetic: WV-37109
  misc_feature 1..23: note = Synthetic: SSR-0103214
  modified_base 1: mod_base = um
  modified_base 1..2: mod_base = OTHER; note = S-phosphorothioate
  modified_base 2: mod_base = OTHER; note = 2-fluororibose uracil
  modified_base 2..3: mod_base = OTHER; note = R-phosphorothioate
  modified_base 3: mod_base = OTHER; note = 2-O-methylribose adenine
  modified_base 3..4: mod_base = OTHER; note = R-phosphorothioate
  modified_base 4: mod_base = OTHER; note = 2-fluororibose uracil
  modified_base 4..5: mod_base = OTHER; note = R-phosphorothioate
  modified_base 5: mod_base = OTHER; note = 2-O-methylribose adenine
  modified_base 5..6: mod_base = OTHER; note = R-phosphorothioate
  modified_base 6: mod_base = OTHER; note = 2-fluororibose guanine
  modified_base 6..7: mod_base = OTHER; note = R-phosphorothioate
  modified_base 7: mod_base = OTHER; note = 2-O-methylribose adenine
  modified_base 7..8: mod_base = OTHER; note = S-phosphorothioate
  modified_base 8: mod_base = OTHER; note = 2-fluororibose guanine
  modified_base 8..9: mod_base = OTHER; note = R-phosphorothioate
  modified_base 9: mod_base = cm
  modified_base 10: mod_base = OTHER; note = 2-fluororibose adenine
  modified_base 11: mod_base = OTHER; note = 2-O-methylribose adenine
  modified_base 12: mod_base = gm
  modified_base 13: mod_base = OTHER; note = 2-O-methylribose adenine
  modified_base 14: mod_base = OTHER; note = 2-fluororibose adenine
  modified_base 15: mod_base = cm
  modified_base 16: mod_base = OTHER; note = 2-fluororibose adenine
  modified_base 17: mod_base = cm
  modified_base 18: mod_base = OTHER; note = 2-fluororibose uracil
  modified_base 19: mod_base = gm
  modified_base 20: mod_base = OTHER; note = 2-fluororibose uracil
  modified_base 21: mod_base = um
  modified_base 21..22: mod_base = OTHER; note = S-phosphorothioate
  modified_base 22: mod_base = um
  modified_base 22..23: mod_base = OTHER; note = S-phosphorothioate
  modified_base 23: mod_base = um
  source 1..23: mol_type = other RNA
ttatagagcaagaacactgtttt

SEQ ID NO: 397 - RNA, 23 nt, synthetic construct
  misc_feature 1..23: note = Synthetic: WV-37110
  misc_feature 1..23: note = Synthetic: SSR-0103215
  modified_base 1: mod_base = um
  modified_base 1..2: mod_base = OTHER; note = S-phosphorothioate
  modified_base 2: mod_base = OTHER; note = 2-fluororibose uracil
  modified_base 2..3: mod_base = OTHER; note = R-phosphorothioate
  modified_base 3: mod_base = OTHER; note = 2-O-methylribose adenine
  modified_base 3..4: mod_base = OTHER; note = R-phosphorothioate
  modified_base 4: mod_base = OTHER; note = 2-fluororibose uracil
  modified_base 4..5: mod_base = OTHER; note = R-phosphorothioate
  modified_base 5: mod_base = OTHER; note = 2-O-methylribose adenine
  modified_base 5..6: mod_base = OTHER; note = R-phosphorothioate
  modified_base 6: mod_base = OTHER; note = 2-fluororibose guanine
  modified_base 6..7: mod_base = OTHER; note = R-phosphorothioate
  modified_base 7: mod_base = OTHER; note = 2-O-methylribose adenine
  modified_base 7..8: mod_base = OTHER; note = S-phosphorothioate
  modified_base 8: mod_base = OTHER; note = 2-fluororibose guanine
  modified_base 8..9: mod_base = OTHER; note = S-phosphorothioate
  modified_base 9: mod_base = cm
  modified_base 10: mod_base = OTHER; note = 2-fluororibose adenine
  modified_base 11: mod_base = OTHER; note = 2-O-methylribose adenine
  modified_base 12: mod_base = gm
  modified_base 13: mod_base = OTHER; note = 2-O-methylribose adenine
  modified_base 14: mod_base = OTHER; note = 2-fluororibose adenine
  modified_base 15: mod_base = cm
  modified_base 16: mod_base = OTHER; note = 2-fluororibose adenine
  modified_base 17: mod_base = cm
  modified_base 18: mod_base = OTHER; note = 2-fluororibose uracil
  modified_base 19: mod_base = gm
  modified_base 20: mod_base = OTHER; note = 2-fluororibose uracil
  modified_base 21: mod_base = um
  modified_base 21..22: mod_base = OTHER; note = S-phosphorothioate
  modified_base 22: mod_base = um
  modified_base 22..23: mod_base = OTHER; note = S-phosphorothioate
  modified_base 23: mod_base = um
  source 1..23: mol_type = other RNA
ttatagagcaagaacactgtttt

SEQ ID NO: 398 - RNA, 23 nt, synthetic construct
  misc_feature 1..23: note = Synthetic: WV-37111
  misc_feature 1..23: note = Synthetic: SSR-0103216
  modified_base 1: mod_base = um
  modified_base 1..2: mod_base = OTHER; note = S-phosphorothioate
  modified_base 2: mod_base = OTHER; note = 2-fluororibose uracil
  modified_base 2..3: mod_base = OTHER; note = R-phosphorothioate
  modified_base 3: mod_base = OTHER; note = 2-O-methylribose adenine
  modified_base 3..4: mod_base = OTHER; note = R-phosphorothioate
  modified_base 4: mod_base = OTHER; note = 2-fluororibose uracil
  modified_base 4..5: mod_base = OTHER; note = R-phosphorothioate
  modified_base 5: mod_base = OTHER; note = 2-O-methylribose adenine
  modified_base 5..6: mod_base = OTHER; note = R-phosphorothioate
  modified_base 6: mod_base = OTHER; note = 2-fluororibose guanine
  modified_base 6..7: mod_base = OTHER; note = S-phosphorothioate
  modified_base 7: mod_base = OTHER; note = 2-O-methylribose adenine
  modified_base 7..8: mod_base = OTHER; note = R-phosphorothioate
  modified_base 8: mod_base = OTHER; note = 2-fluororibose guanine
  modified_base 8..9: mod_base = OTHER; note = R-phosphorothioate
  modified_base 9: mod_base = cm
  modified_base 10: mod_base = OTHER; note = 2-fluororibose adenine
  modified_base 11: mod_base = OTHER; note = 2-O-methylribose adenine
  modified_base 12: mod_base = gm
  modified_base 13: mod_base = OTHER; note = 2-O-methylribose adenine
  modified_base 14: mod_base = OTHER; note = 2-fluororibose adenine
  modified_base 15: mod_base = cm
  modified_base 16: mod_base = OTHER; note = 2-fluororibose adenine
  modified_base 17: mod_base = cm
  modified_base 18: mod_base = OTHER; note = 2-fluororibose uracil
  modified_base 19: mod_base = gm
  modified_base 20: mod_base = OTHER; note = 2-fluororibose uracil
  modified_base 21: mod_base = um
  modified_base 21..22: mod_base = OTHER; note = S-phosphorothioate
  modified_base 22: mod_base = um
  modified_base 22..23: mod_base = OTHER; note = S-phosphorothioate
  modified_base 23: mod_base = um
  source 1..23: mol_type = other RNA
ttatagagcaagaacactgtttt

SEQ ID NO: 399 - RNA, 23 nt, synthetic construct
  misc_feature 1..23: note = Synthetic: WV-37112
  misc_feature 1..23: note = Synthetic: SSR-0103217
  modified_base 1: mod_base = um
  modified_base 1..2: mod_base = OTHER; note = S-phosphorothioate
  modified_base 2: mod_base = OTHER; note = 2-fluororibose uracil
  modified_base 2..3: mod_base = OTHER; note = R-phosphorothioate
  modified_base 3: mod_base = OTHER; note = 2-O-methylribose adenine
  modified_base 3..4: mod_base = OTHER; note = R-phosphorothioate
  modified_base 4: mod_base = OTHER; note = 2-fluororibose uracil
  modified_base 4..5: mod_base = OTHER; note = R-phosphorothioate
  modified_base 5: mod_base = OTHER; note = 2-O-methylribose adenine
  modified_base 5..6: mod_base = OTHER; note = R-phosphorothioate
  modified_base 6: mod_base = OTHER; note = 2-fluororibose guanine
  modified_base 6..7: mod_base = OTHER; note = S-phosphorothioate
  modified_base 7: mod_base = OTHER; note = 2-O-methylribose adenine
  modified_base 7..8: mod_base = OTHER; note = R-phosphorothioate
  modified_base 8: mod_base = OTHER; note = 2-fluororibose guanine
  modified_base 8..9: mod_base = OTHER; note = S-phosphorothioate
  modified_base 9: mod_base = cm
  modified_base 10: mod_base = OTHER; note = 2-fluororibose adenine
  modified_base 11: mod_base = OTHER; note = 2-O-methylribose adenine
  modified_base 12: mod_base = gm
  modified_base 13: mod_base = OTHER; note = 2-O-methylribose adenine
  modified_base 14: mod_base = OTHER; note = 2-fluororibose adenine
  modified_base 15: mod_base = cm
  modified_base 16: mod_base = OTHER; note = 2-fluororibose adenine
  modified_base 17: mod_base = cm
  modified_base 18: mod_base = OTHER; note = 2-fluororibose uracil
  modified_base 19: mod_base = gm
  modified_base 20: mod_base = OTHER; note = 2-fluororibose uracil
  modified_base 21: mod_base = um
  modified_base 21..22: mod_base = OTHER; note = S-phosphorothioate
  modified_base 22: mod_base = um
  modified_base 22..23: mod_base = OTHER; note = S-phosphorothioate
  modified_base 23: mod_base = um
  source 1..23: mol_type = other RNA
ttatagagcaagaacactgtttt

SEQ ID NO: 400 - RNA, 23 nt, synthetic construct
  misc_feature 1..23: note = Synthetic: WV-37113
  misc_feature 1..23: note = Synthetic: SSR-0103218
  modified_base 1: mod_base = um
  modified_base 1..2: mod_base = OTHER; note = S-phosphorothioate
  modified_base 2: mod_base = OTHER; note = 2-fluororibose uracil
  modified_base 2..3: mod_base = OTHER; note = R-phosphorothioate
  modified_base 3: mod_base = OTHER; note = 2-O-methylribose adenine
  modified_base 3..4: mod_base = OTHER; note = R-phosphorothioate
  modified_base 4: mod_base = OTHER; note = 2-fluororibose uracil
  modified_base 4..5: mod_base = OTHER; note = R-phosphorothioate
  modified_base 5: mod_base = OTHER; note = 2-O-methylribose adenine
  modified_base 5..6: mod_base = OTHER; note = R-phosphorothioate
  modified_base 6: mod_base = OTHER; note = 2-fluororibose guanine
  modified_base 6..7: mod_base = OTHER; note = S-phosphorothioate
  modified_base 7: mod_base = OTHER; note = 2-O-methylribose adenine
  modified_base 7..8: mod_base = OTHER; note = S-phosphorothioate
  modified_base 8: mod_base = OTHER; note = 2-fluororibose guanine
  modified_base 8..9: mod_base = OTHER; note = R-phosphorothioate
  modified_base 9: mod_base = cm
  modified_base 10: mod_base = OTHER; note = 2-fluororibose adenine
  modified_base 11: mod_base = OTHER; note = 2-O-methylribose adenine
  modified_base 12: mod_base = gm
  modified_base 13: mod_base = OTHER; note = 2-O-methylribose adenine
  modified_base 14: mod_base = OTHER; note = 2-fluororibose adenine
  modified_base 15: mod_base = cm
  modified_base 16: mod_base = OTHER; note = 2-fluororibose adenine
  modified_base 17: mod_base = cm
  modified_base 18: mod_base = OTHER; note = 2-fluororibose uracil
  modified_base 19: mod_base = gm
  modified_base 20: mod_base = OTHER; note = 2-fluororibose uracil
  modified_base 21: mod_base = um
  modified_base 21..22: mod_base = OTHER; note = S-phosphorothioate
  modified_base 22: mod_base = um
  modified_base 22..23: mod_base = OTHER; note = S-phosphorothioate
  modified_base 23: mod_base = um
  source 1..23: mol_type = other RNA
ttatagagcaagaacactgtttt

SEQ ID NO: 401 - RNA, 23 nt, synthetic construct
  misc_feature 1..23: note = Synthetic: WV-37114
  misc_feature 1..23: note = Synthetic: SSR-0103219
  modified_base 1: mod_base = um
  modified_base 1..2: mod_base = OTHER; note = S-phosphorothioate
  modified_base 2: mod_base = OTHER; note = 2-fluororibose uracil
  modified_base 2..3: mod_base = OTHER; note = R-phosphorothioate
  modified_base 3: mod_base = OTHER; note = 2-O-methylribose adenine
  modified_base 3..4: mod_base = OTHER; note = R-phosphorothioate
  modified_base 4: mod_base = OTHER; note = 2-fluororibose uracil
  modified_base 4..5: mod_base = OTHER; note = R-phosphorothioate
  modified_base 5: mod_base = OTHER; note = 2-O-methylribose adenine
  modified_base 5..6: mod_base = OTHER; note = R-phosphorothioate
  modified_base 6: mod_base = OTHER; note = 2-fluororibose guanine
  modified_base 6..7: mod_base = OTHER; note = S-phosphorothioate
  modified_base 7: mod_base = OTHER; note = 2-O-methylribose adenine
  modified_base 7..8: mod_base = OTHER; note = S-phosphorothioate
  modified_base 8: mod_base = OTHER; note = 2-fluororibose guanine
  modified_base 8..9: mod_base = OTHER; note = S-phosphorothioate
  modified_base 9: mod_base = cm
  modified_base 10: mod_base = OTHER; note = 2-fluororibose adenine
  modified_base 11: mod_base = OTHER; note = 2-O-methylribose adenine
  modified_base 12: mod_base = gm
  modified_base 13: mod_base = OTHER; note = 2-O-methylribose adenine
  modified_base 14: mod_base = OTHER; note = 2-fluororibose adenine
  modified_base 15: mod_base = cm
  modified_base 16: mod_base = OTHER; note = 2-fluororibose adenine
  modified_base 17: mod_base = cm
  modified_base 18: mod_base = OTHER; note = 2-fluororibose uracil
  modified_base 19: mod_base = gm
  modified_base 20: mod_base = OTHER; note = 2-fluororibose uracil
  modified_base 21: mod_base = um
  modified_base 21..22: mod_base = OTHER; note = S-phosphorothioate
  modified_base 22: mod_base = um
  modified_base 22..23: mod_base = OTHER; note = S-phosphorothioate
  modified_base 23: mod_base = um
  source 1..23: mol_type = other RNA
ttatagagcaagaacactgtttt

SEQ ID NO: 402 - RNA, 23 nt, synthetic construct
  misc_feature 1..23: note = Synthetic: WV-37115
  misc_feature 1..23: note = Synthetic: SSR-0103220
  modified_base 1: mod_base = um
  modified_base 1..2: mod_base = OTHER; note = S-phosphorothioate
  modified_base 2: mod_base = OTHER; note = 2-fluororibose uracil
  modified_base 2..3: mod_base = OTHER; note = R-phosphorothioate
  modified_base 3: mod_base = OTHER; note = 2-O-methylribose adenine
  modified_base 3..4: mod_base = OTHER; note = R-phosphorothioate
  modified_base 4: mod_base = OTHER; note = 2-fluororibose uracil
  modified_base 4..5: mod_base = OTHER; note = R-phosphorothioate
  modified_base 5: mod_base = OTHER; note = 2-O-methylribose adenine
  modified_base 5..6: mod_base = OTHER; note = S-phosphorothioate
  modified_base 6: mod_base = OTHER; note = 2-fluororibose guanine
  modified_base 6..7: mod_base = OTHER; note = R-phosphorothioate
  modified_base 7: mod_base = OTHER; note = 2-O-methylribose adenine
  modified_base 7..8: mod_base = OTHER; note = R-phosphorothioate
  modified_base 8: mod_base = OTHER; note = 2-fluororibose guanine
  modified_base 8..9: mod_base = OTHER; note = R-phosphorothioate
  modified_base 9: mod_base = cm
  modified_base 10: mod_base = OTHER; note = 2-fluororibose adenine
  modified_base 11: mod_base = OTHER; note = 2-O-methylribose adenine
  modified_base 12: mod_base = gm
  modified_base 13: mod_base = OTHER; note = 2-O-methylribose adenine
  modified_base 14: mod_base = OTHER; note = 2-fluororibose adenine
  modified_base 15: mod_base = cm
  modified_base 16: mod_base = OTHER; note = 2-fluororibose adenine
  modified_base 17: mod_base = cm
  modified_base 18: mod_base = OTHER; note = 2-fluororibose uracil
  modified_base 19: mod_base = gm
  modified_base 20: mod_base = OTHER; note = 2-fluororibose uracil
  modified_base 21: mod_base = um
  modified_base 21..22: mod_base = OTHER; note = S-phosphorothioate
  modified_base 22: mod_base = um
  modified_base 22..23: mod_base = OTHER; note = S-phosphorothioate
  modified_base 23: mod_base = um
  source 1..23: mol_type = other RNA
ttatagagcaagaacactgtttt

SEQ ID NO: 403 - RNA, 23 nt, synthetic construct
  misc_feature 1..23: note = Synthetic: WV-37116
  misc_feature 1..23: note = Synthetic: SSR-0103221
  modified_base 1: mod_base = um
  modified_base 1..2: mod_base = OTHER; note = S-phosphorothioate
  modified_base 2: mod_base = OTHER; note = 2-fluororibose uracil
  modified_base 2..3: mod_base = OTHER; note = R-phosphorothioate
  modified_base 3: mod_base = OTHER; note = 2-O-methylribose adenine
  modified_base 3..4: mod_base = OTHER; note = R-phosphorothioate
  modified_base 4: mod_base = OTHER; note = 2-fluororibose uracil
  modified_base 4..5: mod_base = OTHER; note = R-phosphorothioate
  modified_base 5: mod_base = OTHER; note = 2-O-methylribose adenine
  modified_base 5..6: mod_base = OTHER; note = S-phosphorothioate
  modified_base 6: mod_base = OTHER; note = 2-fluororibose guanine
  modified_base 6..7: mod_base = OTHER; note = R-phosphorothioate
  modified_base 7: mod_base = OTHER; note = 2-O-methylribose adenine
  modified_base 7..8: mod_base = OTHER; note = R-phosphorothioate
  modified_base 8: mod_base = OTHER; note = 2-fluororibose guanine
  modified_base 8..9: mod_base = OTHER; note = S-phosphorothioate
  modified_base 9: mod_base = cm
  modified_base 10: mod_base = OTHER; note = 2-fluororibose adenine
  modified_base 11: mod_base = OTHER; note = 2-O-methylribose adenine
  modified_base 12: mod_base = gm
  modified_base 13: mod_base = OTHER; note = 2-O-methylribose adenine
  modified_base 14: mod_base = OTHER; note = 2-fluororibose adenine
  modified_base 15: mod_base = cm
  modified_base 16: mod_base = OTHER; note = 2-fluororibose adenine
  modified_base 17: mod_base = cm
  modified_base 18: mod_base = OTHER; note = 2-fluororibose uracil
  modified_base 19: mod_base = gm
  modified_base 20: mod_base = OTHER; note = 2-fluororibose uracil
  modified_base 21: mod_base = um
  modified_base 21..22: mod_base = OTHER; note = S-phosphorothioate
  modified_base 22: mod_base = um
  modified_base 22..23: mod_base = OTHER; note = S-phosphorothioate
  modified_base 23: mod_base = um
  source 1..23: mol_type = other RNA
ttatagagcaagaacactgtttt

SEQ ID NO: 404 - RNA, 23 nt, synthetic construct
  misc_feature 1..23: note = Synthetic: WV-37117
  misc_feature 1..23: note = Synthetic: SSR-0103222
  modified_base 1: mod_base = um
  modified_base 1..2: mod_base = OTHER; note = S-phosphorothioate
  modified_base 2: mod_base = OTHER; note = 2-fluororibose uracil
  modified_base 2..3: mod_base = OTHER; note = R-phosphorothioate
  modified_base 3: mod_base = OTHER; note = 2-O-methylribose adenine
  modified_base 3..4: mod_base = OTHER; note = R-phosphorothioate
  modified_base 4: mod_base = OTHER; note = 2-fluororibose uracil
  modified_base 4..5: mod_base = OTHER; note = R-phosphorothioate
  modified_base 5: mod_base = OTHER; note = 2-O-methylribose adenine
  modified_base 5..6: mod_base = OTHER; note = S-phosphorothioate
  modified_base 6: mod_base = OTHER; note = 2-fluororibose guanine
  modified_base 6..7: mod_base = OTHER; note = R-phosphorothioate
  modified_base 7: mod_base = OTHER; note = 2-O-methylribose adenine
  modified_base 7..8: mod_base = OTHER; note = S-phosphorothioate
  modified_base 8: mod_base = OTHER; note = 2-fluororibose guanine
  modified_base 8..9: mod_base = OTHER; note = R-phosphorothioate
  modified_base 9: mod_base = cm
  modified_base 10: mod_base = OTHER; note = 2-fluororibose adenine
  modified_base 11: mod_base = OTHER; note = 2-O-methylribose adenine
  modified_base 12: mod_base = gm
  modified_base 13: mod_base = OTHER; note = 2-O-methylribose adenine
  modified_base 14: mod_base = OTHER; note = 2-fluororibose adenine
  modified_base 15: mod_base = cm
  modified_base 16: mod_base = OTHER; note = 2-fluororibose adenine
  modified_base 17: mod_base = cm
  modified_base 18: mod_base = OTHER; note = 2-fluororibose uracil
  modified_base 19: mod_base = gm
  modified_base 20: mod_base = OTHER; note = 2-fluororibose uracil
  modified_base 21: mod_base = um
  modified_base 21..22: mod_base = OTHER; note = S-phosphorothioate
  modified_base 22: mod_base = um
  modified_base 22..23: mod_base = OTHER; note = S-phosphorothioate
  modified_base 23: mod_base = um
  source 1..23: mol_type = other RNA
ttatagagcaagaacactgtttt

SEQ ID NO: 405 - RNA, 23 nt, synthetic construct
  misc_feature 1..23: note = Synthetic: WV-37118
  misc_feature 1..23: note = Synthetic: SSR-0103223
  modified_base 1: mod_base = um
  modified_base 1..2: mod_base = OTHER; note = S-phosphorothioate
  modified_base 2: mod_base = OTHER; note = 2-fluororibose uracil
  modified_base 2..3: mod_base = OTHER; note = R-phosphorothioate
  modified_base 3: mod_base = OTHER; note = 2-O-methylribose adenine
  modified_base 3..4: mod_base = OTHER; note = R-phosphorothioate
  modified_base 4: mod_base = OTHER; note = 2-fluororibose uracil
  modified_base 4..5: mod_base = OTHER; note = R-phosphorothioate
  modified_base 5: mod_base = OTHER; note = 2-O-methylribose adenine
  modified_base 5..6: mod_base = OTHER; note = S-phosphorothioate
  modified_base 6: mod_base = OTHER; note = 2-fluororibose guanine
  modified_base 6..7: mod_base = OTHER; note = R-phosphorothioate
  modified_base 7: mod_base = OTHER; note = 2-O-methylribose adenine
  modified_base 7..8: mod_base = OTHER; note = S-phosphorothioate
  modified_base 8: mod_base = OTHER; note = 2-fluororibose guanine
  modified_base 8..9: mod_base = OTHER; note = S-phosphorothioate
  modified_base 9: mod_base = cm
  modified_base 10: mod_base = OTHER; note = 2-fluororibose adenine
  modified_base 11: mod_base = OTHER; note = 2-O-methylribose adenine
  modified_base 12: mod_base = gm
  modified_base 13: mod_base = OTHER; note = 2-O-methylribose adenine
  modified_base 14: mod_base = OTHER; note = 2-fluororibose adenine
  modified_base 15: mod_base = cm
  modified_base 16: mod_base = OTHER; note = 2-fluororibose adenine
  modified_base 17: mod_base = cm
  modified_base 18: mod_base = OTHER; note = 2-fluororibose uracil
  modified_base 19: mod_base = gm
  modified_base 20: mod_base = OTHER; note = 2-fluororibose uracil
  modified_base 21: mod_base = um
  modified_base 21..22: mod_base = OTHER; note = S-phosphorothioate
  modified_base 22: mod_base = um
  modified_base 22..23: mod_base = OTHER; note = S-phosphorothioate
  modified_base 23: mod_base = um
  source 1..23: mol_type = other RNA
ttatagagcaagaacactgtttt

SEQ ID NO: 406 - RNA, 23 nt, synthetic construct
  misc_feature 1..23: note = Synthetic: WV-37119
  misc_feature 1..23: note = Synthetic: SSR-0103224
  modified_base 1: mod_base = um
  modified_base 1..2: mod_base = OTHER; note = S-phosphorothioate
  modified_base 2: mod_base = OTHER; note = 2-fluororibose uracil
  modified_base 2..3: mod_base = OTHER; note = R-phosphorothioate
  modified_base 3: mod_base = OTHER; note = 2-O-methylribose adenine
  modified_base 3..4: mod_base = OTHER; note = R-phosphorothioate
  modified_base 4: mod_base = OTHER; note = 2-fluororibose uracil
  modified_base 4..5: mod_base = OTHER; note = R-phosphorothioate
  modified_base 5: mod_base = OTHER; note = 2-O-methylribose adenine
  modified_base 5..6: mod_base = OTHER; note = S-phosphorothioate
  modified_base 6: mod_base = OTHER; note = 2-fluororibose guanine
  modified_base 6..7: mod_base = OTHER; note = S-phosphorothioate
  modified_base 7: mod_base = OTHER; note = 2-O-methylribose adenine
  modified_base 7..8: mod_base = OTHER; note = R-phosphorothioate
  modified_base 8: mod_base = OTHER; note = 2-fluororibose guanine
  modified_base 8..9: mod_base = OTHER; note = R-phosphorothioate
  modified_base 9: mod_base = cm
  modified_base 10: mod_base = OTHER; note = 2-fluororibose adenine
  modified_base 11: mod_base = OTHER; note = 2-O-methylribose adenine
  modified_base 12: mod_base = gm
  modified_base 13: mod_base = OTHER; note = 2-O-methylribose adenine
  modified_base 14: mod_base = OTHER; note = 2-fluororibose adenine
  modified_base 15: mod_base = cm
  modified_base 16: mod_base = OTHER; note = 2-fluororibose adenine
  modified_base 17: mod_base = cm
  modified_base 18: mod_base = OTHER; note = 2-fluororibose uracil
  modified_base 19: mod_base = gm
  modified_base 20: mod_base = OTHER; note = 2-fluororibose uracil
  modified_base 21: mod_base = um
  modified_base 21..22: mod_base = OTHER; note = S-phosphorothioate
  modified_base 22: mod_base = um
  modified_base 22..23: mod_base = OTHER; note = S-phosphorothioate
  modified_base 23: mod_base = um
  source 1..23: mol_type = other RNA
ttatagagcaagaacactgtttt

SEQ ID NO: 407 - RNA, 23 nt, synthetic construct
  misc_feature 1..23: note = Synthetic: WV-37120
  misc_feature 1..23: note = Synthetic: SSR-0103225
  modified_base 1: mod_base = um
  modified_base 1..2: mod_base = OTHER; note = S-phosphorothioate
  modified_base 2: mod_base = OTHER; note = 2-fluororibose uracil
  modified_base 2..3: mod_base = OTHER; note = R-phosphorothioate
  modified_base 3: mod_base = OTHER; note = 2-O-methylribose adenine
  modified_base 3..4: mod_base = OTHER; note = R-phosphorothioate
  modified_base 4: mod_base = OTHER; note = 2-fluororibose uracil
  modified_base 4..5: mod_base = OTHER; note = R-phosphorothioate
  modified_base 5: mod_base = OTHER; note = 2-O-methylribose adenine
  modified_base 5..6: mod_base = OTHER; note = S-phosphorothioate
  modified_base 6: mod_base = OTHER; note = 2-fluororibose guanine
  modified_base 6..7: mod_base = OTHER; note = S-phosphorothioate
  modified_base 7: mod_base = OTHER; note = 2-O-methylribose adenine
  modified_base 7..8: mod_base = OTHER; note = R-phosphorothioate
  modified_base 8: mod_base = OTHER; note = 2-fluororibose guanine
  modified_base 8..9: mod_base = OTHER; note = S-phosphorothioate
  modified_base 9: mod_base = cm
  modified_base 10: mod_base = OTHER; note = 2-fluororibose adenine
  modified_base 11: mod_base = OTHER; note = 2-O-methylribose adenine
  modified_base 12: mod_base = gm
  modified_base 13: mod_base = OTHER; note = 2-O-methylribose adenine
  modified_base 14: mod_base = OTHER; note = 2-fluororibose adenine
  modified_base 15: mod_base = cm
  modified_base 16: mod_base = OTHER; note = 2-fluororibose adenine
  modified_base 17: mod_base = cm
  modified_base 18: mod_base = OTHER; note = 2-fluororibose uracil
  modified_base 19: mod_base = gm
  modified_base 20: mod_base = OTHER; note = 2-fluororibose uracil
  modified_base 21: mod_base = um
  modified_base 21..22: mod_base = OTHER; note = S-phosphorothioate
  modified_base 22: mod_base = um
  modified_base 22..23: mod_base = OTHER; note = S-phosphorothioate
  modified_base 23: mod_base = um
  source 1..23: mol_type = other RNA
ttatagagcaagaacactgtttt

SEQ ID NO: 408 - RNA, 23 nt, synthetic construct
  misc_feature 1..23: note = Synthetic: WV-37121
  misc_feature 1..23: note = Synthetic: SSR-0103226
  modified_base 1: mod_base = um
  modified_base 1..2: mod_base = OTHER; note = S-phosphorothioate
  modified_base 2: mod_base = OTHER; note = 2-fluororibose uracil
  modified_base 2..3: mod_base = OTHER; note = R-phosphorothioate
  modified_base 3: mod_base = OTHER; note = 2-O-methylribose adenine
  modified_base 3..4: mod_base = OTHER; note = R-phosphorothioate
  modified_base 4: mod_base = OTHER; note = 2-fluororibose uracil
  modified_base 4..5: mod_base = OTHER; note = R-phosphorothioate
  modified_base 5: mod_base = OTHER; note = 2-O-methylribose adenine
  modified_base 5..6: mod_base = OTHER; note = S-phosphorothioate
  modified_base 6: mod_base = OTHER; note = 2-fluororibose guanine
  modified_base 6..7: mod_base = OTHER; note = S-phosphorothioate
  modified_base 7: mod_base = OTHER; note = 2-O-methylribose adenine
  modified_base 7..8: mod_base = OTHER; note = S-phosphorothioate
  modified_base 8: mod_base = OTHER; note = 2-fluororibose guanine
  modified_base 8..9: mod_base = OTHER; note = R-phosphorothioate
  modified_base 9: mod_base = cm
  modified_base 10: mod_base = OTHER; note = 2-fluororibose adenine
  modified_base 11: mod_base = OTHER; note = 2-O-methylribose adenine
  modified_base 12: mod_base = gm
  modified_base 13: mod_base = OTHER; note = 2-O-methylribose adenine
  modified_base 14: mod_base = OTHER; note = 2-fluororibose adenine
  modified_base 15: mod_base = cm
  modified_base 16: mod_base = OTHER; note = 2-fluororibose adenine
  modified_base 17: mod_base = cm
  modified_base 18: mod_base = OTHER; note = 2-fluororibose uracil
  modified_base 19: mod_base = gm
  modified_base 20: mod_base = OTHER; note = 2-fluororibose uracil
  modified_base 21: mod_base = um
  modified_base 21..22: mod_base = OTHER; note = S-phosphorothioate
  modified_base 22: mod_base = um
  modified_base 22..23: mod_base = OTHER; note = S-phosphorothioate
  modified_base 23: mod_base = um
  source 1..23: mol_type = other RNA
ttatagagcaagaacactgtttt

SEQ ID NO: 409 - RNA, 23 nt, synthetic construct
  misc_feature 1..23: note = Synthetic: WV-37122
  misc_feature 1..23: note = Synthetic: SSR-0103227
  modified_base 1: mod_base = um
  modified_base 1..2: mod_base = OTHER; note = S-phosphorothioate
  modified_base 2: mod_base = OTHER; note = 2-fluororibose uracil
  modified_base 2..3: mod_base = OTHER; note = R-phosphorothioate
  modified_base 3: mod_base = OTHER; note = 2-O-methylribose adenine
  modified_base 3..4: mod_base = OTHER; note = R-phosphorothioate
  modified_base 4: mod_base = OTHER; note = 2-fluororibose uracil
  modified_base 4..5: mod_base = OTHER; note = R-phosphorothioate
  modified_base 5: mod_base = OTHER; note = 2-O-methylribose adenine
  modified_base 5..6: mod_base = OTHER; note = S-phosphorothioate
  modified_base 6: mod_base = OTHER; note = 2-fluororibose guanine
  modified_base 6..7: mod_base = OTHER; note = S-phosphorothioate
  modified_base 7: mod_base = OTHER; note = 2-O-methylribose adenine
  modified_base 7..8: mod_base = OTHER; note = S-phosphorothioate
  modified_base 8: mod_base = OTHER; note = 2-fluororibose guanine
  modified_base 8..9: mod_base = OTHER; note = S-phosphorothioate
  modified_base 9: mod_base = cm
  modified_base 10: mod_base = OTHER; note = 2-fluororibose adenine
  modified_base 11: mod_base = OTHER; note = 2-O-methylribose adenine
  modified_base 12: mod_base = gm
  modified_base 13: mod_base = OTHER; note = 2-O-methylribose adenine
  modified_base 14: mod_base = OTHER; note = 2-fluororibose adenine
  modified_base 15: mod_base = cm
  modified_base 16: mod_base = OTHER; note = 2-fluororibose adenine
  modified_base 17: mod_base = cm
  modified_base 18: mod_base = OTHER; note = 2-fluororibose uracil
  modified_base 19: mod_base = gm
  modified_base 20: mod_base = OTHER; note = 2-fluororibose uracil
  modified_base 21: mod_base = um
  modified_base 21..22: mod_base = OTHER; note = S-phosphorothioate
  modified_base 22: mod_base = um
  modified_base 22..23: mod_base = OTHER; note = S-phosphorothioate
  modified_base 23: mod_base = um
  source 1..23: mol_type = other RNA
ttatagagcaagaacactgtttt

SEQ ID NO: 410 - RNA, 23 nt, synthetic construct
  misc_feature 1..23: note = Synthetic: WV-37123
  misc_feature 1..23: note = Synthetic: SSR-0103228
  modified_base 1: mod_base = um
  modified_base 1..2: mod_base = OTHER; note = S-phosphorothioate
  modified_base 2: mod_base = OTHER; note = 2-fluororibose uracil
  modified_base 2..3: mod_base = OTHER; note = R-phosphorothioate
  modified_base 3: mod_base = OTHER; note = 2-O-methylribose adenine
  modified_base 3..4: mod_base = OTHER; note = R-phosphorothioate
  modified_base 4: mod_base = OTHER; note = 2-fluororibose uracil
  modified_base 4..5: mod_base = OTHER; note = S-phosphorothioate
  modified_base 5: mod_base = OTHER; note = 2-O-methylribose adenine
  modified_base 5..6: mod_base = OTHER; note = R-phosphorothioate
  modified_base 6: mod_base = OTHER; note = 2-fluororibose guanine
  modified_base 6..7: mod_base = OTHER; note = R-phosphorothioate
  modified_base 7: mod_base = OTHER; note = 2-O-methylribose adenine
  modified_base 7..8: mod_base = OTHER; note = R-phosphorothioate
  modified_base 8: mod_base = OTHER; note = 2-fluororibose guanine
  modified_base 8..9: mod_base = OTHER; note = R-phosphorothioate
  modified_base 9: mod_base = cm
  modified_base 10: mod_base = OTHER; note = 2-fluororibose adenine
  modified_base 11: mod_base = OTHER; note = 2-O-methylribose adenine
  modified_base 12: mod_base = gm
  modified_base 13: mod_base = OTHER; note = 2-O-methylribose adenine
  modified_base 14: mod_base = OTHER; note = 2-fluororibose adenine
  modified_base 15: mod_base = cm
  modified_base 16: mod_base = OTHER; note = 2-fluororibose adenine
  modified_base 17: mod_base = cm
  modified_base 18: mod_base = OTHER; note = 2-fluororibose uracil
  modified_base 19: mod_base = gm
  modified_base 20: mod_base = OTHER; note = 2-fluororibose uracil
  modified_base 21: mod_base = um
  modified_base 21..22: mod_base = OTHER; note = S-phosphorothioate
  modified_base 22: mod_base = um
  modified_base 22..23: mod_base = OTHER; note = S-phosphorothioate
  modified_base 23: mod_base = um
  source 1..23: mol_type = other RNA
ttatagagcaagaacactgtttt

SEQ ID NO: 411 - RNA, 23 nt, synthetic construct
  misc_feature 1..23: note = Synthetic: WV-37124
  misc_feature 1..23: note = Synthetic: SSR-0103229
  modified_base 1: mod_base = um
  modified_base 1..2: mod_base = OTHER; note = S-phosphorothioate
  modified_base 2: mod_base = OTHER; note = 2-fluororibose uracil
  modified_base 2..3: mod_base = OTHER; note = R-phosphorothioate
  modified_base 3: mod_base = OTHER; note = 2-O-methylribose adenine
  modified_base 3..4: mod_base = OTHER; note = R-phosphorothioate
  modified_base 4: mod_base = OTHER; note = 2-fluororibose uracil
  modified_base 4..5: mod_base = OTHER; note = S-phosphorothioate
  modified_base 5: mod_base = OTHER; note = 2-O-methylribose adenine
  modified_base 5..6: mod_base = OTHER; note = R-phosphorothioate
  modified_base 6: mod_base = OTHER; note = 2-fluororibose guanine
  modified_base 6..7: mod_base = OTHER; note = R-phosphorothioate
  modified_base 7: mod_base = OTHER; note = 2-O-methylribose adenine
  modified_base 7..8: mod_base = OTHER; note = R-phosphorothioate
  modified_base 8: mod_base = OTHER; note = 2-fluororibose guanine
  modified_base 8..9: mod_base = OTHER; note = S-phosphorothioate
  modified_base 9: mod_base = cm
  modified_base 10: mod_base = OTHER; note = 2-fluororibose adenine
  modified_base 11: mod_base = OTHER; note = 2-O-methylribose adenine
  modified_base 12: mod_base = gm
  modified_base 13: mod_base = OTHER; note = 2-O-methylribose adenine
  modified_base 14: mod_base = OTHER; note = 2-fluororibose adenine
  modified_base 15: mod_base = cm
  modified_base 16: mod_base = OTHER; note = 2-fluororibose adenine
  modified_base 17: mod_base = cm
  modified_base 18: mod_base = OTHER; note = 2-fluororibose uracil
  modified_base 19: mod_base = gm
  modified_base 20: mod_base = OTHER; note = 2-fluororibose uracil
  modified_base 21: mod_base = um
  modified_base 21..22: mod_base = OTHER; note = S-phosphorothioate
  modified_base 22: mod_base = um
  modified_base 22..23: mod_base = OTHER; note = S-phosphorothioate
  modified_base 23: mod_base = um
  source 1..23: mol_type = other RNA
ttatagagcaagaacactgtttt

SEQ ID NO: 412 - RNA, 23 nt, synthetic construct
  misc_feature 1..23: note = Synthetic: WV-37125
  misc_feature 1..23: note = Synthetic: SSR-0103230
  modified_base 1: mod_base = um
  modified_base 1..2: mod_base = OTHER; note = S-phosphorothioate
  modified_base 2: mod_base = OTHER; note = 2-fluororibose uracil
  modified_base 2..3: mod_base = OTHER; note = R-phosphorothioate
  modified_base 3: mod_base = OTHER; note = 2-O-methylribose adenine
  modified_base 3..4: mod_base = OTHER; note = R-phosphorothioate
  modified_base 4: mod_base = OTHER; note = 2-fluororibose uracil
  modified_base 4..5: mod_base = OTHER; note = S-phosphorothioate
  modified_base 5: mod_base = OTHER; note = 2-O-methylribose adenine
  modified_base 5..6: mod_base = OTHER; note = R-phosphorothioate
  modified_base 6: mod_base = OTHER; note = 2-fluororibose guanine
  modified_base 6..7: mod_base = OTHER; note = R-phosphorothioate
  modified_base 7: mod_base = OTHER; note = 2-O-methylribose adenine
  modified_base 7..8: mod_base = OTHER; note = S-phosphorothioate
  modified_base 8: mod_base = OTHER; note = 2-fluororibose guanine
  modified_base 8..9: mod_base = OTHER; note = R-phosphorothioate
  modified_base 9: mod_base = cm
  modified_base 10: mod_base = OTHER; note = 2-fluororibose adenine
  modified_base 11: mod_base = OTHER; note = 2-O-methylribose adenine
  modified_base 12: mod_base = gm
  modified_base 13: mod_base = OTHER; note = 2-O-methylribose adenine
  modified_base 14: mod_base = OTHER; note = 2-fluororibose adenine
  modified_base 15: mod_base = cm
  modified_base 16: mod_base = OTHER; note = 2-fluororibose adenine
  modified_base 17: mod_base = cm
  modified_base 18: mod_base = OTHER; note = 2-fluororibose uracil
  modified_base 19: mod_base = gm
  modified_base 20: mod_base = OTHER; note = 2-fluororibose uracil
  modified_base 21: mod_base = um
  modified_base 21..22: mod_base = OTHER; note = S-phosphorothioate
  modified_base 22: mod_base = um
  modified_base 22..23: mod_base = OTHER; note = S-phosphorothioate
  modified_base 23: mod_base = um
  source 1..23: mol_type = other RNA
ttatagagcaagaacactgtttt

SEQ ID NO: 413 - RNA, 23 nt, synthetic construct
  misc_feature 1..23: note = Synthetic: WV-37126
  misc_feature 1..23: note = Synthetic: SSR-0103231
  modified_base 1: mod_base = um
  modified_base 1..2: mod_base = OTHER; note = S-phosphorothioate
  modified_base 2: mod_base = OTHER; note = 2-fluororibose uracil
  modified_base 2..3: mod_base = OTHER; note = R-phosphorothioate
  modified_base 3: mod_base = OTHER; note = 2-O-methylribose adenine
  modified_base 3..4: mod_base = OTHER; note = R-phosphorothioate
  modified_base 4: mod_base = OTHER; note = 2-fluororibose uracil
  modified_base 4..5: mod_base = OTHER; note = S-phosphorothioate
  modified_base 5: mod_base = OTHER; note = 2-O-methylribose adenine
  modified_base 5..6: mod_base = OTHER; note = R-phosphorothioate
  modified_base 6: mod_base = OTHER; note = 2-fluororibose guanine
  modified_base 6..7: mod_base = OTHER; note = R-phosphorothioate
  modified_base 7: mod_base = OTHER; note = 2-O-methylribose adenine
  modified_base 7..8: mod_base = OTHER; note = S-phosphorothioate
  modified_base 8: mod_base = OTHER; note = 2-fluororibose guanine
  modified_base 8..9: mod_base = OTHER; note = S-phosphorothioate
  modified_base 9: mod_base = cm
  modified_base 10: mod_base = OTHER; note = 2-fluororibose adenine
  modified_base 11: mod_base = OTHER; note = 2-O-methylribose adenine
  modified_base 12: mod_base = gm
  modified_base 13: mod_base = OTHER; note = 2-O-methylribose adenine
  modified_base 14: mod_base = OTHER; note = 2-fluororibose adenine
  modified_base 15: mod_base = cm
  modified_base 16: mod_base = OTHER; note = 2-fluororibose adenine
  modified_base 17: mod_base = cm
  modified_base 18: mod_base = OTHER; note = 2-fluororibose uracil
  modified_base 19: mod_base = gm
  modified_base 20: mod_base = OTHER; note = 2-fluororibose uracil
  modified_base 21: mod_base = um
  modified_base 21..22: mod_base = OTHER; note = S-phosphorothioate
  modified_base 22: mod_base = um
  modified_base 22..23: mod_base = OTHER; note = S-phosphorothioate
  modified_base 23: mod_base = um
  source 1..23: mol_type = other RNA
ttatagagcaagaacactgtttt

SEQ ID NO: 414 - RNA, 23 nt, synthetic construct
  misc_feature 1..23: note = Synthetic: WV-37127
  misc_feature 1..23: note = Synthetic: SSR-0103232
  modified_base 1: mod_base = um
  modified_base 1..2: mod_base = OTHER; note = S-phosphorothioate
  modified_base 2: mod_base = OTHER; note = 2-fluororibose uracil
  modified_base 2..3: mod_base = OTHER; note = R-phosphorothioate
  modified_base 3: mod_base = OTHER; note = 2-O-methylribose adenine
  modified_base 3..4: mod_base = OTHER; note = R-phosphorothioate
  modified_base 4: mod_base = OTHER; note = 2-fluororibose uracil
  modified_base 4..5: mod_base = OTHER; note = S-phosphorothioate
  modified_base 5: mod_base = OTHER; note = 2-O-methylribose adenine
  modified_base 5..6: mod_base = OTHER; note = R-phosphorothioate
  modified_base 6: mod_base = OTHER; note = 2-fluororibose guanine
  modified_base 6..7: mod_base = OTHER; note = S-phosphorothioate
  modified_base 7: mod_base = OTHER; note = 2-O-methylribose adenine
  modified_base 7..8: mod_base = OTHER; note = R-phosphorothioate
  modified_base 8: mod_base = OTHER; note = 2-fluororibose guanine
  modified_base 8..9: mod_base = OTHER; note = R-phosphorothioate
  modified_base 9: mod_base = cm
  modified_base 10: mod_base = OTHER; note = 2-fluororibose adenine
  modified_base 11: mod_base = OTHER; note = 2-O-methylribose adenine
  modified_base 12: mod_base = gm
  modified_base 13: mod_base = OTHER; note = 2-O-methylribose adenine
  modified_base 14: mod_base = OTHER; note = 2-fluororibose adenine
  modified_base 15: mod_base = cm
  modified_base 16: mod_base = OTHER; note = 2-fluororibose adenine
  modified_base 17: mod_base = cm
  modified_base 18: mod_base = OTHER; note = 2-fluororibose uracil
  modified_base 19: mod_base = gm
  modified_base 20: mod_base = OTHER; note = 2-fluororibose uracil
  modified_base 21: mod_base = um
  modified_base 21..22: mod_base = OTHER; note = S-phosphorothioate
  modified_base 22: mod_base = um
  modified_base 22..23: mod_base = OTHER; note = S-phosphorothioate
  modified_base 23: mod_base = um
  source 1..23: mol_type = other RNA
ttatagagcaagaacactgtttt

SEQ ID NO: 415 - RNA, 23 nt, synthetic construct
  misc_feature 1..23: note = Synthetic: WV-37128
  misc_feature 1..23: note = Synthetic: SSR-0103233
  modified_base 1: mod_base = um
  modified_base 1..2: mod_base = OTHER; note = S-phosphorothioate
  modified_base 2: mod_base = OTHER; note = 2-fluororibose uracil
  modified_base 2..3: mod_base = OTHER; note = R-phosphorothioate
  modified_base 3: mod_base = OTHER; note = 2-O-methylribose adenine
  modified_base 3..4: mod_base = OTHER; note = R-phosphorothioate
  modified_base 4: mod_base = OTHER; note = 2-fluororibose uracil
  modified_base 4..5: mod_base = OTHER; note = S-phosphorothioate
  modified_base 5: mod_base = OTHER; note = 2-O-methylribose adenine
  modified_base 5..6: mod_base = OTHER; note = R-phosphorothioate
  modified_base 6: mod_base = OTHER; note = 2-fluororibose guanine
  modified_base 6..7: mod_base = OTHER; note = S-phosphorothioate
  modified_base 7: mod_base = OTHER; note = 2-O-methylribose adenine
  modified_base 7..8: mod_base = OTHER; note = R-phosphorothioate
  modified_base 8: mod_base = OTHER; note = 2-fluororibose guanine
  modified_base 8..9: mod_base = OTHER; note = S-phosphorothioate
  modified_base 9: mod_base = cm
  modified_base 10: mod_base = OTHER; note = 2-fluororibose adenine
  modified_base 11: mod_base = OTHER; note = 2-O-methylribose adenine
  modified_base 12: mod_base = gm
  modified_base 13: mod_base = OTHER; note = 2-O-methylribose adenine
  modified_base 14: mod_base = OTHER; note = 2-fluororibose adenine
  modified_base 15: mod_base = cm
  modified_base 16: mod_base = OTHER; note = 2-fluororibose adenine
  modified_base 17: mod_base = cm
  modified_base 18: mod_base = OTHER; note = 2-fluororibose uracil
  modified_base 19: mod_base = gm
  modified_base 20: mod_base = OTHER; note = 2-fluororibose uracil
  modified_base 21: mod_base = um
  modified_base 21..22: mod_base = OTHER; note = S-phosphorothioate
  modified_base 22: mod_base = um
  modified_base 22..23: mod_base = OTHER; note = S-phosphorothioate
  modified_base 23: mod_base = um
  source 1..23: mol_type = other RNA
ttatagagcaagaacactgtttt

SEQ ID NO: 416 - RNA, 23 nt, synthetic construct
  misc_feature 1..23: note = Synthetic: WV-37129
  misc_feature 1..23: note = Synthetic: SSR-0103234
  modified_base 1: mod_base = um
  modified_base 1..2: mod_base = OTHER; note = S-phosphorothioate
  modified_base 2: mod_base = OTHER; note = 2-fluororibose uracil
  modified_base 2..3: mod_base = OTHER; note = R-phosphorothioate
  modified_base 3: mod_base = OTHER; note = 2-O-methylribose adenine
  modified_base 3..4: mod_base = OTHER; note = R-phosphorothioate
  modified_base 4: mod_base = OTHER; note = 2-fluororibose uracil
  modified_base 4..5: mod_base = OTHER; note = S-phosphorothioate
  modified_base 5: mod_base = OTHER; note = 2-O-methylribose adenine
  modified_base 5..6: mod_base = OTHER; note = R-phosphorothioate
  modified_base 6: mod_base = OTHER; note = 2-fluororibose guanine
  modified_base 6..7: mod_base = OTHER; note = S-phosphorothioate
  modified_base 7: mod_base = OTHER; note = 2-O-methylribose adenine
  modified_base 7..8: mod_base = OTHER; note = S-phosphorothioate
  modified_base 8: mod_base = OTHER; note = 2-fluororibose guanine
  modified_base 8..9: mod_base = OTHER; note = R-phosphorothioate
  modified_base 9: mod_base = cm
  modified_base 10: mod_base = OTHER; note = 2-fluororibose adenine
  modified_base 11: mod_base = OTHER; note = 2-O-methylribose adenine
  modified_base 12: mod_base = gm
  modified_base 13: mod_base = OTHER; note = 2-O-methylribose adenine
  modified_base 14: mod_base = OTHER; note = 2-fluororibose adenine
  modified_base 15: mod_base = cm
  modified_base 16: mod_base = OTHER; note = 2-fluororibose adenine
  modified_base 17: mod_base = cm
  modified_base 18: mod_base = OTHER; note = 2-fluororibose uracil
  modified_base 19: mod_base = gm
  modified_base 20: mod_base = OTHER; note = 2-fluororibose uracil
  modified_base 21: mod_base = um
  modified_base 21..22: mod_base = OTHER; note = S-phosphorothioate
  modified_base 22: mod_base = um
  modified_base 22..23: mod_base = OTHER; note = S-phosphorothioate
  modified_base 23: mod_base = um
  source 1..23: mol_type = other RNA
ttatagagcaagaacactgtttt

SEQ ID NO: 417 - RNA, 23 nt, synthetic construct
  misc_feature 1..23: note = Synthetic: WV-37130
  misc_feature 1..23: note = Synthetic: SSR-0103235
  modified_base 1: mod_base = um
  modified_base 1..2: mod_base = OTHER; note = S-phosphorothioate
  modified_base 2: mod_base = OTHER; note = 2-fluororibose uracil
  modified_base 2..3: mod_base = OTHER; note = R-phosphorothioate
  modified_base 3: mod_base = OTHER; note = 2-O-methylribose adenine
  modified_base 3..4: mod_base = OTHER; note = R-phosphorothioate
  modified_base 4: mod_base = OTHER; note = 2-fluororibose uracil
  modified_base 4..5: mod_base = OTHER; note = S-phosphorothioate
  modified_base 5: mod_base = OTHER; note = 2-O-methylribose adenine
  modified_base 5..6: mod_base = OTHER; note = R-phosphorothioate
  modified_base 6: mod_base = OTHER; note = 2-fluororibose guanine
  modified_base 6..7: mod_base = OTHER; note = S-phosphorothioate
  modified_base 7: mod_base = OTHER; note = 2-O-methylribose adenine
  modified_base 7..8: mod_base = OTHER; note = S-phosphorothioate
  modified_base 8: mod_base = OTHER; note = 2-fluororibose guanine
  modified_base 8..9: mod_base = OTHER; note = S-phosphorothioate
  modified_base 9: mod_base = cm
  modified_base 10: mod_base = OTHER; note = 2-fluororibose adenine
  modified_base 11: mod_base = OTHER; note = 2-O-methylribose adenine
  modified_base 12: mod_base = gm
  modified_base 13: mod_base = OTHER; note = 2-O-methylribose adenine
  modified_base 14: mod_base = OTHER; note = 2-fluororibose adenine
  modified_base 15: mod_base = cm
  modified_base 16: mod_base = OTHER; note = 2-fluororibose adenine
  modified_base 17: mod_base = cm
  modified_base 18: mod_base = OTHER; note = 2-fluororibose uracil
  modified_base 19: mod_base = gm
  modified_base 20: mod_base = OTHER; note = 2-fluororibose uracil
  modified_base 21: mod_base = um
  modified_base 21..22: mod_base = OTHER; note = S-phosphorothioate
  modified_base 22: mod_base = um
  modified_base 22..23: mod_base = OTHER; note = S-phosphorothioate
  modified_base 23: mod_base = um
  source 1..23: mol_type = other RNA
ttatagagcaagaacactgtttt

SEQ ID NO: 418 - RNA, 23 nt, synthetic construct
  misc_feature 1..23: note = Synthetic: WV-37131
  misc_feature 1..23: note = Synthetic: SSR-0103236
  modified_base 1: mod_base = um
  modified_base 1..2: mod_base = OTHER; note = S-phosphorothioate
  modified_base 2: mod_base = OTHER; note = 2-fluororibose uracil
  modified_base 2..3: mod_base = OTHER; note = R-phosphorothioate
  modified_base 3: mod_base = OTHER; note = 2-O-methylribose adenine
  modified_base 3..4: mod_base = OTHER; note = R-phosphorothioate
  modified_base 4: mod_base = OTHER; note = 2-fluororibose uracil
  modified_base 4..5: mod_base = OTHER; note = S-phosphorothioate
  modified_base 5: mod_base = OTHER; note = 2-O-methylribose adenine
  modified_base 5..6: mod_base = OTHER; note = S-phosphorothioate
  modified_base 6: mod_base = OTHER; note = 2-fluororibose guanine
  modified_base 6..7: mod_base = OTHER; note = R-phosphorothioate
  modified_base 7: mod_base = OTHER; note = 2-O-methylribose adenine
  modified_base 7..8: mod_base = OTHER; note = R-phosphorothioate
  modified_base 8: mod_base = OTHER; note = 2-fluororibose guanine
  modified_base 8..9: mod_base = OTHER; note = R-phosphorothioate
  modified_base 9: mod_base = cm
  modified_base 10: mod_base = OTHER; note = 2-fluororibose adenine
  modified_base 11: mod_base = OTHER; note = 2-O-methylribose adenine
  modified_base 12: mod_base = gm
  modified_base 13: mod_base = OTHER; note = 2-O-methylribose adenine
  modified_base 14: mod_base = OTHER; note = 2-fluororibose adenine
  modified_base 15: mod_base = cm
  modified_base 16: mod_base = OTHER; note = 2-fluororibose adenine
  modified_base 17: mod_base = cm
  modified_base 18: mod_base = OTHER; note = 2-fluororibose uracil
  modified_base 19: mod_base = gm
  modified_base 20: mod_base = OTHER; note = 2-fluororibose uracil
  modified_base 21: mod_base = um
  modified_base 21..22: mod_base = OTHER; note = S-phosphorothioate
  modified_base 22: mod_base = um
  modified_base 22..23: mod_base = OTHER; note = S-phosphorothioate
  modified_base 23: mod_base = um
  source 1..23: mol_type = other RNA
ttatagagcaagaacactgtttt

SEQ ID NO: 419 - RNA, 23 nt, synthetic construct
  misc_feature 1..23: note = Synthetic: WV-37132
  misc_feature 1..23: note = Synthetic: SSR-0103237
  modified_base 1: mod_base = um
  modified_base 1..2: mod_base = OTHER; note = S-phosphorothioate
  modified_base 2: mod_base = OTHER; note = 2-fluororibose uracil
  modified_base 2..3: mod_base = OTHER; note = R-phosphorothioate
  modified_base 3: mod_base = OTHER; note = 2-O-methylribose adenine
  modified_base 3..4: mod_base = OTHER; note = R-phosphorothioate
  modified_base 4: mod_base = OTHER; note = 2-fluororibose uracil
  modified_base 4..5: mod_base = OTHER; note = S-phosphorothioate
  modified_base 5: mod_base = OTHER; note = 2-O-methylribose adenine
  modified_base 5..6: mod_base = OTHER; note = S-phosphorothioate
  modified_base 6: mod_base = OTHER; note = 2-fluororibose guanine
  modified_base 6..7: mod_base = OTHER; note = R-phosphorothioate
  modified_base 7: mod_base = OTHER; note = 2-O-methylribose adenine
  modified_base 7..8: mod_base = OTHER; note = R-phosphorothioate
  modified_base 8: mod_base = OTHER; note = 2-fluororibose guanine
  modified_base 8..9: mod_base = OTHER; note = S-phosphorothioate
  modified_base 9: mod_base = cm
  modified_base 10: mod_base = OTHER; note = 2-fluororibose adenine
  modified_base 11: mod_base = OTHER; note = 2-O-methylribose adenine
  modified_base 12: mod_base = gm
  modified_base 13: mod_base = OTHER; note = 2-O-methylribose adenine
  modified_base 14: mod_base = OTHER; note = 2-fluororibose adenine
  modified_base 15: mod_base = cm
  modified_base 16: mod_base = OTHER; note = 2-fluororibose adenine
  modified_base 17: mod_base = cm
  modified_base 18: mod_base = OTHER; note = 2-fluororibose uracil
  modified_base 19: mod_base = gm
  modified_base 20: mod_base = OTHER; note = 2-fluororibose uracil
  modified_base 21: mod_base = um
  modified_base 21..22: mod_base = OTHER; note = S-phosphorothioate
  modified_base 22: mod_base = um
  modified_base 22..23: mod_base = OTHER; note = S-phosphorothioate
  modified_base 23: mod_base = um
  source 1..23: mol_type = other RNA
ttatagagcaagaacactgtttt

SEQ ID NO: 420 - RNA, 23 nt, synthetic construct
  misc_feature 1..23: note = Synthetic: WV-37133
  misc_feature 1..23: note = Synthetic: SSR-0103238
  modified_base 1: mod_base = um
  modified_base 1..2: mod_base = OTHER; note = S-phosphorothioate
  modified_base 2: mod_base = OTHER; note = 2-fluororibose uracil
  modified_base 2..3: mod_base = OTHER; note = R-phosphorothioate
  modified_base 3: mod_base = OTHER; note = 2-O-methylribose adenine
  modified_base 3..4: mod_base = OTHER; note = R-phosphorothioate
  modified_base 4: mod_base = OTHER; note = 2-fluororibose uracil
  modified_base 4..5: mod_base = OTHER; note = S-phosphorothioate
  modified_base 5: mod_base = OTHER; note = 2-O-methylribose adenine
  modified_base 5..6: mod_base = OTHER; note = S-phosphorothioate
  modified_base 6: mod_base = OTHER; note = 2-fluororibose guanine
  modified_base 6..7: mod_base = OTHER; note = R-phosphorothioate
  modified_base 7: mod_base = OTHER; note = 2-O-methylribose adenine
  modified_base 7..8: mod_base = OTHER; note = S-phosphorothioate
  modified_base 8: mod_base = OTHER; note = 2-fluororibose guanine
  modified_base 8..9: mod_base = OTHER; note = R-phosphorothioate
  modified_base 9: mod_base = cm
  modified_base 10: mod_base = OTHER; note = 2-fluororibose adenine
  modified_base 11: mod_base = OTHER; note = 2-O-methylribose adenine
  modified_base 12: mod_base = gm
  modified_base 13: mod_base = OTHER; note = 2-O-methylribose adenine
  modified_base 14: mod_base = OTHER; note = 2-fluororibose adenine
  modified_base 15: mod_base = cm
  modified_base 16: mod_base = OTHER; note = 2-fluororibose adenine
  modified_base 17: mod_base = cm
  modified_base 18: mod_base = OTHER; note = 2-fluororibose uracil
  modified_base 19: mod_base = gm
  modified_base 20: mod_base = OTHER; note = 2-fluororibose uracil
  modified_base 21: mod_base = um
  modified_base 21..22: mod_base = OTHER; note = S-phosphorothioate
  modified_base 22: mod_base = um
  modified_base 22..23: mod_base = OTHER; note = S-phosphorothioate
  modified_base 23: mod_base = um
  source 1..23: mol_type = other RNA
ttatagagcaagaacactgtttt

SEQ ID NO: 421 - RNA, 23 nt, synthetic construct
  misc_feature 1..23: note = Synthetic: WV-37134
  misc_feature 1..23: note = Synthetic: SSR-0103239
  modified_base 1: mod_base = um
  modified_base 1..2: mod_base = OTHER; note = S-phosphorothioate
  modified_base 2: mod_base = OTHER; note = 2-fluororibose uracil
  modified_base 2..3: mod_base = OTHER; note = R-phosphorothioate
  modified_base 3: mod_base = OTHER; note = 2-O-methylribose adenine
  modified_base 3..4: mod_base = OTHER; note = R-phosphorothioate
  modified_base 4: mod_base = OTHER; note = 2-fluororibose uracil
  modified_base 4..5: mod_base = OTHER; note = S-phosphorothioate
  modified_base 5: mod_base = OTHER; note = 2-O-methylribose adenine
  modified_base 5..6: mod_base = OTHER; note = S-phosphorothioate
  modified_base 6: mod_base = OTHER; note = 2-fluororibose guanine
  modified_base 6..7: mod_base = OTHER; note = R-phosphorothioate
  modified_base 7: mod_base = OTHER; note = 2-O-methylribose adenine
  modified_base 7..8: mod_base = OTHER; note = S-phosphorothioate
  modified_base 8: mod_base = OTHER; note = 2-fluororibose guanine
  modified_base 8..9: mod_base = OTHER; note = S-phosphorothioate
  modified_base 9: mod_base = cm
  modified_base 10: mod_base = OTHER; note = 2-fluororibose adenine
  modified_base 11: mod_base = OTHER; note = 2-O-methylribose adenine
  modified_base 12: mod_base = gm
  modified_base 13: mod_base = OTHER; note = 2-O-methylribose adenine
  modified_base 14: mod_base = OTHER; note = 2-fluororibose adenine
  modified_base 15: mod_base = cm
  modified_base 16: mod_base = OTHER; note = 2-fluororibose adenine
  modified_base 17: mod_base = cm
  modified_base 18: mod_base = OTHER; note = 2-fluororibose uracil
  modified_base 19: mod_base = gm
  modified_base 20: mod_base = OTHER; note = 2-fluororibose uracil
  modified_base 21: mod_base = um
  modified_base 21..22: mod_base = OTHER; note = S-phosphorothioate
  modified_base 22: mod_base = um
  modified_base 22..23: mod_base = OTHER; note = S-phosphorothioate
  modified_base 23: mod_base = um
  source 1..23: mol_type = other RNA
ttatagagcaagaacactgtttt

SEQ ID NO: 422 - RNA, 23 nt, synthetic construct
  misc_feature 1..23: note = Synthetic: WV-37135
  misc_feature 1..23: note = Synthetic: SSR-0103240
  modified_base 1: mod_base = um
  modified_base 1..2: mod_base = OTHER; note = S-phosphorothioate
  modified_base 2: mod_base = OTHER; note = 2-fluororibose uracil
  modified_base 2..3: mod_base = OTHER; note = R-phosphorothioate
  modified_base 3: mod_base = OTHER; note = 2-O-methylribose adenine
  modified_base 3..4: mod_base = OTHER; note = R-phosphorothioate
  modified_base 4: mod_base = OTHER; note = 2-fluororibose uracil
  modified_base 4..5: mod_base = OTHER; note = S-phosphorothioate
  modified_base 5: mod_base = OTHER; note = 2-O-methylribose adenine
  modified_base 5..6: mod_base = OTHER; note = S-phosphorothioate
  modified_base 6: mod_base = OTHER; note = 2-fluororibose guanine
  modified_base 6..7: mod_base = OTHER; note = S-phosphorothioate
  modified_base 7: mod_base = OTHER; note = 2-O-methylribose adenine
  modified_base 7..8: mod_base = OTHER; note = R-phosphorothioate
  modified_base 8: mod_base = OTHER; note = 2-fluororibose guanine
  modified_base 8..9: mod_base = OTHER; note = R-phosphorothioate
  modified_base 9: mod_base = cm
  modified_base 10: mod_base = OTHER; note = 2-fluororibose adenine
  modified_base 11: mod_base = OTHER; note = 2-O-methylribose adenine
  modified_base 12: mod_base = gm
  modified_base 13: mod_base = OTHER; note = 2-O-methylribose adenine
  modified_base 14: mod_base = OTHER; note = 2-fluororibose adenine
  modified_base 15: mod_base = cm
  modified_base 16: mod_base = OTHER; note = 2-fluororibose adenine
  modified_base 17: mod_base = cm
  modified_base 18: mod_base = OTHER; note = 2-fluororibose uracil
  modified_base 19: mod_base = gm
  modified_base 20: mod_base = OTHER; note = 2-fluororibose uracil
  modified_base 21: mod_base = um
  modified_base 21..22: mod_base = OTHER; note = S-phosphorothioate
  modified_base 22: mod_base = um
  modified_base 22..23: mod_base = OTHER; note = S-phosphorothioate
  modified_base 23: mod_base = um
  source 1..23: mol_type = other RNA
ttatagagcaagaacactgtttt

SEQ ID NO: 423 - RNA, 23 nt, synthetic construct
  misc_feature 1..23: note = Synthetic: WV-37136
  misc_feature 1..23: note = Synthetic: SSR-0103241
  modified_base 1: mod_base = um
  modified_base 1..2: mod_base = OTHER; note = S-phosphorothioate
  modified_base 2: mod_base = OTHER; note = 2-fluororibose uracil
  modified_base 2..3: mod_base = OTHER; note = R-phosphorothioate
  modified_base 3: mod_base = OTHER; note = 2-O-methylribose adenine
  modified_base 3..4: mod_base = OTHER; note = R-phosphorothioate
  modified_base 4: mod_base = OTHER; note = 2-fluororibose uracil
  modified_base 4..5: mod_base = OTHER; note = S-phosphorothioate
  modified_base 5: mod_base = OTHER; note = 2-O-methylribose adenine
  modified_base 5..6: mod_base = OTHER; note = S-phosphorothioate
  modified_base 6: mod_base = OTHER; note = 2-fluororibose guanine
  modified_base 6..7: mod_base = OTHER; note = S-phosphorothioate
  modified_base 7: mod_base = OTHER; note = 2-O-methylribose adenine
  modified_base 7..8: mod_base = OTHER; note = R-phosphorothioate
  modified_base 8: mod_base = OTHER; note = 2-fluororibose guanine
  modified_base 8..9: mod_base = OTHER; note = S-phosphorothioate
  modified_base 9: mod_base = cm
  modified_base 10: mod_base = OTHER; note = 2-fluororibose adenine
  modified_base 11: mod_base = OTHER; note = 2-O-methylribose adenine
  modified_base 12: mod_base = gm
  modified_base 13: mod_base = OTHER; note = 2-O-methylribose adenine
  modified_base 14: mod_base = OTHER; note = 2-fluororibose adenine
  modified_base 15: mod_base = cm
  modified_base 16: mod_base = OTHER; note = 2-fluororibose adenine
  modified_base 17: mod_base = cm
  modified_base 18: mod_base = OTHER; note = 2-fluororibose uracil
  modified_base 19: mod_base = gm
  modified_base 20: mod_base = OTHER; note = 2-fluororibose uracil
  modified_base 21: mod_base = um
  modified_base 21..22: mod_base = OTHER; note = S-phosphorothioate
  modified_base 22: mod_base = um
  modified_base 22..23: mod_base = OTHER; note = S-phosphorothioate
  modified_base 23: mod_base = um
  source 1..23: mol_type = other RNA
ttatagagcaagaacactgtttt

SEQ ID NO: 424 - RNA, 23 nt, synthetic construct
  misc_feature 1..23: note = Synthetic: WV-37137
  misc_feature 1..23: note = Synthetic: SSR-0103242
  modified_base 1: mod_base = um
  modified_base 1..2: mod_base = OTHER; note = S-phosphorothioate
  modified_base 2: mod_base = OTHER; note = 2-fluororibose uracil
  modified_base 2..3: mod_base = OTHER; note = R-phosphorothioate
  modified_base 3: mod_base = OTHER; note = 2-O-methylribose adenine
  modified_base 3..4: mod_base = OTHER; note = R-phosphorothioate
  modified_base 4: mod_base = OTHER; note = 2-fluororibose uracil
  modified_base 4..5: mod_base = OTHER; note = S-phosphorothioate
  modified_base 5: mod_base = OTHER; note = 2-O-methylribose adenine
  modified_base 5..6: mod_base = OTHER; note = S-phosphorothioate
  modified_base 6: mod_base = OTHER; note = 2-fluororibose guanine
  modified_base 6..7: mod_base = OTHER; note = S-phosphorothioate
  modified_base 7: mod_base = OTHER; note = 2-O-methylribose adenine
  modified_base 7..8: mod_base = OTHER; note = S-phosphorothioate
  modified_base 8: mod_base = OTHER; note = 2-fluororibose guanine
  modified_base 8..9: mod_base = OTHER; note = R-phosphorothioate
  modified_base 9: mod_base = cm
  modified_base 10: mod_base = OTHER; note = 2-fluororibose adenine
  modified_base 11: mod_base = OTHER; note = 2-O-methylribose adenine
  modified_base 12: mod_base = gm
  modified_base 13: mod_base = OTHER; note = 2-O-methylribose adenine
  modified_base 14: mod_base = OTHER; note = 2-fluororibose adenine
  modified_base 15: mod_base = cm
  modified_base 16: mod_base = OTHER; note = 2-fluororibose adenine
  modified_base 17: mod_base = cm
  modified_base 18: mod_base = OTHER; note = 2-fluororibose uracil
  modified_base 19: mod_base = gm
  modified_base 20: mod_base = OTHER; note = 2-fluororibose uracil
  modified_base 21: mod_base = um
  modified_base 21..22: mod_base = OTHER; note = S-phosphorothioate
  modified_base 22: mod_base = um
  modified_base 22..23: mod_base = OTHER; note = S-phosphorothioate
  modified_base 23: mod_base = um
  source 1..23: mol_type = other RNA
ttatagagcaagaacactgtttt

SEQ ID NO: 425 - RNA, 23 nt, synthetic construct
  misc_feature 1..23: note = Synthetic: WV-37138
  misc_feature 1..23: note = Synthetic: SSR-0103243
  modified_base 1: mod_base = um
  modified_base 1..2: mod_base = OTHER; note = S-phosphorothioate
  modified_base 2: mod_base = OTHER; note = 2-fluororibose uracil
  modified_base 2..3: mod_base = OTHER; note = R-phosphorothioate
  modified_base 3: mod_base = OTHER; note = 2-O-methylribose adenine
  modified_base 3..4: mod_base = OTHER; note = R-phosphorothioate
  modified_base 4: mod_base = OTHER; note = 2-fluororibose uracil
  modified_base 4..5: mod_base = OTHER; note = S-phosphorothioate
  modified_base 5: mod_base = OTHER; note = 2-O-methylribose adenine
  modified_base 5..6: mod_base = OTHER; note = S-phosphorothioate
  modified_base 6: mod_base = OTHER; note = 2-fluororibose guanine
  modified_base 6..7: mod_base = OTHER; note = S-phosphorothioate
  modified_base 7: mod_base = OTHER; note = 2-O-methylribose adenine
  modified_base 7..8: mod_base = OTHER; note = S-phosphorothioate
  modified_base 8: mod_base = OTHER; note = 2-fluororibose guanine
  modified_base 8..9: mod_base = OTHER; note = S-phosphorothioate
  modified_base 9: mod_base = cm
  modified_base 10: mod_base = OTHER; note = 2-fluororibose adenine
  modified_base 11: mod_base = OTHER; note = 2-O-methylribose adenine
  modified_base 12: mod_base = gm
  modified_base 13: mod_base = OTHER; note = 2-O-methylribose adenine
  modified_base 14: mod_base = OTHER; note = 2-fluororibose adenine
  modified_base 15: mod_base = cm
  modified_base 16: mod_base = OTHER; note = 2-fluororibose adenine
  modified_base 17: mod_base = cm
  modified_base 18: mod_base = OTHER; note = 2-fluororibose uracil
  modified_base 19: mod_base = gm
  modified_base 20: mod_base = OTHER; note = 2-fluororibose uracil
  modified_base 21: mod_base = um
  modified_base 21..22: mod_base = OTHER; note = S-phosphorothioate
  modified_base 22: mod_base = um
  modified_base 22..23: mod_base = OTHER; note = S-phosphorothioate
  modified_base 23: mod_base = um
  source 1..23: mol_type = other RNA
ttatagagcaagaacactgtttt

SEQ ID NO: 426 - RNA, 23 nt, synthetic construct
  misc_feature 1..23: note = Synthetic: WV-37139
  misc_feature 1..23: note = Synthetic: SSR-0103244
  modified_base 1: mod_base = um
  modified_base 1..2: mod_base = OTHER; note = S-phosphorothioate
  modified_base 2: mod_base = OTHER; note = 2-fluororibose uracil
  modified_base 2..3: mod_base = OTHER; note = R-phosphorothioate
  modified_base 3: mod_base = OTHER; note = 2-O-methylribose adenine
  modified_base 3..4: mod_base = OTHER; note = S-phosphorothioate
  modified_base 4: mod_base = OTHER; note = 2-fluororibose uracil
  modified_base 4..5: mod_base = OTHER; note = R-phosphorothioate
  modified_base 5: mod_base = OTHER; note = 2-O-methylribose adenine
  modified_base 5..6: mod_base = OTHER; note = R-phosphorothioate
  modified_base 6: mod_base = OTHER; note = 2-fluororibose guanine
  modified_base 6..7: mod_base = OTHER; note = R-phosphorothioate
  modified_base 7: mod_base = OTHER; note = 2-O-methylribose adenine
  modified_base 7..8: mod_base = OTHER; note = R-phosphorothioate
  modified_base 8: mod_base = OTHER; note = 2-fluororibose guanine
  modified_base 8..9: mod_base = OTHER; note = R-phosphorothioate
  modified_base 9: mod_base = cm
  modified_base 10: mod_base = OTHER; note = 2-fluororibose adenine
  modified_base 11: mod_base = OTHER; note = 2-O-methylribose adenine
  modified_base 12: mod_base = gm
  modified_base 13: mod_base = OTHER; note = 2-O-methylribose adenine
  modified_base 14: mod_base = OTHER; note = 2-fluororibose adenine
  modified_base 15: mod_base = cm
  modified_base 16: mod_base = OTHER; note = 2-fluororibose adenine
  modified_base 17: mod_base = cm
  modified_base 18: mod_base = OTHER; note = 2-fluororibose uracil
  modified_base 19: mod_base = gm
  modified_base 20: mod_base = OTHER; note = 2-fluororibose uracil
  modified_base 21: mod_base = um
  modified_base 21..22: mod_base = OTHER; note = S-phosphorothioate
  modified_base 22: mod_base = um
  modified_base 22..23: mod_base = OTHER; note = S-phosphorothioate
  modified_base 23: mod_base = um
  source 1..23: mol_type = other RNA
ttatagagcaagaacactgtttt

SEQ ID NO: 427 - RNA, 23 nt, synthetic construct
  misc_feature 1..23: note = Synthetic: WV-37140
  misc_feature 1..23: note = Synthetic: SSR-0103245
  modified_base 1: mod_base = um
  modified_base 1..2: mod_base = OTHER; note = S-phosphorothioate
  modified_base 2: mod_base = OTHER; note = 2-fluororibose uracil
  modified_base 2..3: mod_base = OTHER; note = R-phosphorothioate
  modified_base 3: mod_base = OTHER; note = 2-O-methylribose adenine
  modified_base 3..4: mod_base = OTHER; note = S-phosphorothioate
  modified_base 4: mod_base = OTHER; note = 2-fluororibose uracil
  modified_base 4..5: mod_base = OTHER; note = R-phosphorothioate
  modified_base 5: mod_base = OTHER; note = 2-O-methylribose adenine
  modified_base 5..6: mod_base = OTHER; note = R-phosphorothioate
  modified_base 6: mod_base = OTHER; note = 2-fluororibose guanine
  modified_base 6..7: mod_base = OTHER; note = R-phosphorothioate
  modified_base 7: mod_base = OTHER; note = 2-O-methylribose adenine
  modified_base 7..8: mod_base = OTHER; note = R-phosphorothioate
  modified_base 8: mod_base = OTHER; note = 2-fluororibose guanine
  modified_base 8..9: mod_base = OTHER; note = S-phosphorothioate
  modified_base 9: mod_base = cm
  modified_base 10: mod_base = OTHER; note = 2-fluororibose adenine
  modified_base 11: mod_base = OTHER; note = 2-O-methylribose adenine
  modified_base 12: mod_base = gm
  modified_base 13: mod_base = OTHER; note = 2-O-methylribose adenine
  modified_base 14: mod_base = OTHER; note = 2-fluororibose adenine
  modified_base 15: mod_base = cm
  modified_base 16: mod_base = OTHER; note = 2-fluororibose adenine
  modified_base 17: mod_base = cm
  modified_base 18: mod_base = OTHER; note = 2-fluororibose uracil
  modified_base 19: mod_base = gm
  modified_base 20: mod_base = OTHER; note = 2-fluororibose uracil
  modified_base 21: mod_base = um
  modified_base 21..22: mod_base = OTHER; note = S-phosphorothioate
  modified_base 22: mod_base = um
  modified_base 22..23: mod_base = OTHER; note = S-phosphorothioate
  modified_base 23: mod_base = um
  source 1..23: mol_type = other RNA
ttatagagcaagaacactgtttt

SEQ ID NO: 428 - RNA, 23 nt, synthetic construct
  misc_feature 1..23: note = Synthetic: WV-37141
  misc_feature 1..23: note = Synthetic: SSR-0103246
  modified_base 1: mod_base = um
  modified_base 1..2: mod_base = OTHER; note = S-phosphorothioate
  modified_base 2: mod_base = OTHER; note = 2-fluororibose uracil
  modified_base 2..3: mod_base = OTHER; note = R-phosphorothioate
  modified_base 3: mod_base = OTHER; note = 2-O-methylribose adenine
  modified_base 3..4: mod_base = OTHER; note = S-phosphorothioate
  modified_base 4: mod_base = OTHER; note = 2-fluororibose uracil
  modified_base 4..5: mod_base = OTHER; note = R-phosphorothioate
  modified_base 5: mod_base = OTHER; note = 2-O-methylribose adenine
  modified_base 5..6: mod_base = OTHER; note = R-phosphorothioate
  modified_base 6: mod_base = OTHER; note = 2-fluororibose guanine
  modified_base 6..7: mod_base = OTHER; note = R-phosphorothioate
  modified_base 7: mod_base = OTHER; note = 2-O-methylribose adenine
  modified_base 7..8: mod_base = OTHER; note = S-phosphorothioate
  modified_base 8: mod_base = OTHER; note = 2-fluororibose guanine
  modified_base 8..9: mod_base = OTHER; note = R-phosphorothioate
  modified_base 9: mod_base = cm
  modified_base 10: mod_base = OTHER; note = 2-fluororibose adenine
  modified_base 11: mod_base = OTHER; note = 2-O-methylribose adenine
  modified_base 12: mod_base = gm
  modified_base 13: mod_base = OTHER; note = 2-O-methylribose adenine
  modified_base 14: mod_base = OTHER; note = 2-fluororibose adenine
  modified_base 15: mod_base = cm
  modified_base 16: mod_base = OTHER; note = 2-fluororibose adenine
  modified_base 17: mod_base = cm
  modified_base 18: mod_base = OTHER; note = 2-fluororibose uracil
  modified_base 19: mod_base = gm
  modified_base 20: mod_base = OTHER; note = 2-fluororibose uracil
  modified_base 21: mod_base = um
  modified_base 21..22: mod_base = OTHER; note = S-phosphorothioate
  modified_base 22: mod_base = um
  modified_base 22..23: mod_base = OTHER; note = S-phosphorothioate
  modified_base 23: mod_base = um
  source 1..23: mol_type = other RNA
ttatagagcaagaacactgtttt

SEQ ID NO: 429 - RNA, 23 nt, synthetic construct
  misc_feature 1..23: note = Synthetic: WV-37142
  misc_feature 1..23: note = Synthetic: SSR-0103247
  modified_base 1: mod_base = um
  modified_base 1..2: mod_base = OTHER; note = S-phosphorothioate
  modified_base 2: mod_base = OTHER; note = 2-fluororibose uracil
  modified_base 2..3: mod_base = OTHER; note = R-phosphorothioate
  modified_base 3: mod_base = OTHER; note = 2-O-methylribose adenine
  modified_base 3..4: mod_base = OTHER; note = S-phosphorothioate
  modified_base 4: mod_base = OTHER; note = 2-fluororibose uracil
  modified_base 4..5: mod_base = OTHER; note = R-phosphorothioate
  modified_base 5: mod_base = OTHER; note = 2-O-methylribose adenine
  modified_base 5..6: mod_base = OTHER; note = R-phosphorothioate
  modified_base 6: mod_base = OTHER; note = 2-fluororibose guanine
  modified_base 6..7: mod_base = OTHER; note = R-phosphorothioate
  modified_base 7: mod_base = OTHER; note = 2-O-methylribose adenine
  modified_base 7..8: mod_base = OTHER; note = S-phosphorothioate
  modified_base 8: mod_base = OTHER; note = 2-fluororibose guanine
  modified_base 8..9: mod_base = OTHER; note = S-phosphorothioate
  modified_base 9: mod_base = cm
  modified_base 10: mod_base = OTHER; note = 2-fluororibose adenine
  modified_base 11: mod_base = OTHER; note = 2-O-methylribose adenine
  modified_base 12: mod_base = gm
  modified_base 13: mod_base = OTHER; note = 2-O-methylribose adenine
  modified_base 14: mod_base = OTHER; note = 2-fluororibose adenine
  modified_base 15: mod_base = cm
  modified_base 16: mod_base = OTHER; note = 2-fluororibose adenine
  modified_base 17: mod_base = cm
  modified_base 18: mod_base = OTHER; note = 2-fluororibose uracil
  modified_base 19: mod_base = gm
  modified_base 20: mod_base = OTHER; note = 2-fluororibose uracil
  modified_base 21: mod_base = um
  modified_base 21..22: mod_base = OTHER; note = S-phosphorothioate
  modified_base 22: mod_base = um
  modified_base 22..23: mod_base = OTHER; note = S-phosphorothioate
  modified_base 23: mod_base = um
  source 1..23: mol_type = other RNA
ttatagagcaagaacactgtttt

SEQ ID NO: 430 - RNA, 23 nt, synthetic construct
  misc_feature 1..23: note = Synthetic: WV-37143
  misc_feature 1..23: note = Synthetic: SSR-0103248
  modified_base 1: mod_base = um
  modified_base 1..2: mod_base = OTHER; note = S-phosphorothioate
  modified_base 2: mod_base = OTHER; note = 2-fluororibose uracil
  modified_base 2..3: mod_base = OTHER; note = R-phosphorothioate
  modified_base 3: mod_base = OTHER; note = 2-O-methylribose adenine
  modified_base 3..4: mod_base = OTHER; note = S-phosphorothioate
  modified_base 4: mod_base = OTHER; note = 2-fluororibose uracil
  modified_base 4..5: mod_base = OTHER; note = R-phosphorothioate
  modified_base 5: mod_base = OTHER; note = 2-O-methylribose adenine
  modified_base 5..6: mod_base = OTHER; note = R-phosphorothioate
  modified_base 6: mod_base = OTHER; note = 2-fluororibose guanine
  modified_base 6..7: mod_base = OTHER; note = S-phosphorothioate
  modified_base 7: mod_base = OTHER; note = 2-O-methylribose adenine
  modified_base 7..8: mod_base = OTHER; note = R-phosphorothioate
  modified_base 8: mod_base = OTHER; note = 2-fluororibose guanine
  modified_base 8..9: mod_base = OTHER; note = R-phosphorothioate
  modified_base 9: mod_base = cm
  modified_base 10: mod_base = OTHER; note = 2-fluororibose adenine
  modified_base 11: mod_base = OTHER; note = 2-O-methylribose adenine
  modified_base 12: mod_base = gm
  modified_base 13: mod_base = OTHER; note = 2-O-methylribose adenine
  modified_base 14: mod_base = OTHER; note = 2-fluororibose adenine
  modified_base 15: mod_base = cm
  modified_base 16: mod_base = OTHER; note = 2-fluororibose adenine
  modified_base 17: mod_base = cm
  modified_base 18: mod_base = OTHER; note = 2-fluororibose uracil
  modified_base 19: mod_base = gm
  modified_base 20: mod_base = OTHER; note = 2-fluororibose uracil
  modified_base 21: mod_base = um
  modified_base 21..22: mod_base = OTHER; note = S-phosphorothioate
  modified_base 22: mod_base = um
  modified_base 22..23: mod_base = OTHER; note = S-phosphorothioate
  modified_base 23: mod_base = um
  source 1..23: mol_type = other RNA
ttatagagcaagaacactgtttt

SEQ ID NO: 431 - RNA, 23 nt, synthetic construct
  misc_feature 1..23: note = Synthetic: WV-37144
  misc_feature 1..23: note = Synthetic: SSR-0103249
  modified_base 1: mod_base = um
  modified_base 1..2: mod_base = OTHER; note = S-phosphorothioate
  modified_base 2: mod_base = OTHER; note = 2-fluororibose uracil
  modified_base 2..3: mod_base = OTHER; note = R-phosphorothioate
  modified_base 3: mod_base = OTHER; note = 2-O-methylribose adenine
  modified_base 3..4: mod_base = OTHER; note = S-phosphorothioate
  modified_base 4: mod_base = OTHER; note = 2-fluororibose uracil
  modified_base 4..5: mod_base = OTHER; note = R-phosphorothioate
  modified_base 5: mod_base = OTHER; note = 2-O-methylribose adenine
  modified_base 5..6: mod_base = OTHER; note = R-phosphorothioate
  modified_base 6: mod_base = OTHER; note = 2-fluororibose guanine
  modified_base 6..7: mod_base = OTHER; note = S-phosphorothioate
  modified_base 7: mod_base = OTHER; note = 2-O-methylribose adenine
  modified_base 7..8: mod_base = OTHER; note = R-phosphorothioate
  modified_base 8: mod_base = OTHER; note = 2-fluororibose guanine
  modified_base 8..9: mod_base = OTHER; note = S-phosphorothioate
  modified_base 9: mod_base = cm
  modified_base 10: mod_base = OTHER; note = 2-fluororibose adenine
  modified_base 11: mod_base = OTHER; note = 2-O-methylribose adenine
  modified_base 12: mod_base = gm
  modified_base 13: mod_base = OTHER; note = 2-O-methylribose adenine
  modified_base 14: mod_base = OTHER; note = 2-fluororibose adenine
  modified_base 15: mod_base = cm
  modified_base 16: mod_base = OTHER; note = 2-fluororibose adenine
  modified_base 17: mod_base = cm
  modified_base 18: mod_base = OTHER; note = 2-fluororibose uracil
  modified_base 19: mod_base = gm
  modified_base 20: mod_base = OTHER; note = 2-fluororibose uracil
  modified_base 21: mod_base = um
  modified_base 21..22: mod_base = OTHER; note = S-phosphorothioate
  modified_base 22: mod_base = um
  modified_base 22..23: mod_base = OTHER; note = S-phosphorothioate
  modified_base 23: mod_base = um
  source 1..23: mol_type = other RNA
ttatagagcaagaacactgtttt

SEQ ID NO: 432 - RNA, 23 nt, synthetic construct
  misc_feature 1..23: note = Synthetic: WV-37145
  misc_feature 1..23: note = Synthetic: SSR-0103250
  modified_base 1: mod_base = um
  modified_base 1..2: mod_base = OTHER; note = S-phosphorothioate
  modified_base 2: mod_base = OTHER; note = 2-fluororibose uracil
  modified_base 2..3: mod_base = OTHER; note = R-phosphorothioate
  modified_base 3: mod_base = OTHER; note = 2-O-methylribose adenine
  modified_base 3..4: mod_base = OTHER; note = S-phosphorothioate
  modified_base 4: mod_base = OTHER; note = 2-fluororibose uracil
  modified_base 4..5: mod_base = OTHER; note = R-phosphorothioate
  modified_base 5: mod_base = OTHER; note = 2-O-methylribose adenine
  modified_base 5..6: mod_base = OTHER; note = R-phosphorothioate
  modified_base 6: mod_base = OTHER; note = 2-fluororibose guanine
  modified_base 6..7: mod_base = OTHER; note = S-phosphorothioate
  modified_base 7: mod_base = OTHER; note = 2-O-methylribose adenine
  modified_base 7..8: mod_base = OTHER; note = S-phosphorothioate
  modified_base 8: mod_base = OTHER; note = 2-fluororibose guanine
  modified_base 8..9: mod_base = OTHER; note = R-phosphorothioate
  modified_base 9: mod_base = cm
  modified_base 10: mod_base = OTHER; note = 2-fluororibose adenine
  modified_base 11: mod_base = OTHER; note = 2-O-methylribose adenine
  modified_base 12: mod_base = gm
  modified_base 13: mod_base = OTHER; note = 2-O-methylribose adenine
  modified_base 14: mod_base = OTHER; note = 2-fluororibose adenine
  modified_base 15: mod_base = cm
  modified_base 16: mod_base = OTHER; note = 2-fluororibose adenine
  modified_base 17: mod_base = cm
  modified_base 18: mod_base = OTHER; note = 2-fluororibose uracil
  modified_base 19: mod_base = gm
  modified_base 20: mod_base = OTHER; note = 2-fluororibose uracil
  modified_base 21: mod_base = um
  modified_base 21..22: mod_base = OTHER; note = S-phosphorothioate
  modified_base 22: mod_base = um
  modified_base 22..23: mod_base = OTHER; note = S-phosphorothioate
  modified_base 23: mod_base = um
  source 1..23: mol_type = other RNA
ttatagagcaagaacactgtttt

SEQ ID NO: 433 - RNA, 23 nt, synthetic construct
  misc_feature 1..23: note = Synthetic: WV-37146
  misc_feature 1..23: note = Synthetic: SSR-0103251
  modified_base 1: mod_base = um
  modified_base 1..2: mod_base = OTHER; note = S-phosphorothioate
  modified_base 2: mod_base = OTHER; note = 2-fluororibose uracil
  modified_base 2..3: mod_base = OTHER; note = R-phosphorothioate
  modified_base 3: mod_base = OTHER; note = 2-O-methylribose adenine
  modified_base 3..4: mod_base = OTHER; note = S-phosphorothioate
  modified_base 4: mod_base = OTHER; note = 2-fluororibose uracil
  modified_base 4..5: mod_base = OTHER; note = R-phosphorothioate
  modified_base 5: mod_base = OTHER; note = 2-O-methylribose adenine
  modified_base 5..6: mod_base = OTHER; note = R-phosphorothioate
  modified_base 6: mod_base = OTHER; note = 2-fluororibose guanine
  modified_base 6..7: mod_base = OTHER; note = S-phosphorothioate
  modified_base 7: mod_base = OTHER; note = 2-O-methylribose adenine
  modified_base 7..8: mod_base = OTHER; note = S-phosphorothioate
  modified_base 8: mod_base = OTHER; note = 2-fluororibose guanine
  modified_base 8..9: mod_base = OTHER; note = S-phosphorothioate
  modified_base 9: mod_base = cm
  modified_base 10: mod_base = OTHER; note = 2-fluororibose adenine
  modified_base 11: mod_base = OTHER; note = 2-O-methylribose adenine
  modified_base 12: mod_base = gm
  modified_base 13: mod_base = OTHER; note = 2-O-methylribose adenine
  modified_base 14: mod_base = OTHER; note = 2-fluororibose adenine
  modified_base 15: mod_base = cm
  modified_base 16: mod_base = OTHER; note = 2-fluororibose adenine
  modified_base 17: mod_base = cm
  modified_base 18: mod_base = OTHER; note = 2-fluororibose uracil
  modified_base 19: mod_base = gm
  modified_base 20: mod_base = OTHER; note = 2-fluororibose uracil
  modified_base 21: mod_base = um
  modified_base 21..22: mod_base = OTHER; note = S-phosphorothioate
  modified_base 22: mod_base = um
  modified_base 22..23: mod_base = OTHER; note = S-phosphorothioate
  modified_base 23: mod_base = um
  source 1..23: mol_type = other RNA
ttatagagcaagaacactgtttt

SEQ ID NO: 434 - RNA, 23 nt, synthetic construct
  misc_feature 1..23: note = Synthetic: WV-37147
  misc_feature 1..23: note = Synthetic: SSR-0103252
  modified_base 1: mod_base = um
  modified_base 1..2: mod_base = OTHER; note = S-phosphorothioate
  modified_base 2: mod_base = OTHER; note = 2-fluororibose uracil
  modified_base 2..3: mod_base = OTHER; note = R-phosphorothioate
  modified_base 3: mod_base = OTHER; note = 2-O-methylribose adenine
  modified_base 3..4: mod_base = OTHER; note = S-phosphorothioate
  modified_base 4: mod_base = OTHER; note = 2-fluororibose uracil
  modified_base 4..5: mod_base = OTHER; note = R-phosphorothioate
  modified_base 5: mod_base = OTHER; note = 2-O-methylribose adenine
  modified_base 5..6: mod_base = OTHER; note = S-phosphorothioate
  modified_base 6: mod_base = OTHER; note = 2-fluororibose guanine
  modified_base 6..7: mod_base = OTHER; note = R-phosphorothioate
  modified_base 7: mod_base = OTHER; note = 2-O-methylribose adenine
  modified_base 7..8: mod_base = OTHER; note = R-phosphorothioate
  modified_base 8: mod_base = OTHER; note = 2-fluororibose guanine
  modified_base 8..9: mod_base = OTHER; note = R-phosphorothioate
  modified_base 9: mod_base = cm
  modified_base 10: mod_base = OTHER; note = 2-fluororibose adenine
  modified_base 11: mod_base = OTHER; note = 2-O-methylribose adenine
  modified_base 12: mod_base = gm
  modified_base 13: mod_base = OTHER; note = 2-O-methylribose adenine
  modified_base 14: mod_base = OTHER; note = 2-fluororibose adenine
  modified_base 15: mod_base = cm
  modified_base 16: mod_base = OTHER; note = 2-fluororibose adenine
  modified_base 17: mod_base = cm
  modified_base 18: mod_base = OTHER; note = 2-fluororibose uracil
  modified_base 19: mod_base = gm
  modified_base 20: mod_base = OTHER; note = 2-fluororibose uracil
  modified_base 21: mod_base = um
  modified_base 21..22: mod_base = OTHER; note = S-phosphorothioate
  modified_base 22: mod_base = um
  modified_base 22..23: mod_base = OTHER; note = S-phosphorothioate
  modified_base 23: mod_base = um
  source 1..23: mol_type = other RNA
ttatagagcaagaacactgtttt

SEQ ID NO: 435 - RNA, 23 nt, synthetic construct
  misc_feature 1..23: note = Synthetic: WV-37148
  misc_feature 1..23: note = Synthetic: SSR-0103253
  modified_base 1: mod_base = um
  modified_base 1..2: mod_base = OTHER; note = S-phosphorothioate
  modified_base 2: mod_base = OTHER; note = 2-fluororibose uracil
  modified_base 2..3: mod_base = OTHER; note = R-phosphorothioate
  modified_base 3: mod_base = OTHER; note = 2-O-methylribose adenine
  modified_base 3..4: mod_base = OTHER; note = S-phosphorothioate
  modified_base 4: mod_base = OTHER; note = 2-fluororibose uracil
  modified_base 4..5: mod_base = OTHER; note = R-phosphorothioate
  modified_base 5: mod_base = OTHER; note = 2-O-methylribose adenine
  modified_base 5..6: mod_base = OTHER; note = S-phosphorothioate
  modified_base 6: mod_base = OTHER; note = 2-fluororibose guanine
  modified_base 6..7: mod_base = OTHER; note = R-phosphorothioate
  modified_base 7: mod_base = OTHER; note = 2-O-methylribose adenine
  modified_base 7..8: mod_base = OTHER; note = R-phosphorothioate
  modified_base 8: mod_base = OTHER; note = 2-fluororibose guanine
  modified_base 8..9: mod_base = OTHER; note = S-phosphorothioate
  modified_base 9: mod_base = cm
  modified_base 10: mod_base = OTHER; note = 2-fluororibose adenine
  modified_base 11: mod_base = OTHER; note = 2-O-methylribose adenine
  modified_base 12: mod_base = gm
  modified_base 13: mod_base = OTHER; note = 2-O-methylribose adenine
  modified_base 14: mod_base = OTHER; note = 2-fluororibose adenine
  modified_base 15: mod_base = cm
  modified_base 16: mod_base = OTHER; note = 2-fluororibose adenine
  modified_base 17: mod_base = cm
  modified_base 18: mod_base = OTHER; note = 2-fluororibose uracil
  modified_base 19: mod_base = gm
  modified_base 20: mod_base = OTHER; note = 2-fluororibose uracil
  modified_base 21: mod_base = um
  modified_base 21..22: mod_base = OTHER; note = S-phosphorothioate
  modified_base 22: mod_base = um
  modified_base 22..23: mod_base = OTHER; note = S-phosphorothioate
  modified_base 23: mod_base = um
  source 1..23: mol_type = other RNA
ttatagagcaagaacactgtttt

SEQ ID NO: 436 - RNA, 23 nt, synthetic construct
  misc_feature 1..23: note = Synthetic: WV-37149
  misc_feature 1..23: note = Synthetic: SSR-0103254
  modified_base 1: mod_base = um
  modified_base 1..2: mod_base = OTHER; note = S-phosphorothioate
  modified_base 2: mod_base = OTHER; note = 2-fluororibose uracil
  modified_base 2..3: mod_base = OTHER; note = R-phosphorothioate
  modified_base 3: mod_base = OTHER; note = 2-O-methylribose adenine
  modified_base 3..4: mod_base = OTHER; note = S-phosphorothioate
  modified_base 4: mod_base = OTHER; note = 2-fluororibose uracil
  modified_base 4..5: mod_base = OTHER; note = R-phosphorothioate
  modified_base 5: mod_base = OTHER; note = 2-O-methylribose adenine
  modified_base 5..6: mod_base = OTHER; note = S-phosphorothioate
  modified_base 6: mod_base = OTHER; note = 2-fluororibose guanine
  modified_base 6..7: mod_base = OTHER; note = R-phosphorothioate
  modified_base 7: mod_base = OTHER; note = 2-O-methylribose adenine
  modified_base 7..8: mod_base = OTHER; note = S-phosphorothioate
  modified_base 8: mod_base = OTHER; note = 2-fluororibose guanine
  modified_base 8..9: mod_base = OTHER; note = R-phosphorothioate
  modified_base 9: mod_base = cm
  modified_base 10: mod_base = OTHER; note = 2-fluororibose adenine
  modified_base 11: mod_base = OTHER; note = 2-O-methylribose adenine
  modified_base 12: mod_base = gm
  modified_base 13: mod_base = OTHER; note = 2-O-methylribose adenine
  modified_base 14: mod_base = OTHER; note = 2-fluororibose adenine
  modified_base 15: mod_base = cm
  modified_base 16: mod_base = OTHER; note = 2-fluororibose adenine
  modified_base 17: mod_base = cm
  modified_base 18: mod_base = OTHER; note = 2-fluororibose uracil
  modified_base 19: mod_base = gm
  modified_base 20: mod_base = OTHER; note = 2-fluororibose uracil
  modified_base 21: mod_base = um
  modified_base 21..22: mod_base = OTHER; note = S-phosphorothioate
  modified_base 22: mod_base = um
  modified_base 22..23: mod_base = OTHER; note = S-phosphorothioate
  modified_base 23: mod_base = um
  source 1..23: mol_type = other RNA
ttatagagcaagaacactgtttt

SEQ ID NO: 437 - RNA, 23 nt, synthetic construct
  misc_feature 1..23: note = Synthetic: WV-37150
  misc_feature 1..23: note = Synthetic: SSR-0103255
  modified_base 1: mod_base = um
  modified_base 1..2: mod_base = OTHER; note = S-phosphorothioate
  modified_base 2: mod_base = OTHER; note = 2-fluororibose uracil
  modified_base 2..3: mod_base = OTHER; note = R-phosphorothioate
  modified_base 3: mod_base = OTHER; note = 2-O-methylribose adenine
  modified_base 3..4: mod_base = OTHER; note = S-phosphorothioate
  modified_base 4: mod_base = OTHER; note = 2-fluororibose uracil
  modified_base 4..5: mod_base = OTHER; note = R-phosphorothioate
  modified_base 5: mod_base = OTHER; note = 2-O-methylribose adenine
  modified_base 5..6: mod_base = OTHER; note = S-phosphorothioate
  modified_base 6: mod_base = OTHER; note = 2-fluororibose guanine
  modified_base 6..7: mod_base = OTHER; note = R-phosphorothioate
  modified_base 7: mod_base = OTHER; note = 2-O-methylribose adenine
  modified_base 7..8: mod_base = OTHER; note = S-phosphorothioate
  modified_base 8: mod_base = OTHER; note = 2-fluororibose guanine
  modified_base 8..9: mod_base = OTHER; note = S-phosphorothioate
  modified_base 9: mod_base = cm
  modified_base 10: mod_base = OTHER; note = 2-fluororibose adenine
  modified_base 11: mod_base = OTHER; note = 2-O-methylribose adenine
  modified_base 12: mod_base = gm
  modified_base 13: mod_base = OTHER; note = 2-O-methylribose adenine
  modified_base 14: mod_base = OTHER; note = 2-fluororibose adenine
  modified_base 15: mod_base = cm
  modified_base 16: mod_base = OTHER; note = 2-fluororibose adenine
  modified_base 17: mod_base = cm
  modified_base 18: mod_base = OTHER; note = 2-fluororibose uracil
  modified_base 19: mod_base = gm
  modified_base 20: mod_base = OTHER; note = 2-fluororibose uracil
  modified_base 21: mod_base = um
  modified_base 21..22: mod_base = OTHER; note = S-phosphorothioate
  modified_base 22: mod_base = um
  modified_base 22..23: mod_base = OTHER; note = S-phosphorothioate
  modified_base 23: mod_base = um
  source 1..23: mol_type = other RNA
ttatagagcaagaacactgtttt

SEQ ID NO: 438 - RNA, 23 nt, synthetic construct
  misc_feature 1..23: note = Synthetic: WV-37151
  misc_feature 1..23: note = Synthetic: SSR-0103256
  modified_base 1: mod_base = um
  modified_base 1..2: mod_base = OTHER; note = S-phosphorothioate
  modified_base 2: mod_base = OTHER; note = 2-fluororibose uracil
  modified_base 2..3: mod_base = OTHER; note = R-phosphorothioate
  modified_base 3: mod_base = OTHER; note = 2-O-methylribose adenine
  modified_base 3..4: mod_base = OTHER; note = S-phosphorothioate
  modified_base 4: mod_base = OTHER; note = 2-fluororibose uracil
  modified_base 4..5: mod_base = OTHER; note = R-phosphorothioate
  modified_base 5: mod_base = OTHER; note = 2-O-methylribose adenine
  modified_base 5..6: mod_base = OTHER; note = S-phosphorothioate
  modified_base 6: mod_base = OTHER; note = 2-fluororibose guanine
  modified_base 6..7: mod_base = OTHER; note = S-phosphorothioate
  modified_base 7: mod_base = OTHER; note = 2-O-methylribose adenine
  modified_base 7..8: mod_base = OTHER; note = R-phosphorothioate
  modified_base 8: mod_base = OTHER; note = 2-fluororibose guanine
  modified_base 8..9: mod_base = OTHER; note = R-phosphorothioate
  modified_base 9: mod_base = cm
  modified_base 10: mod_base = OTHER; note = 2-fluororibose adenine
  modified_base 11: mod_base = OTHER; note = 2-O-methylribose adenine
  modified_base 12: mod_base = gm
  modified_base 13: mod_base = OTHER; note = 2-O-methylribose adenine
  modified_base 14: mod_base = OTHER; note = 2-fluororibose adenine
  modified_base 15: mod_base = cm
  modified_base 16: mod_base = OTHER; note = 2-fluororibose adenine
  modified_base 17: mod_base = cm
  modified_base 18: mod_base = OTHER; note = 2-fluororibose uracil
  modified_base 19: mod_base = gm
  modified_base 20: mod_base = OTHER; note = 2-fluororibose uracil
  modified_base 21: mod_base = um
  modified_base 21..22: mod_base = OTHER; note = S-phosphorothioate
  modified_base 22: mod_base = um
  modified_base 22..23: mod_base = OTHER; note = S-phosphorothioate
  modified_base 23: mod_base = um
  source 1..23: mol_type = other RNA
ttatagagcaagaacactgtttt

SEQ ID NO: 439 - RNA, 23 nt, synthetic construct
  misc_feature 1..23: note = Synthetic: WV-37152
  misc_feature 1..23: note = Synthetic: SSR-0103257
  modified_base 1: mod_base = um
  modified_base 1..2: mod_base = OTHER; note = S-phosphorothioate
  modified_base 2: mod_base = OTHER; note = 2-fluororibose uracil
  modified_base 2..3: mod_base = OTHER; note = R-phosphorothioate
  modified_base 3: mod_base = OTHER; note = 2-O-methylribose adenine
  modified_base 3..4: mod_base = OTHER; note = S-phosphorothioate
  modified_base 4: mod_base = OTHER; note = 2-fluororibose uracil
  modified_base 4..5: mod_base = OTHER; note = R-phosphorothioate
  modified_base 5: mod_base = OTHER; note = 2-O-methylribose adenine
  modified_base 5..6: mod_base = OTHER; note = S-phosphorothioate
  modified_base 6: mod_base = OTHER; note = 2-fluororibose guanine
  modified_base 6..7: mod_base = OTHER; note = S-phosphorothioate
  modified_base 7: mod_base = OTHER; note = 2-O-methylribose adenine
  modified_base 7..8: mod_base = OTHER; note = R-phosphorothioate
  modified_base 8: mod_base = OTHER; note = 2-fluororibose guanine
  modified_base 8..9: mod_base = OTHER; note = S-phosphorothioate
  modified_base 9: mod_base = cm
  modified_base 10: mod_base = OTHER; note = 2-fluororibose adenine
  modified_base 11: mod_base = OTHER; note = 2-O-methylribose adenine
  modified_base 12: mod_base = gm
  modified_base 13: mod_base = OTHER; note = 2-O-methylribose adenine
  modified_base 14: mod_base = OTHER; note = 2-fluororibose adenine
  modified_base 15: mod_base = cm
  modified_base 16: mod_base = OTHER; note = 2-fluororibose adenine
  modified_base 17: mod_base = cm
  modified_base 18: mod_base = OTHER; note = 2-fluororibose uracil
  modified_base 19: mod_base = gm
  modified_base 20: mod_base = OTHER; note = 2-fluororibose uracil
  modified_base 21: mod_base = um
  modified_base 21..22: mod_base = OTHER; note = S-phosphorothioate
  modified_base 22: mod_base = um
  modified_base 22..23: mod_base = OTHER; note = S-phosphorothioate
  modified_base 23: mod_base = um
  source 1..23: mol_type = other RNA
ttatagagcaagaacactgtttt

SEQ ID NO: 440 - RNA, 23 nt, synthetic construct
  misc_feature 1..23: note = Synthetic: WV-37153
  misc_feature 1..23: note = Synthetic: SSR-0103258
  modified_base 1: mod_base = um
  modified_base 1..2: mod_base = OTHER; note = S-phosphorothioate
  modified_base 2: mod_base = OTHER; note = 2-fluororibose uracil
  modified_base 2..3: mod_base = OTHER; note = R-phosphorothioate
  modified_base 3: mod_base = OTHER; note = 2-O-methylribose adenine
  modified_base 3..4: mod_base = OTHER; note = S-phosphorothioate
  modified_base 4: mod_base = OTHER; note = 2-fluororibose uracil
  modified_base 4..5: mod_base = OTHER; note = R-phosphorothioate
  modified_base 5: mod_base = OTHER; note = 2-O-methylribose adenine
  modified_base 5..6: mod_base = OTHER; note = S-phosphorothioate
  modified_base 6: mod_base = OTHER; note = 2-fluororibose guanine
  modified_base 6..7: mod_base = OTHER; note = S-phosphorothioate
  modified_base 7: mod_base = OTHER; note = 2-O-methylribose adenine
  modified_base 7..8: mod_base = OTHER; note = S-phosphorothioate
  modified_base 8: mod_base = OTHER; note = 2-fluororibose guanine
  modified_base 8..9: mod_base = OTHER; note = R-phosphorothioate
  modified_base 9: mod_base = cm
  modified_base 10: mod_base = OTHER; note = 2-fluororibose adenine
  modified_base 11: mod_base = OTHER; note = 2-O-methylribose adenine
  modified_base 12: mod_base = gm
  modified_base 13: mod_base = OTHER; note = 2-O-methylribose adenine
  modified_base 14: mod_base = OTHER; note = 2-fluororibose adenine
  modified_base 15: mod_base = cm
  modified_base 16: mod_base = OTHER; note = 2-fluororibose adenine
  modified_base 17: mod_base = cm
  modified_base 18: mod_base = OTHER; note = 2-fluororibose uracil
  modified_base 19: mod_base = gm
  modified_base 20: mod_base = OTHER; note = 2-fluororibose uracil
  modified_base 21: mod_base = um
  modified_base 21..22: mod_base = OTHER; note = S-phosphorothioate
  modified_base 22: mod_base = um
  modified_base 22..23: mod_base = OTHER; note = S-phosphorothioate
  modified_base 23: mod_base = um
  source 1..23: mol_type = other RNA
ttatagagcaagaacactgtttt

SEQ ID NO: 441 - RNA, 23 nt, synthetic construct
  misc_feature 1..23: note = Synthetic: WV-37154
  misc_feature 1..23: note = Synthetic: SSR-0103259
  modified_base 1: mod_base = um
  modified_base 1..2: mod_base = OTHER; note = S-phosphorothioate
  modified_base 2: mod_base = OTHER; note = 2-fluororibose uracil
  modified_base 2..3: mod_base = OTHER; note = R-phosphorothioate
  modified_base 3: mod_base = OTHER; note = 2-O-methylribose adenine
  modified_base 3..4: mod_base = OTHER; note = S-phosphorothioate
  modified_base 4: mod_base = OTHER; note = 2-fluororibose uracil
  modified_base 4..5: mod_base = OTHER; note = R-phosphorothioate
  modified_base 5: mod_base = OTHER; note = 2-O-methylribose adenine
  modified_base 5..6: mod_base = OTHER; note = S-phosphorothioate
  modified_base 6: mod_base = OTHER; note = 2-fluororibose guanine
  modified_base 6..7: mod_base = OTHER; note = S-phosphorothioate
  modified_base 7: mod_base = OTHER; note = 2-O-methylribose adenine
  modified_base 7..8: mod_base = OTHER; note = S-phosphorothioate
  modified_base 8: mod_base = OTHER; note = 2-fluororibose guanine
  modified_base 8..9: mod_base = OTHER; note = S-phosphorothioate
  modified_base 9: mod_base = cm
  modified_base 10: mod_base = OTHER; note = 2-fluororibose adenine
  modified_base 11: mod_base = OTHER; note = 2-O-methylribose adenine
  modified_base 12: mod_base = gm
  modified_base 13: mod_base = OTHER; note = 2-O-methylribose adenine
  modified_base 14: mod_base = OTHER; note = 2-fluororibose adenine
  modified_base 15: mod_base = cm
  modified_base 16: mod_base = OTHER; note = 2-fluororibose adenine
  modified_base 17: mod_base = cm
  modified_base 18: mod_base = OTHER; note = 2-fluororibose uracil
  modified_base 19: mod_base = gm
  modified_base 20: mod_base = OTHER; note = 2-fluororibose uracil
  modified_base 21: mod_base = um
  modified_base 21..22: mod_base = OTHER; note = S-phosphorothioate
  modified_base 22: mod_base = um
  modified_base 22..23: mod_base = OTHER; note = S-phosphorothioate
  modified_base 23: mod_base = um
  source 1..23: mol_type = other RNA
ttatagagcaagaacactgtttt

SEQ ID NO: 442 - RNA, 23 nt, synthetic construct
  misc_feature 1..23: note = Synthetic: WV-37155
  misc_feature 1..23: note = Synthetic: SSR-0103260
  modified_base 1: mod_base = um
  modified_base 1..2: mod_base = OTHER; note = S-phosphorothioate
  modified_base 2: mod_base = OTHER; note = 2-fluororibose uracil
  modified_base 2..3: mod_base = OTHER; note = R-phosphorothioate
  modified_base 3: mod_base = OTHER; note = 2-O-methylribose adenine
  modified_base 3..4: mod_base = OTHER; note = S-phosphorothioate
  modified_base 4: mod_base = OTHER; note = 2-fluororibose uracil
  modified_base 4..5: mod_base = OTHER; note = S-phosphorothioate
  modified_base 5: mod_base = OTHER; note = 2-O-methylribose adenine
  modified_base 5..6: mod_base = OTHER; note = R-phosphorothioate
  modified_base 6: mod_base = OTHER; note = 2-fluororibose guanine
  modified_base 6..7: mod_base = OTHER; note = R-phosphorothioate
  modified_base 7: mod_base = OTHER; note = 2-O-methylribose adenine
  modified_base 7..8: mod_base = OTHER; note = R-phosphorothioate
  modified_base 8: mod_base = OTHER; note = 2-fluororibose guanine
  modified_base 8..9: mod_base = OTHER; note = R-phosphorothioate
  modified_base 9: mod_base = cm
  modified_base 10: mod_base = OTHER; note = 2-fluororibose adenine
  modified_base 11: mod_base = OTHER; note = 2-O-methylribose adenine
  modified_base 12: mod_base = gm
  modified_base 13: mod_base = OTHER; note = 2-O-methylribose adenine
  modified_base 14: mod_base = OTHER; note = 2-fluororibose adenine
  modified_base 15: mod_base = cm
  modified_base 16: mod_base = OTHER; note = 2-fluororibose adenine
  modified_base 17: mod_base = cm
  modified_base 18: mod_base = OTHER; note = 2-fluororibose uracil
  modified_base 19: mod_base = gm
  modified_base 20: mod_base = OTHER; note = 2-fluororibose uracil
  modified_base 21: mod_base = um
  modified_base 21..22: mod_base = OTHER; note = S-phosphorothioate
  modified_base 22: mod_base = um
  modified_base 22..23: mod_base = OTHER; note = S-phosphorothioate
  modified_base 23: mod_base = um
  source 1..23: mol_type = other RNA
ttatagagcaagaacactgtttt

SEQ ID NO: 443 - RNA, 23 nt, synthetic construct
  misc_feature 1..23: note = Synthetic: WV-37156
  misc_feature 1..23: note = Synthetic: SSR-0103261
  modified_base 1: mod_base = um
  modified_base 1..2: mod_base = OTHER; note = S-phosphorothioate
  modified_base 2: mod_base = OTHER; note = 2-fluororibose uracil
  modified_base 2..3: mod_base = OTHER; note = R-phosphorothioate
  modified_base 3: mod_base = OTHER; note = 2-O-methylribose adenine
  modified_base 3..4: mod_base = OTHER; note = S-phosphorothioate
  modified_base 4: mod_base = OTHER; note = 2-fluororibose uracil
  modified_base 4..5: mod_base = OTHER; note = S-phosphorothioate
  modified_base 5: mod_base = OTHER; note = 2-O-methylribose adenine
  modified_base 5..6: mod_base = OTHER; note = R-phosphorothioate
  modified_base 6: mod_base = OTHER; note = 2-fluororibose guanine
  modified_base 6..7: mod_base = OTHER; note = R-phosphorothioate
  modified_base 7: mod_base = OTHER; note = 2-O-methylribose adenine
  modified_base 7..8: mod_base = OTHER; note = R-phosphorothioate
  modified_base 8: mod_base = OTHER; note = 2-fluororibose guanine
  modified_base 8..9: mod_base = OTHER; note = S-phosphorothioate
  modified_base 9: mod_base = cm
  modified_base 10: mod_base = OTHER; note = 2-fluororibose adenine
  modified_base 11: mod_base = OTHER; note = 2-O-methylribose adenine
  modified_base 12: mod_base = gm
  modified_base 13: mod_base = OTHER; note = 2-O-methylribose adenine
  modified_base 14: mod_base = OTHER; note = 2-fluororibose adenine
  modified_base 15: mod_base = cm
  modified_base 16: mod_base = OTHER; note = 2-fluororibose adenine
  modified_base 17: mod_base = cm
  modified_base 18: mod_base = OTHER; note = 2-fluororibose uracil
  modified_base 19: mod_base = gm
  modified_base 20: mod_base = OTHER; note = 2-fluororibose uracil
  modified_base 21: mod_base = um
  modified_base 21..22: mod_base = OTHER; note = S-phosphorothioate
  modified_base 22: mod_base = um
  modified_base 22..23: mod_base = OTHER; note = S-phosphorothioate
  modified_base 23: mod_base = um
  source 1..23: mol_type = other RNA
ttatagagcaagaacactgtttt

SEQ ID NO: 444 - RNA, 23 nt, synthetic construct
  misc_feature 1..23: note = Synthetic: WV-37157
  misc_feature 1..23: note = Synthetic: SSR-0103262
  modified_base 1: mod_base = um
  modified_base 1..2: mod_base = OTHER; note = S-phosphorothioate
  modified_base 2: mod_base = OTHER; note = 2-fluororibose uracil
  modified_base 2..3: mod_base = OTHER; note = R-phosphorothioate
  modified_base 3: mod_base = OTHER; note = 2-O-methylribose adenine
  modified_base 3..4: mod_base = OTHER; note = S-phosphorothioate
  modified_base 4: mod_base = OTHER; note = 2-fluororibose uracil
  modified_base 4..5: mod_base = OTHER; note = S-phosphorothioate
  modified_base 5: mod_base = OTHER; note = 2-O-methylribose adenine
  modified_base 5..6: mod_base = OTHER; note = R-phosphorothioate
  modified_base 6: mod_base = OTHER; note = 2-fluororibose guanine
  modified_base 6..7: mod_base = OTHER; note = R-phosphorothioate
  modified_base 7: mod_base = OTHER; note = 2-O-methylribose adenine
  modified_base 7..8: mod_base = OTHER; note = S-phosphorothioate
  modified_base 8: mod_base = OTHER; note = 2-fluororibose guanine
  modified_base 8..9: mod_base = OTHER; note = R-phosphorothioate
  modified_base 9: mod_base = cm
  modified_base 10: mod_base = OTHER; note = 2-fluororibose adenine
  modified_base 11: mod_base = OTHER; note = 2-O-methylribose adenine
  modified_base 12: mod_base = gm
  modified_base 13: mod_base = OTHER; note = 2-O-methylribose adenine
  modified_base 14: mod_base = OTHER; note = 2-fluororibose adenine
  modified_base 15: mod_base = cm
  modified_base 16: mod_base = OTHER; note = 2-fluororibose adenine
  modified_base 17: mod_base = cm
  modified_base 18: mod_base = OTHER; note = 2-fluororibose uracil
  modified_base 19: mod_base = gm
  modified_base 20: mod_base = OTHER; note = 2-fluororibose uracil
  modified_base 21: mod_base = um
  modified_base 21..22: mod_base = OTHER; note = S-phosphorothioate
  modified_base 22: mod_base = um
  modified_base 22..23: mod_base = OTHER; note = S-phosphorothioate
  modified_base 23: mod_base = um
  source 1..23: mol_type = other RNA
ttatagagcaagaacactgtttt

SEQ ID NO: 445 - RNA, 23 nt, synthetic construct
  misc_feature 1..23: note = Synthetic: WV-37158
  misc_feature 1..23: note = Synthetic: SSR-0103263
  modified_base 1: mod_base = um
  modified_base 1..2: mod_base = OTHER; note = S-phosphorothioate
  modified_base 2: mod_base = OTHER; note = 2-fluororibose uracil
  modified_base 2..3: mod_base = OTHER; note = R-phosphorothioate
  modified_base 3: mod_base = OTHER; note = 2-O-methylribose adenine
  modified_base 3..4: mod_base = OTHER; note = S-phosphorothioate
  modified_base 4: mod_base = OTHER; note = 2-fluororibose uracil
  modified_base 4..5: mod_base = OTHER; note = S-phosphorothioate
  modified_base 5: mod_base = OTHER; note = 2-O-methylribose adenine
  modified_base 5..6: mod_base = OTHER; note = R-phosphorothioate
  modified_base 6: mod_base = OTHER; note = 2-fluororibose guanine
  modified_base 6..7: mod_base = OTHER; note = R-phosphorothioate
  modified_base 7: mod_base = OTHER; note = 2-O-methylribose adenine
  modified_base 7..8: mod_base = OTHER; note = S-phosphorothioate
  modified_base 8: mod_base = OTHER; note = 2-fluororibose guanine
  modified_base 8..9: mod_base = OTHER; note = S-phosphorothioate
  modified_base 9: mod_base = cm
  modified_base 10: mod_base = OTHER; note = 2-fluororibose adenine
  modified_base 11: mod_base = OTHER; note = 2-O-methylribose adenine
  modified_base 12: mod_base = gm
  modified_base 13: mod_base = OTHER; note = 2-O-methylribose adenine
  modified_base 14: mod_base = OTHER; note = 2-fluororibose adenine
  modified_base 15: mod_base = cm
  modified_base 16: mod_base = OTHER; note = 2-fluororibose adenine
  modified_base 17: mod_base = cm
  modified_base 18: mod_base = OTHER; note = 2-fluororibose uracil
  modified_base 19: mod_base = gm
  modified_base 20: mod_base = OTHER; note = 2-fluororibose uracil
  modified_base 21: mod_base = um
  modified_base 21..22: mod_base = OTHER; note = S-phosphorothioate
  modified_base 22: mod_base = um
  modified_base 22..23: mod_base = OTHER; note = S-phosphorothioate
  modified_base 23: mod_base = um
  source 1..23: mol_type = other RNA
ttatagagcaagaacactgtttt

SEQ ID NO: 446 - RNA, 23 nt, synthetic construct
  misc_feature 1..23: note = Synthetic: WV-37159
  misc_feature 1..23: note = Synthetic: SSR-0103264
  modified_base 1: mod_base = um
  modified_base 1..2: mod_base = OTHER; note = S-phosphorothioate
  modified_base 2: mod_base = OTHER; note = 2-fluororibose uracil
  modified_base 2..3: mod_base = OTHER; note = R-phosphorothioate
  modified_base 3: mod_base = OTHER; note = 2-O-methylribose adenine
  modified_base 3..4: mod_base = OTHER; note = S-phosphorothioate
  modified_base 4: mod_base = OTHER; note = 2-fluororibose uracil
  modified_base 4..5: mod_base = OTHER; note = S-phosphorothioate
  modified_base 5: mod_base = OTHER; note = 2-O-methylribose adenine
  modified_base 5..6: mod_base = OTHER; note = R-phosphorothioate
  modified_base 6: mod_base = OTHER; note = 2-fluororibose guanine
  modified_base 6..7: mod_base = OTHER; note = S-phosphorothioate
  modified_base 7: mod_base = OTHER; note = 2-O-methylribose adenine
  modified_base 7..8: mod_base = OTHER; note = R-phosphorothioate
  modified_base 8: mod_base = OTHER; note = 2-fluororibose guanine
  modified_base 8..9: mod_base = OTHER; note = R-phosphorothioate
  modified_base 9: mod_base = cm
  modified_base 10: mod_base = OTHER; note = 2-fluororibose adenine
  modified_base 11: mod_base = OTHER; note = 2-O-methylribose adenine
  modified_base 12: mod_base = gm
  modified_base 13: mod_base = OTHER; note = 2-O-methylribose adenine
  modified_base 14: mod_base = OTHER; note = 2-fluororibose adenine
  modified_base 15: mod_base = cm
  modified_base 16: mod_base = OTHER; note = 2-fluororibose adenine
  modified_base 17: mod_base = cm
  modified_base 18: mod_base = OTHER; note = 2-fluororibose uracil
  modified_base 19: mod_base = gm
  modified_base 20: mod_base = OTHER; note = 2-fluororibose uracil
  modified_base 21: mod_base = um
  modified_base 21..22: mod_base = OTHER; note = S-phosphorothioate
  modified_base 22: mod_base = um
  modified_base 22..23: mod_base = OTHER; note = S-phosphorothioate
  modified_base 23: mod_base = um
  source 1..23: mol_type = other RNA
ttatagagcaagaacactgtttt

SEQ ID NO: 447 - RNA, 23 nt, synthetic construct
  misc_feature 1..23: note = Synthetic: WV-37160
  misc_feature 1..23: note = Synthetic: SSR-0103265
  modified_base 1: mod_base = um
  modified_base 1..2: mod_base = OTHER; note = S-phosphorothioate
  modified_base 2: mod_base = OTHER; note = 2-fluororibose uracil
  modified_base 2..3: mod_base = OTHER; note = R-phosphorothioate
  modified_base 3: mod_base = OTHER; note = 2-O-methylribose adenine
  modified_base 3..4: mod_base = OTHER; note = S-phosphorothioate
  modified_base 4: mod_base = OTHER; note = 2-fluororibose uracil
  modified_base 4..5: mod_base = OTHER; note = S-phosphorothioate
  modified_base 5: mod_base = OTHER; note = 2-O-methylribose adenine
  modified_base 5..6: mod_base = OTHER; note = R-phosphorothioate
  modified_base 6: mod_base = OTHER; note = 2-fluororibose guanine
  modified_base 6..7: mod_base = OTHER; note = S-phosphorothioate
  modified_base 7: mod_base = OTHER; note = 2-O-methylribose adenine
  modified_base 7..8: mod_base = OTHER; note = R-phosphorothioate
  modified_base 8: mod_base = OTHER; note = 2-fluororibose guanine
  modified_base 8..9: mod_base = OTHER; note = S-phosphorothioate
  modified_base 9: mod_base = cm
  modified_base 10: mod_base = OTHER; note = 2-fluororibose adenine
  modified_base 11: mod_base = OTHER; note = 2-O-methylribose adenine
  modified_base 12: mod_base = gm
  modified_base 13: mod_base = OTHER; note = 2-O-methylribose adenine
  modified_base 14: mod_base = OTHER; note = 2-fluororibose adenine
  modified_base 15: mod_base = cm
  modified_base 16: mod_base = OTHER; note = 2-fluororibose adenine
  modified_base 17: mod_base = cm
  modified_base 18: mod_base = OTHER; note = 2-fluororibose uracil
  modified_base 19: mod_base = gm
  modified_base 20: mod_base = OTHER; note = 2-fluororibose uracil
  modified_base 21: mod_base = um
  modified_base 21..22: mod_base = OTHER; note = S-phosphorothioate
  modified_base 22: mod_base = um
  modified_base 22..23: mod_base = OTHER; note = S-phosphorothioate
  modified_base 23: mod_base = um
  source 1..23: mol_type = other RNA
ttatagagcaagaacactgtttt

SEQ ID NO: 448 - RNA, 23 nt, synthetic construct
  misc_feature 1..23: note = Synthetic: WV-37161
  misc_feature 1..23: note = Synthetic: SSR-0103266
  modified_base 1: mod_base = um
  modified_base 1..2: mod_base = OTHER; note = S-phosphorothioate
  modified_base 2: mod_base = OTHER; note = 2-fluororibose uracil
  modified_base 2..3: mod_base = OTHER; note = R-phosphorothioate
  modified_base 3: mod_base = OTHER; note = 2-O-methylribose adenine
  modified_base 3..4: mod_base = OTHER; note = S-phosphorothioate
  modified_base 4: mod_base = OTHER; note = 2-fluororibose uracil
  modified_base 4..5: mod_base = OTHER; note = S-phosphorothioate
  modified_base 5: mod_base = OTHER; note = 2-O-methylribose adenine
  modified_base 5..6: mod_base = OTHER; note = R-phosphorothioate
  modified_base 6: mod_base = OTHER; note = 2-fluororibose guanine
  modified_base 6..7: mod_base = OTHER; note = S-phosphorothioate
  modified_base 7: mod_base = OTHER; note = 2-O-methylribose adenine
  modified_base 7..8: mod_base = OTHER; note = S-phosphorothioate
  modified_base 8: mod_base = OTHER; note = 2-fluororibose guanine
  modified_base 8..9: mod_base = OTHER; note = R-phosphorothioate
  modified_base 9: mod_base = cm
  modified_base 10: mod_base = OTHER; note = 2-fluororibose adenine
  modified_base 11: mod_base = OTHER; note = 2-O-methylribose adenine
  modified_base 12: mod_base = gm
  modified_base 13: mod_base = OTHER; note = 2-O-methylribose adenine
  modified_base 14: mod_base = OTHER; note = 2-fluororibose adenine
  modified_base 15: mod_base = cm
  modified_base 16: mod_base = OTHER; note = 2-fluororibose adenine
  modified_base 17: mod_base = cm
  modified_base 18: mod_base = OTHER; note = 2-fluororibose uracil
  modified_base 19: mod_base = gm
  modified_base 20: mod_base = OTHER; note = 2-fluororibose uracil
  modified_base 21: mod_base = um
  modified_base 21..22: mod_base = OTHER; note = S-phosphorothioate
  modified_base 22: mod_base = um
  modified_base 22..23: mod_base = OTHER; note = S-phosphorothioate
  modified_base 23: mod_base = um
  source 1..23: mol_type = other RNA
ttatagagcaagaacactgtttt

SEQ ID NO: 449 - RNA, 23 nt, synthetic construct
  misc_feature 1..23: note = Synthetic: WV-37162
  misc_feature 1..23: note = Synthetic: SSR-0103267
  modified_base 1: mod_base = um
  modified_base 1..2: mod_base = OTHER; note = S-phosphorothioate
  modified_base 2: mod_base = OTHER; note = 2-fluororibose uracil
  modified_base 2..3: mod_base = OTHER; note = R-phosphorothioate
  modified_base 3: mod_base = OTHER; note = 2-O-methylribose adenine
  modified_base 3..4: mod_base = OTHER; note = S-phosphorothioate
  modified_base 4: mod_base = OTHER; note = 2-fluororibose uracil
  modified_base 4..5: mod_base = OTHER; note = S-phosphorothioate
  modified_base 5: mod_base = OTHER; note = 2-O-methylribose adenine
  modified_base 5..6: mod_base = OTHER; note = R-phosphorothioate
  modified_base 6: mod_base = OTHER; note = 2-fluororibose guanine
  modified_base 6..7: mod_base = OTHER; note = S-phosphorothioate
  modified_base 7: mod_base = OTHER; note = 2-O-methylribose adenine
  modified_base 7..8: mod_base = OTHER; note = S-phosphorothioate
  modified_base 8: mod_base = OTHER; note = 2-fluororibose guanine
  modified_base 8..9: mod_base = OTHER; note = S-phosphorothioate
  modified_base 9: mod_base = cm
  modified_base 10: mod_base = OTHER; note = 2-fluororibose adenine
  modified_base 11: mod_base = OTHER; note = 2-O-methylribose adenine
  modified_base 12: mod_base = gm
  modified_base 13: mod_base = OTHER; note = 2-O-methylribose adenine
  modified_base 14: mod_base = OTHER; note = 2-fluororibose adenine
  modified_base 15: mod_base = cm
  modified_base 16: mod_base = OTHER; note = 2-fluororibose adenine
  modified_base 17: mod_base = cm
  modified_base 18: mod_base = OTHER; note = 2-fluororibose uracil
  modified_base 19: mod_base = gm
  modified_base 20: mod_base = OTHER; note = 2-fluororibose uracil
  modified_base 21: mod_base = um
  modified_base 21..22: mod_base = OTHER; note = S-phosphorothioate
  modified_base 22: mod_base = um
  modified_base 22..23: mod_base = OTHER; note = S-phosphorothioate
  modified_base 23: mod_base = um
  source 1..23: mol_type = other RNA
ttatagagcaagaacactgtttt

SEQ ID NO: 450 - RNA, 23 nt, synthetic construct
  misc_feature 1..23: note = Synthetic: WV-37163
  misc_feature 1..23: note = Synthetic: SSR-0103268
  modified_base 1: mod_base = um
  modified_base 1..2: mod_base = OTHER; note = S-phosphorothioate
  modified_base 2: mod_base = OTHER; note = 2-fluororibose uracil
  modified_base 2..3: mod_base = OTHER; note = R-phosphorothioate
  modified_base 3: mod_base = OTHER; note = 2-O-methylribose adenine
  modified_base 3..4: mod_base = OTHER; note = S-phosphorothioate
  modified_base 4: mod_base = OTHER; note = 2-fluororibose uracil
  modified_base 4..5: mod_base = OTHER; note = S-phosphorothioate
  modified_base 5: mod_base = OTHER; note = 2-O-methylribose adenine
  modified_base 5..6: mod_base = OTHER; note = S-phosphorothioate
  modified_base 6: mod_base = OTHER; note = 2-fluororibose guanine
  modified_base 6..7: mod_base = OTHER; note = R-phosphorothioate
  modified_base 7: mod_base = OTHER; note = 2-O-methylribose adenine
  modified_base 7..8: mod_base = OTHER; note = R-phosphorothioate
  modified_base 8: mod_base = OTHER; note = 2-fluororibose guanine
  modified_base 8..9: mod_base = OTHER; note = R-phosphorothioate
  modified_base 9: mod_base = cm
  modified_base 10: mod_base = OTHER; note = 2-fluororibose adenine
  modified_base 11: mod_base = OTHER; note = 2-O-methylribose adenine
  modified_base 12: mod_base = gm
  modified_base 13: mod_base = OTHER; note = 2-O-methylribose adenine
  modified_base 14: mod_base = OTHER; note = 2-fluororibose adenine
  modified_base 15: mod_base = cm
  modified_base 16: mod_base = OTHER; note = 2-fluororibose adenine
  modified_base 17: mod_base = cm
  modified_base 18: mod_base = OTHER; note = 2-fluororibose uracil
  modified_base 19: mod_base = gm
  modified_base 20: mod_base = OTHER; note = 2-fluororibose uracil
  modified_base 21: mod_base = um
  modified_base 21..22: mod_base = OTHER; note = S-phosphorothioate
  modified_base 22: mod_base = um
  modified_base 22..23: mod_base = OTHER; note = S-phosphorothioate
  modified_base 23: mod_base = um
  source 1..23: mol_type = other RNA
ttatagagcaagaacactgtttt

SEQ ID NO: 451 - RNA, 23 nt, synthetic construct
  misc_feature 1..23: note = Synthetic: WV-37164
  misc_feature 1..23: note = Synthetic: SSR-0103269
  modified_base 1: mod_base = um
  modified_base 1..2: mod_base = OTHER; note = S-phosphorothioate
  modified_base 2: mod_base = OTHER; note = 2-fluororibose uracil
  modified_base 2..3: mod_base = OTHER; note = R-phosphorothioate
  modified_base 3: mod_base = OTHER; note = 2-O-methylribose adenine
  modified_base 3..4: mod_base = OTHER; note = S-phosphorothioate
  modified_base 4: mod_base = OTHER; note = 2-fluororibose uracil
  modified_base 4..5: mod_base = OTHER; note = S-phosphorothioate
  modified_base 5: mod_base = OTHER; note = 2-O-methylribose adenine
  modified_base 5..6: mod_base = OTHER; note = S-phosphorothioate
  modified_base 6: mod_base = OTHER; note = 2-fluororibose guanine
  modified_base 6..7: mod_base = OTHER; note = R-phosphorothioate
  modified_base 7: mod_base = OTHER; note = 2-O-methylribose adenine
  modified_base 7..8: mod_base = OTHER; note = R-phosphorothioate
  modified_base 8: mod_base = OTHER; note = 2-fluororibose guanine
  modified_base 8..9: mod_base = OTHER; note = S-phosphorothioate
  modified_base 9: mod_base = cm
  modified_base 10: mod_base = OTHER; note = 2-fluororibose adenine
  modified_base 11: mod_base = OTHER; note = 2-O-methylribose adenine
  modified_base 12: mod_base = gm
  modified_base 13: mod_base = OTHER; note = 2-O-methylribose adenine
  modified_base 14: mod_base = OTHER; note = 2-fluororibose adenine
  modified_base 15: mod_base = cm
  modified_base 16: mod_base = OTHER; note = 2-fluororibose adenine
  modified_base 17: mod_base = cm
  modified_base 18: mod_base = OTHER; note = 2-fluororibose uracil
  modified_base 19: mod_base = gm
  modified_base 20: mod_base = OTHER; note = 2-fluororibose uracil
  modified_base 21: mod_base = um
  modified_base 21..22: mod_base = OTHER; note = S-phosphorothioate
  modified_base 22: mod_base = um
  modified_base 22..23: mod_base = OTHER; note = S-phosphorothioate
  modified_base 23: mod_base = um
  source 1..23: mol_type = other RNA
ttatagagcaagaacactgtttt

SEQ ID NO: 452 - RNA, 23 nt, synthetic construct
  misc_feature 1..23: note = Synthetic: WV-37165
  misc_feature 1..23: note = Synthetic: SSR-0103270
  modified_base 1: mod_base = um
  modified_base 1..2: mod_base = OTHER; note = S-phosphorothioate
  modified_base 2: mod_base = OTHER; note = 2-fluororibose uracil
  modified_base 2..3: mod_base = OTHER; note = R-phosphorothioate
  modified_base 3: mod_base = OTHER; note = 2-O-methylribose adenine
  modified_base 3..4: mod_base = OTHER; note = S-phosphorothioate
  modified_base 4: mod_base = OTHER; note = 2-fluororibose uracil
  modified_base 4..5: mod_base = OTHER; note = S-phosphorothioate
  modified_base 5: mod_base = OTHER; note = 2-O-methylribose adenine
  modified_base 5..6: mod_base = OTHER; note = S-phosphorothioate
  modified_base 6: mod_base = OTHER; note = 2-fluororibose guanine
  modified_base 6..7: mod_base = OTHER; note = R-phosphorothioate
  modified_base 7: mod_base = OTHER; note = 2-O-methylribose adenine
  modified_base 7..8: mod_base = OTHER; note = S-phosphorothioate
  modified_base 8: mod_base = OTHER; note = 2-fluororibose guanine
  modified_base 8..9: mod_base = OTHER; note = R-phosphorothioate
  modified_base 9: mod_base = cm
  modified_base 10: mod_base = OTHER; note = 2-fluororibose adenine
  modified_base 11: mod_base = OTHER; note = 2-O-methylribose adenine
  modified_base 12: mod_base = gm
  modified_base 13: mod_base = OTHER; note = 2-O-methylribose adenine
  modified_base 14: mod_base = OTHER; note = 2-fluororibose adenine
  modified_base 15: mod_base = cm
  modified_base 16: mod_base = OTHER; note = 2-fluororibose adenine
  modified_base 17: mod_base = cm
  modified_base 18: mod_base = OTHER; note = 2-fluororibose uracil
  modified_base 19: mod_base = gm
  modified_base 20: mod_base = OTHER; note = 2-fluororibose uracil
  modified_base 21: mod_base = um
  modified_base 21..22: mod_base = OTHER; note = S-phosphorothioate
  modified_base 22: mod_base = um
  modified_base 22..23: mod_base = OTHER; note = S-phosphorothioate
  modified_base 23: mod_base = um
  source 1..23: mol_type = other RNA
ttatagagcaagaacactgtttt

SEQ ID NO: 453 - RNA, 23 nt, synthetic construct
  misc_feature 1..23: note = Synthetic: WV-37166
  misc_feature 1..23: note = Synthetic: SSR-0103271
  modified_base 1: mod_base = um
  modified_base 1..2: mod_base = OTHER; note = S-phosphorothioate
  modified_base 2: mod_base = OTHER; note = 2-fluororibose uracil
  modified_base 2..3: mod_base = OTHER; note = R-phosphorothioate
  modified_base 3: mod_base = OTHER; note = 2-O-methylribose adenine
  modified_base 3..4: mod_base = OTHER; note = S-phosphorothioate
  modified_base 4: mod_base = OTHER; note = 2-fluororibose uracil
  modified_base 4..5: mod_base = OTHER; note = S-phosphorothioate
  modified_base 5: mod_base = OTHER; note = 2-O-methylribose adenine
  modified_base 5..6: mod_base = OTHER; note = S-phosphorothioate
  modified_base 6: mod_base = OTHER; note = 2-fluororibose guanine
  modified_base 6..7: mod_base = OTHER; note = R-phosphorothioate
  modified_base 7: mod_base = OTHER; note = 2-O-methylribose adenine
  modified_base 7..8: mod_base = OTHER; note = S-phosphorothioate
  modified_base 8: mod_base = OTHER; note = 2-fluororibose guanine
  modified_base 8..9: mod_base = OTHER; note = S-phosphorothioate
  modified_base 9: mod_base = cm
  modified_base 10: mod_base = OTHER; note = 2-fluororibose adenine
  modified_base 11: mod_base = OTHER; note = 2-O-methylribose adenine
  modified_base 12: mod_base = gm
  modified_base 13: mod_base = OTHER; note = 2-O-methylribose adenine
  modified_base 14: mod_base = OTHER; note = 2-fluororibose adenine
  modified_base 15: mod_base = cm
  modified_base 16: mod_base = OTHER; note = 2-fluororibose adenine
  modified_base 17: mod_base = cm
  modified_base 18: mod_base = OTHER; note = 2-fluororibose uracil
  modified_base 19: mod_base = gm
  modified_base 20: mod_base = OTHER; note = 2-fluororibose uracil
  modified_base 21: mod_base = um
  modified_base 21..22: mod_base = OTHER; note = S-phosphorothioate
  modified_base 22: mod_base = um
  modified_base 22..23: mod_base = OTHER; note = S-phosphorothioate
  modified_base 23: mod_base = um
  source 1..23: mol_type = other RNA
ttatagagcaagaacactgtttt

SEQ ID NO: 454 - RNA, 23 nt, synthetic construct
  misc_feature 1..23: note = Synthetic: WV-37167
  misc_feature 1..23: note = Synthetic: SSR-0103272
  modified_base 1: mod_base = um
  modified_base 1..2: mod_base = OTHER; note = S-phosphorothioate
  modified_base 2: mod_base = OTHER; note = 2-fluororibose uracil
  modified_base 2..3: mod_base = OTHER; note = R-phosphorothioate
  modified_base 3: mod_base = OTHER; note = 2-O-methylribose adenine
  modified_base 3..4: mod_base = OTHER; note = S-phosphorothioate
  modified_base 4: mod_base = OTHER; note = 2-fluororibose uracil
  modified_base 4..5: mod_base = OTHER; note = S-phosphorothioate
  modified_base 5: mod_base = OTHER; note = 2-O-methylribose adenine
  modified_base 5..6: mod_base = OTHER; note = S-phosphorothioate
  modified_base 6: mod_base = OTHER; note = 2-fluororibose guanine
  modified_base 6..7: mod_base = OTHER; note = S-phosphorothioate
  modified_base 7: mod_base = OTHER; note = 2-O-methylribose adenine
  modified_base 7..8: mod_base = OTHER; note = R-phosphorothioate
  modified_base 8: mod_base = OTHER; note = 2-fluororibose guanine
  modified_base 8..9: mod_base = OTHER; note = R-phosphorothioate
  modified_base 9: mod_base = cm
  modified_base 10: mod_base = OTHER; note = 2-fluororibose adenine
  modified_base 11: mod_base = OTHER; note = 2-O-methylribose adenine
  modified_base 12: mod_base = gm
  modified_base 13: mod_base = OTHER; note = 2-O-methylribose adenine
  modified_base 14: mod_base = OTHER; note = 2-fluororibose adenine
  modified_base 15: mod_base = cm
  modified_base 16: mod_base = OTHER; note = 2-fluororibose adenine
  modified_base 17: mod_base = cm
  modified_base 18: mod_base = OTHER; note = 2-fluororibose uracil
  modified_base 19: mod_base = gm
  modified_base 20: mod_base = OTHER; note = 2-fluororibose uracil
  modified_base 21: mod_base = um
  modified_base 21..22: mod_base = OTHER; note = S-phosphorothioate
  modified_base 22: mod_base = um
  modified_base 22..23: mod_base = OTHER; note = S-phosphorothioate
  modified_base 23: mod_base = um
  source 1..23: mol_type = other RNA
ttatagagcaagaacactgtttt

SEQ ID NO: 455 - RNA, 23 nt, synthetic construct
  misc_feature 1..23: note = Synthetic: WV-37168
  misc_feature 1..23: note = Synthetic: SSR-0103273
  modified_base 1: mod_base = um
  modified_base 1..2: mod_base = OTHER; note = S-phosphorothioate
  modified_base 2: mod_base = OTHER; note = 2-fluororibose uracil
  modified_base 2..3: mod_base = OTHER; note = R-phosphorothioate
  modified_base 3: mod_base = OTHER; note = 2-O-methylribose adenine
  modified_base 3..4: mod_base = OTHER; note = S-phosphorothioate
  modified_base 4: mod_base = OTHER; note = 2-fluororibose uracil
  modified_base 4..5: mod_base = OTHER; note = S-phosphorothioate
  modified_base 5: mod_base = OTHER; note = 2-O-methylribose adenine
  modified_base 5..6: mod_base = OTHER; note = S-phosphorothioate
  modified_base 6: mod_base = OTHER; note = 2-fluororibose guanine
  modified_base 6..7: mod_base = OTHER; note = S-phosphorothioate
  modified_base 7: mod_base = OTHER; note = 2-O-methylribose adenine
  modified_base 7..8: mod_base = OTHER; note = R-phosphorothioate
  modified_base 8: mod_base = OTHER; note = 2-fluororibose guanine
  modified_base 8..9: mod_base = OTHER; note = S-phosphorothioate
  modified_base 9: mod_base = cm
  modified_base 10: mod_base = OTHER; note = 2-fluororibose adenine
  modified_base 11: mod_base = OTHER; note = 2-O-methylribose adenine
  modified_base 12: mod_base = gm
  modified_base 13: mod_base = OTHER; note = 2-O-methylribose adenine
  modified_base 14: mod_base = OTHER; note = 2-fluororibose adenine
  modified_base 15: mod_base = cm
  modified_base 16: mod_base = OTHER; note = 2-fluororibose adenine
  modified_base 17: mod_base = cm
  modified_base 18: mod_base = OTHER; note = 2-fluororibose uracil
  modified_base 19: mod_base = gm
  modified_base 20: mod_base = OTHER; note = 2-fluororibose uracil
  modified_base 21: mod_base = um
  modified_base 21..22: mod_base = OTHER; note = S-phosphorothioate
  modified_base 22: mod_base = um
  modified_base 22..23: mod_base = OTHER; note = S-phosphorothioate
  modified_base 23: mod_base = um
  source 1..23: mol_type = other RNA
ttatagagcaagaacactgtttt

SEQ ID NO: 456 - RNA, 23 nt, synthetic construct
  misc_feature 1..23: note = Synthetic: WV-37169
  misc_feature 1..23: note = Synthetic: SSR-0103274
  modified_base 1: mod_base = um
  modified_base 1..2: mod_base = OTHER; note = S-phosphorothioate
  modified_base 2: mod_base = OTHER; note = 2-fluororibose uracil
  modified_base 2..3: mod_base = OTHER; note = R-phosphorothioate
  modified_base 3: mod_base = OTHER; note = 2-O-methylribose adenine
  modified_base 3..4: mod_base = OTHER; note = S-phosphorothioate
  modified_base 4: mod_base = OTHER; note = 2-fluororibose uracil
  modified_base 4..5: mod_base = OTHER; note = S-phosphorothioate
  modified_base 5: mod_base = OTHER; note = 2-O-methylribose adenine
  modified_base 5..6: mod_base = OTHER; note = S-phosphorothioate
  modified_base 6: mod_base = OTHER; note = 2-fluororibose guanine
  modified_base 6..7: mod_base = OTHER; note = S-phosphorothioate
  modified_base 7: mod_base = OTHER; note = 2-O-methylribose adenine
  modified_base 7..8: mod_base = OTHER; note = S-phosphorothioate
  modified_base 8: mod_base = OTHER; note = 2-fluororibose guanine
  modified_base 8..9: mod_base = OTHER; note = R-phosphorothioate
  modified_base 9: mod_base = cm
  modified_base 10: mod_base = OTHER; note = 2-fluororibose adenine
  modified_base 11: mod_base = OTHER; note = 2-O-methylribose adenine
  modified_base 12: mod_base = gm
  modified_base 13: mod_base = OTHER; note = 2-O-methylribose adenine
  modified_base 14: mod_base = OTHER; note = 2-fluororibose adenine
  modified_base 15: mod_base = cm
  modified_base 16: mod_base = OTHER; note = 2-fluororibose adenine
  modified_base 17: mod_base = cm
  modified_base 18: mod_base = OTHER; note = 2-fluororibose uracil
  modified_base 19: mod_base = gm
  modified_base 20: mod_base = OTHER; note = 2-fluororibose uracil
  modified_base 21: mod_base = um
  modified_base 21..22: mod_base = OTHER; note = S-phosphorothioate
  modified_base 22: mod_base = um
  modified_base 22..23: mod_base = OTHER; note = S-phosphorothioate
  modified_base 23: mod_base = um
  source 1..23: mol_type = other RNA
ttatagagcaagaacactgtttt

SEQ ID NO: 457 - RNA, 23 nt, synthetic construct
  misc_feature 1..23: note = Synthetic: WV-37170
  misc_feature 1..23: note = Synthetic: SSR-0103275
  modified_base 1: mod_base = um
  modified_base 1..2: mod_base = OTHER; note = S-phosphorothioate
  modified_base 2: mod_base = OTHER; note = 2-fluororibose uracil
  modified_base 2..3: mod_base = OTHER; note = R-phosphorothioate
  modified_base 3: mod_base = OTHER; note = 2-O-methylribose adenine
  modified_base 3..4: mod_base = OTHER; note = S-phosphorothioate
  modified_base 4: mod_base = OTHER; note = 2-fluororibose uracil
  modified_base 4..5: mod_base = OTHER; note = S-phosphorothioate
  modified_base 5: mod_base = OTHER; note = 2-O-methylribose adenine
  modified_base 5..6: mod_base = OTHER; note = S-phosphorothioate
  modified_base 6: mod_base = OTHER; note = 2-fluororibose guanine
  modified_base 6..7: mod_base = OTHER; note = S-phosphorothioate
  modified_base 7: mod_base = OTHER; note = 2-O-methylribose adenine
  modified_base 7..8: mod_base = OTHER; note = S-phosphorothioate
  modified_base 8: mod_base = OTHER; note = 2-fluororibose guanine
  modified_base 8..9: mod_base = OTHER; note = S-phosphorothioate
  modified_base 9: mod_base = cm
  modified_base 10: mod_base = OTHER; note = 2-fluororibose adenine
  modified_base 11: mod_base = OTHER; note = 2-O-methylribose adenine
  modified_base 12: mod_base = gm
  modified_base 13: mod_base = OTHER; note = 2-O-methylribose adenine
  modified_base 14: mod_base = OTHER; note = 2-fluororibose adenine
  modified_base 15: mod_base = cm
  modified_base 16: mod_base = OTHER; note = 2-fluororibose adenine
  modified_base 17: mod_base = cm
  modified_base 18: mod_base = OTHER; note = 2-fluororibose uracil
  modified_base 19: mod_base = gm
  modified_base 20: mod_base = OTHER; note = 2-fluororibose uracil
  modified_base 21: mod_base = um
  modified_base 21..22: mod_base = OTHER; note = S-phosphorothioate
  modified_base 22: mod_base = um
  modified_base 22..23: mod_base = OTHER; note = S-phosphorothioate
  modified_base 23: mod_base = um
  source 1..23: mol_type = other RNA
ttatagagcaagaacactgtttt

SEQ ID NO: 458 - RNA, 23 nt, synthetic construct
  misc_feature 1..23: note = Synthetic: WV-37171
  misc_feature 1..23: note = Synthetic: SSR-0103288
  modified_base 1: mod_base = um
  modified_base 1..2: mod_base = OTHER; note = S-phosphorothioate
  modified_base 2: mod_base = OTHER; note = 2-fluororibose uracil
  modified_base 2..3: mod_base = OTHER; note = S-phosphorothioate
  modified_base 3: mod_base = OTHER; note = 2-O-methylribose adenine
  modified_base 3..4: mod_base = OTHER; note = R-phosphorothioate
  modified_base 4: mod_base = OTHER; note = 2-fluororibose uracil
  modified_base 4..5: mod_base = OTHER; note = R-phosphorothioate
  modified_base 5: mod_base = OTHER; note = 2-O-methylribose adenine
  modified_base 5..6: mod_base = OTHER; note = R-phosphorothioate
  modified_base 6: mod_base = OTHER; note = 2-fluororibose guanine
  modified_base 6..7: mod_base = OTHER; note = R-phosphorothioate
  modified_base 7: mod_base = OTHER; note = 2-O-methylribose adenine
  modified_base 7..8: mod_base = OTHER; note = R-phosphorothioate
  modified_base 8: mod_base = OTHER; note = 2-fluororibose guanine
  modified_base 8..9: mod_base = OTHER; note = R-phosphorothioate
  modified_base 9: mod_base = cm
  modified_base 10: mod_base = OTHER; note = 2-fluororibose adenine
  modified_base 11: mod_base = OTHER; note = 2-O-methylribose adenine
  modified_base 12: mod_base = gm
  modified_base 13: mod_base = OTHER; note = 2-O-methylribose adenine
  modified_base 14: mod_base = OTHER; note = 2-fluororibose adenine
  modified_base 15: mod_base = cm
  modified_base 16: mod_base = OTHER; note = 2-fluororibose adenine
  modified_base 17: mod_base = cm
  modified_base 18: mod_base = OTHER; note = 2-fluororibose uracil
  modified_base 19: mod_base = gm
  modified_base 20: mod_base = OTHER; note = 2-fluororibose uracil
  modified_base 21: mod_base = um
  modified_base 21..22: mod_base = OTHER; note = S-phosphorothioate
  modified_base 22: mod_base = um
  modified_base 22..23: mod_base = OTHER; note = S-phosphorothioate
  modified_base 23: mod_base = um
  source 1..23: mol_type = other RNA
ttatagagcaagaacactgtttt

SEQ ID NO: 459 - RNA, 23 nt, synthetic construct
  misc_feature 1..23: note = Synthetic: WV-37172
  misc_feature 1..23: note = Synthetic: SSR-0103289
  modified_base 1: mod_base = um
  modified_base 1..2: mod_base = OTHER; note = S-phosphorothioate
  modified_base 2: mod_base = OTHER; note = 2-fluororibose uracil
  modified_base 2..3: mod_base = OTHER; note = S-phosphorothioate
  modified_base 3: mod_base = OTHER; note = 2-O-methylribose adenine
  modified_base 3..4: mod_base = OTHER; note = R-phosphorothioate
  modified_base 4: mod_base = OTHER; note = 2-fluororibose uracil
  modified_base 4..5: mod_base = OTHER; note = R-phosphorothioate
  modified_base 5: mod_base = OTHER; note = 2-O-methylribose adenine
  modified_base 5..6: mod_base = OTHER; note = R-phosphorothioate
  modified_base 6: mod_base = OTHER; note = 2-fluororibose guanine
  modified_base 6..7: mod_base = OTHER; note = R-phosphorothioate
  modified_base 7: mod_base = OTHER; note = 2-O-methylribose adenine
  modified_base 7..8: mod_base = OTHER; note = R-phosphorothioate
  modified_base 8: mod_base = OTHER; note = 2-fluororibose guanine
  modified_base 8..9: mod_base = OTHER; note = S-phosphorothioate
  modified_base 9: mod_base = cm
  modified_base 10: mod_base = OTHER; note = 2-fluororibose adenine
  modified_base 11: mod_base = OTHER; note = 2-O-methylribose adenine
  modified_base 12: mod_base = gm
  modified_base 13: mod_base = OTHER; note = 2-O-methylribose adenine
  modified_base 14: mod_base = OTHER; note = 2-fluororibose adenine
  modified_base 15: mod_base = cm
  modified_base 16: mod_base = OTHER; note = 2-fluororibose adenine
  modified_base 17: mod_base = cm
  modified_base 18: mod_base = OTHER; note = 2-fluororibose uracil
  modified_base 19: mod_base = gm
  modified_base 20: mod_base = OTHER; note = 2-fluororibose uracil
  modified_base 21: mod_base = um
  modified_base 21..22: mod_base = OTHER; note = S-phosphorothioate
  modified_base 22: mod_base = um
  modified_base 22..23: mod_base = OTHER; note = S-phosphorothioate
  modified_base 23: mod_base = um
  source 1..23: mol_type = other RNA
ttatagagcaagaacactgtttt

SEQ ID NO: 460 - RNA, 23 nt, synthetic construct
  misc_feature 1..23: note = Synthetic: WV-37173
  misc_feature 1..23: note = Synthetic: SSR-0103290
  modified_base 1: mod_base = um
  modified_base 1..2: mod_base = OTHER; note = S-phosphorothioate
  modified_base 2: mod_base = OTHER; note = 2-fluororibose uracil
  modified_base 2..3: mod_base = OTHER; note = S-phosphorothioate
  modified_base 3: mod_base = OTHER; note = 2-O-methylribose adenine
  modified_base 3..4: mod_base = OTHER; note = R-phosphorothioate
  modified_base 4: mod_base = OTHER; note = 2-fluororibose uracil
  modified_base 4..5: mod_base = OTHER; note = R-phosphorothioate
  modified_base 5: mod_base = OTHER; note = 2-O-methylribose adenine
  modified_base 5..6: mod_base = OTHER; note = R-phosphorothioate
  modified_base 6: mod_base = OTHER; note = 2-fluororibose guanine
  modified_base 6..7: mod_base = OTHER; note = R-phosphorothioate
  modified_base 7: mod_base = OTHER; note = 2-O-methylribose adenine
  modified_base 7..8: mod_base = OTHER; note = S-phosphorothioate
  modified_base 8: mod_base = OTHER; note = 2-fluororibose guanine
  modified_base 8..9: mod_base = OTHER; note = R-phosphorothioate
  modified_base 9: mod_base = cm
  modified_base 10: mod_base = OTHER; note = 2-fluororibose adenine
  modified_base 11: mod_base = OTHER; note = 2-O-methylribose adenine
  modified_base 12: mod_base = gm
  modified_base 13: mod_base = OTHER; note = 2-O-methylribose adenine
  modified_base 14: mod_base = OTHER; note = 2-fluororibose adenine
  modified_base 15: mod_base = cm
  modified_base 16: mod_base = OTHER; note = 2-fluororibose adenine
  modified_base 17: mod_base = cm
  modified_base 18: mod_base = OTHER; note = 2-fluororibose uracil
  modified_base 19: mod_base = gm
  modified_base 20: mod_base = OTHER; note = 2-fluororibose uracil
  modified_base 21: mod_base = um
  modified_base 21..22: mod_base = OTHER; note = S-phosphorothioate
  modified_base 22: mod_base = um
  modified_base 22..23: mod_base = OTHER; note = S-phosphorothioate
  modified_base 23: mod_base = um
  source 1..23: mol_type = other RNA
ttatagagcaagaacactgtttt

SEQ ID NO: 461 - RNA, 23 nt, synthetic construct
  misc_feature 1..23: note = Synthetic: WV-37174
  misc_feature 1..23: note = Synthetic: SSR-0103291
  modified_base 1: mod_base = um
  modified_base 1..2: mod_base = OTHER; note = S-phosphorothioate
  modified_base 2: mod_base = OTHER; note = 2-fluororibose uracil
  modified_base 2..3: mod_base = OTHER; note = S-phosphorothioate
  modified_base 3: mod_base = OTHER; note = 2-O-methylribose adenine
  modified_base 3..4: mod_base = OTHER; note = R-phosphorothioate
  modified_base 4: mod_base = OTHER; note = 2-fluororibose uracil
  modified_base 4..5: mod_base = OTHER; note = R-phosphorothioate
  modified_base 5: mod_base = OTHER; note = 2-O-methylribose adenine
  modified_base 5..6: mod_base = OTHER; note = R-phosphorothioate
  modified_base 6: mod_base = OTHER; note = 2-fluororibose guanine
  modified_base 6..7: mod_base = OTHER; note = R-phosphorothioate
  modified_base 7: mod_base = OTHER; note = 2-O-methylribose adenine
  modified_base 7..8: mod_base = OTHER; note = S-phosphorothioate
  modified_base 8: mod_base = OTHER; note = 2-fluororibose guanine
  modified_base 8..9: mod_base = OTHER; note = S-phosphorothioate
  modified_base 9: mod_base = cm
  modified_base 10: mod_base = OTHER; note = 2-fluororibose adenine
  modified_base 11: mod_base = OTHER; note = 2-O-methylribose adenine
  modified_base 12: mod_base = gm
  modified_base 13: mod_base = OTHER; note = 2-O-methylribose adenine
  modified_base 14: mod_base = OTHER; note = 2-fluororibose adenine
  modified_base 15: mod_base = cm
  modified_base 16: mod_base = OTHER; note = 2-fluororibose adenine
  modified_base 17: mod_base = cm
  modified_base 18: mod_base = OTHER; note = 2-fluororibose uracil
  modified_base 19: mod_base = gm
  modified_base 20: mod_base = OTHER; note = 2-fluororibose uracil
  modified_base 21: mod_base = um
  modified_base 21..22: mod_base = OTHER; note = S-phosphorothioate
  modified_base 22: mod_base = um
  modified_base 22..23: mod_base = OTHER; note = S-phosphorothioate
  modified_base 23: mod_base = um
  source 1..23: mol_type = other RNA
ttatagagcaagaacactgtttt

SEQ ID NO: 462 - RNA, 23 nt, synthetic construct
  misc_feature 1..23: note = Synthetic: WV-37175
  misc_feature 1..23: note = Synthetic: SSR-0103292
  modified_base 1: mod_base = um
  modified_base 1..2: mod_base = OTHER; note = S-phosphorothioate
  modified_base 2: mod_base = OTHER; note = 2-fluororibose uracil
  modified_base 2..3: mod_base = OTHER; note = S-phosphorothioate
  modified_base 3: mod_base = OTHER; note = 2-O-methylribose adenine
  modified_base 3..4: mod_base = OTHER; note = R-phosphorothioate
  modified_base 4: mod_base = OTHER; note = 2-fluororibose uracil
  modified_base 4..5: mod_base = OTHER; note = R-phosphorothioate
  modified_base 5: mod_base = OTHER; note = 2-O-methylribose adenine
  modified_base 5..6: mod_base = OTHER; note = R-phosphorothioate
  modified_base 6: mod_base = OTHER; note = 2-fluororibose guanine
  modified_base 6..7: mod_base = OTHER; note = S-phosphorothioate
  modified_base 7: mod_base = OTHER; note = 2-O-methylribose adenine
  modified_base 7..8: mod_base = OTHER; note = R-phosphorothioate
  modified_base 8: mod_base = OTHER; note = 2-fluororibose guanine
  modified_base 8..9: mod_base = OTHER; note = R-phosphorothioate
  modified_base 9: mod_base = cm
  modified_base 10: mod_base = OTHER; note = 2-fluororibose adenine
  modified_base 11: mod_base = OTHER; note = 2-O-methylribose adenine
  modified_base 12: mod_base = gm
  modified_base 13: mod_base = OTHER; note = 2-O-methylribose adenine
  modified_base 14: mod_base = OTHER; note = 2-fluororibose adenine
  modified_base 15: mod_base = cm
  modified_base 16: mod_base = OTHER; note = 2-fluororibose adenine
  modified_base 17: mod_base = cm
  modified_base 18: mod_base = OTHER; note = 2-fluororibose uracil
  modified_base 19: mod_base = gm
  modified_base 20: mod_base = OTHER; note = 2-fluororibose uracil
  modified_base 21: mod_base = um
  modified_base 21..22: mod_base = OTHER; note = S-phosphorothioate
  modified_base 22: mod_base = um
  modified_base 22..23: mod_base = OTHER; note = S-phosphorothioate
  modified_base 23: mod_base = um
  source 1..23: mol_type = other RNA
ttatagagcaagaacactgtttt

SEQ ID NO: 463 - RNA, 23 nt, synthetic construct
  misc_feature 1..23: note = Synthetic: WV-37176
  misc_feature 1..23: note = Synthetic: SSR-0103293
  modified_base 1: mod_base = um
  modified_base 1..2: mod_base = OTHER; note = S-phosphorothioate
  modified_base 2: mod_base = OTHER; note = 2-fluororibose uracil
  modified_base 2..3: mod_base = OTHER; note = S-phosphorothioate
  modified_base 3: mod_base = OTHER; note = 2-O-methylribose adenine
  modified_base 3..4: mod_base = OTHER; note = R-phosphorothioate
  modified_base 4: mod_base = OTHER; note = 2-fluororibose uracil
  modified_base 4..5: mod_base = OTHER; note = R-phosphorothioate
  modified_base 5: mod_base = OTHER; note = 2-O-methylribose adenine
  modified_base 5..6: mod_base = OTHER; note = R-phosphorothioate
  modified_base 6: mod_base = OTHER; note = 2-fluororibose guanine
  modified_base 6..7: mod_base = OTHER; note = S-phosphorothioate
  modified_base 7: mod_base = OTHER; note = 2-O-methylribose adenine
  modified_base 7..8: mod_base = OTHER; note = R-phosphorothioate
  modified_base 8: mod_base = OTHER; note = 2-fluororibose guanine
  modified_base 8..9: mod_base = OTHER; note = S-phosphorothioate
  modified_base 9: mod_base = cm
  modified_base 10: mod_base = OTHER; note = 2-fluororibose adenine
  modified_base 11: mod_base = OTHER; note = 2-O-methylribose adenine
  modified_base 12: mod_base = gm
  modified_base 13: mod_base = OTHER; note = 2-O-methylribose adenine
  modified_base 14: mod_base = OTHER; note = 2-fluororibose adenine
  modified_base 15: mod_base = cm
  modified_base 16: mod_base = OTHER; note = 2-fluororibose adenine
  modified_base 17: mod_base = cm
  modified_base 18: mod_base = OTHER; note = 2-fluororibose uracil
  modified_base 19: mod_base = gm
  modified_base 20: mod_base = OTHER; note = 2-fluororibose uracil
  modified_base 21: mod_base = um
  modified_base 21..22: mod_base = OTHER; note = S-phosphorothioate
  modified_base 22: mod_base = um
  modified_base 22..23: mod_base = OTHER; note = S-phosphorothioate
  modified_base 23: mod_base = um
  source 1..23: mol_type = other RNA
ttatagagcaagaacactgtttt

SEQ ID NO: 464 - RNA, 23 nt, synthetic construct
  misc_feature 1..23: note = Synthetic: WV-37177
  misc_feature 1..23: note = Synthetic: SSR-0103294
  modified_base 1: mod_base = um
  modified_base 1..2: mod_base = OTHER; note = S-phosphorothioate
  modified_base 2: mod_base = OTHER; note = 2-fluororibose uracil
  modified_base 2..3: mod_base = OTHER; note = S-phosphorothioate
  modified_base 3: mod_base = OTHER; note = 2-O-methylribose adenine
  modified_base 3..4: mod_base = OTHER; note = R-phosphorothioate
  modified_base 4: mod_base = OTHER; note = 2-fluororibose uracil
  modified_base 4..5: mod_base = OTHER; note = R-phosphorothioate
  modified_base 5: mod_base = OTHER; note = 2-O-methylribose adenine
  modified_base 5..6: mod_base = OTHER; note = R-phosphorothioate
  modified_base 6: mod_base = OTHER; note = 2-fluororibose guanine
  modified_base 6..7: mod_base = OTHER; note = S-phosphorothioate
  modified_base 7: mod_base = OTHER; note = 2-O-methylribose adenine
  modified_base 7..8: mod_base = OTHER; note = S-phosphorothioate
  modified_base 8: mod_base = OTHER; note = 2-fluororibose guanine
  modified_base 8..9: mod_base = OTHER; note = R-phosphorothioate
  modified_base 9: mod_base = cm
  modified_base 10: mod_base = OTHER; note = 2-fluororibose adenine
  modified_base 11: mod_base = OTHER; note = 2-O-methylribose adenine
  modified_base 12: mod_base = gm
  modified_base 13: mod_base = OTHER; note = 2-O-methylribose adenine
  modified_base 14: mod_base = OTHER; note = 2-fluororibose adenine
  modified_base 15: mod_base = cm
  modified_base 16: mod_base = OTHER; note = 2-fluororibose adenine
  modified_base 17: mod_base = cm
  modified_base 18: mod_base = OTHER; note = 2-fluororibose uracil
  modified_base 19: mod_base = gm
  modified_base 20: mod_base = OTHER; note = 2-fluororibose uracil
  modified_base 21: mod_base = um
  modified_base 21..22: mod_base = OTHER; note = S-phosphorothioate
  modified_base 22: mod_base = um
  modified_base 22..23: mod_base = OTHER; note = S-phosphorothioate
  modified_base 23: mod_base = um
  source 1..23: mol_type = other RNA
ttatagagcaagaacactgtttt

SEQ ID NO: 465 - RNA, 23 nt, synthetic construct
  misc_feature 1..23: note = Synthetic: WV-37178
  misc_feature 1..23: note = Synthetic: SSR-0103295
  modified_base 1: mod_base = um
  modified_base 1..2: mod_base = OTHER; note = S-phosphorothioate
  modified_base 2: mod_base = OTHER; note = 2-fluororibose uracil
  modified_base 2..3: mod_base = OTHER; note = S-phosphorothioate
  modified_base 3: mod_base = OTHER; note = 2-O-methylribose adenine
  modified_base 3..4: mod_base = OTHER; note = R-phosphorothioate
  modified_base 4: mod_base = OTHER; note = 2-fluororibose uracil
  modified_base 4..5: mod_base = OTHER; note = R-phosphorothioate
  modified_base 5: mod_base = OTHER; note = 2-O-methylribose adenine
  modified_base 5..6: mod_base = OTHER; note = R-phosphorothioate
  modified_base 6: mod_base = OTHER; note = 2-fluororibose guanine
  modified_base 6..7: mod_base = OTHER; note = S-phosphorothioate
  modified_base 7: mod_base = OTHER; note = 2-O-methylribose adenine
  modified_base 7..8: mod_base = OTHER; note = S-phosphorothioate
  modified_base 8: mod_base = OTHER; note = 2-fluororibose guanine
  modified_base 8..9: mod_base = OTHER; note = S-phosphorothioate
  modified_base 9: mod_base = cm
  modified_base 10: mod_base = OTHER; note = 2-fluororibose adenine
  modified_base 11: mod_base = OTHER; note = 2-O-methylribose adenine
  modified_base 12: mod_base = gm
  modified_base 13: mod_base = OTHER; note = 2-O-methylribose adenine
  modified_base 14: mod_base = OTHER; note = 2-fluororibose adenine
  modified_base 15: mod_base = cm
  modified_base 16: mod_base = OTHER; note = 2-fluororibose adenine
  modified_base 17: mod_base = cm
  modified_base 18: mod_base = OTHER; note = 2-fluororibose uracil
  modified_base 19: mod_base = gm
  modified_base 20: mod_base = OTHER; note = 2-fluororibose uracil
  modified_base 21: mod_base = um
  modified_base 21..22: mod_base = OTHER; note = S-phosphorothioate
  modified_base 22: mod_base = um
  modified_base 22..23: mod_base = OTHER; note = S-phosphorothioate
  modified_base 23: mod_base = um
  source 1..23: mol_type = other RNA
ttatagagcaagaacactgtttt

SEQ ID NO: 466 - RNA, 23 nt, synthetic construct
  misc_feature 1..23: note = Synthetic: WV-37179
  misc_feature 1..23: note = Synthetic: SSR-0103296
  modified_base 1: mod_base = um
  modified_base 1..2: mod_base = OTHER; note = S-phosphorothioate
  modified_base 2: mod_base = OTHER; note = 2-fluororibose uracil
  modified_base 2..3: mod_base = OTHER; note = S-phosphorothioate
  modified_base 3: mod_base = OTHER; note = 2-O-methylribose adenine
  modified_base 3..4: mod_base = OTHER; note = R-phosphorothioate
  modified_base 4: mod_base = OTHER; note = 2-fluororibose uracil
  modified_base 4..5: mod_base = OTHER; note = R-phosphorothioate
  modified_base 5: mod_base = OTHER; note = 2-O-methylribose adenine
  modified_base 5..6: mod_base = OTHER; note = S-phosphorothioate
  modified_base 6: mod_base = OTHER; note = 2-fluororibose guanine
  modified_base 6..7: mod_base = OTHER; note = R-phosphorothioate
  modified_base 7: mod_base = OTHER; note = 2-O-methylribose adenine
  modified_base 7..8: mod_base = OTHER; note = R-phosphorothioate
  modified_base 8: mod_base = OTHER; note = 2-fluororibose guanine
  modified_base 8..9: mod_base = OTHER; note = R-phosphorothioate
  modified_base 9: mod_base = cm
  modified_base 10: mod_base = OTHER; note = 2-fluororibose adenine
  modified_base 11: mod_base = OTHER; note = 2-O-methylribose adenine
  modified_base 12: mod_base = gm
  modified_base 13: mod_base = OTHER; note = 2-O-methylribose adenine
  modified_base 14: mod_base = OTHER; note = 2-fluororibose adenine
  modified_base 15: mod_base = cm
  modified_base 16: mod_base = OTHER; note = 2-fluororibose adenine
  modified_base 17: mod_base = cm
  modified_base 18: mod_base = OTHER; note = 2-fluororibose uracil
  modified_base 19: mod_base = gm
  modified_base 20: mod_base = OTHER; note = 2-fluororibose uracil
  modified_base 21: mod_base = um
  modified_base 21..22: mod_base = OTHER; note = S-phosphorothioate
  modified_base 22: mod_base = um
  modified_base 22..23: mod_base = OTHER; note = S-phosphorothioate
  modified_base 23: mod_base = um
  source 1..23: mol_type = other RNA
ttatagagcaagaacactgtttt

SEQ ID NO: 467 - RNA, 23 nt, synthetic construct
  misc_feature 1..23: note = Synthetic: WV-37180
  misc_feature 1..23: note = Synthetic: SSR-0103297
  modified_base 1: mod_base = um
  modified_base 1..2: mod_base = OTHER; note = S-phosphorothioate
  modified_base 2: mod_base = OTHER; note = 2-fluororibose uracil
  modified_base 2..3: mod_base = OTHER; note = S-phosphorothioate
  modified_base 3: mod_base = OTHER; note = 2-O-methylribose adenine
  modified_base 3..4: mod_base = OTHER; note = R-phosphorothioate
  modified_base 4: mod_base = OTHER; note = 2-fluororibose uracil
  modified_base 4..5: mod_base = OTHER; note = R-phosphorothioate
  modified_base 5: mod_base = OTHER; note = 2-O-methylribose adenine
  modified_base 5..6: mod_base = OTHER; note = S-phosphorothioate
  modified_base 6: mod_base = OTHER; note = 2-fluororibose guanine
  modified_base 6..7: mod_base = OTHER; note = R-phosphorothioate
  modified_base 7: mod_base = OTHER; note = 2-O-methylribose adenine
  modified_base 7..8: mod_base = OTHER; note = R-phosphorothioate
  modified_base 8: mod_base = OTHER; note = 2-fluororibose guanine
  modified_base 8..9: mod_base = OTHER; note = S-phosphorothioate
  modified_base 9: mod_base = cm
  modified_base 10: mod_base = OTHER; note = 2-fluororibose adenine
  modified_base 11: mod_base = OTHER; note = 2-O-methylribose adenine
  modified_base 12: mod_base = gm
  modified_base 13: mod_base = OTHER; note = 2-O-methylribose adenine
  modified_base 14: mod_base = OTHER; note = 2-fluororibose adenine
  modified_base 15: mod_base = cm
  modified_base 16: mod_base = OTHER; note = 2-fluororibose adenine
  modified_base 17: mod_base = cm
  modified_base 18: mod_base = OTHER; note = 2-fluororibose uracil
  modified_base 19: mod_base = gm
  modified_base 20: mod_base = OTHER; note = 2-fluororibose uracil
  modified_base 21: mod_base = um
  modified_base 21..22: mod_base = OTHER; note = S-phosphorothioate
  modified_base 22: mod_base = um
  modified_base 22..23: mod_base = OTHER; note = S-phosphorothioate
  modified_base 23: mod_base = um
  source 1..23: mol_type = other RNA
ttatagagcaagaacactgtttt

SEQ ID NO: 468 - RNA, 23 nt, synthetic construct
  misc_feature 1..23: note = Synthetic: WV-37181
  misc_feature 1..23: note = Synthetic: SSR-0103298
  modified_base 1: mod_base = um
  modified_base 1..2: mod_base = OTHER; note = S-phosphorothioate
  modified_base 2: mod_base = OTHER; note = 2-fluororibose uracil
  modified_base 2..3: mod_base = OTHER; note = S-phosphorothioate
  modified_base 3: mod_base = OTHER; note = 2-O-methylribose adenine
  modified_base 3..4: mod_base = OTHER; note = R-phosphorothioate
  modified_base 4: mod_base = OTHER; note = 2-fluororibose uracil
  modified_base 4..5: mod_base = OTHER; note = R-phosphorothioate
  modified_base 5: mod_base = OTHER; note = 2-O-methylribose adenine
  modified_base 5..6: mod_base = OTHER; note = S-phosphorothioate
  modified_base 6: mod_base = OTHER; note = 2-fluororibose guanine
  modified_base 6..7: mod_base = OTHER; note = R-phosphorothioate
  modified_base 7: mod_base = OTHER; note = 2-O-methylribose adenine
  modified_base 7..8: mod_base = OTHER; note = S-phosphorothioate
  modified_base 8: mod_base = OTHER; note = 2-fluororibose guanine
  modified_base 8..9: mod_base = OTHER; note = R-phosphorothioate
  modified_base 9: mod_base = cm
  modified_base 10: mod_base = OTHER; note = 2-fluororibose adenine
  modified_base 11: mod_base = OTHER; note = 2-O-methylribose adenine
  modified_base 12: mod_base = gm
  modified_base 13: mod_base = OTHER; note = 2-O-methylribose adenine
  modified_base 14: mod_base = OTHER; note = 2-fluororibose adenine
  modified_base 15: mod_base = cm
  modified_base 16: mod_base = OTHER; note = 2-fluororibose adenine
  modified_base 17: mod_base = cm
  modified_base 18: mod_base = OTHER; note = 2-fluororibose uracil
  modified_base 19: mod_base = gm
  modified_base 20: mod_base = OTHER; note = 2-fluororibose uracil
  modified_base 21: mod_base = um
  modified_base 21..22: mod_base = OTHER; note = S-phosphorothioate
  modified_base 22: mod_base = um
  modified_base 22..23: mod_base = OTHER; note = S-phosphorothioate
  modified_base 23: mod_base = um
  source 1..23: mol_type = other RNA
ttatagagcaagaacactgtttt

SEQ ID NO: 469 - RNA, 23 nt, synthetic construct
  misc_feature 1..23: note = Synthetic: WV-37182
  misc_feature 1..23: note = Synthetic: SSR-0103299
  modified_base 1: mod_base = um
  modified_base 1..2: mod_base = OTHER; note = S-phosphorothioate
  modified_base 2: mod_base = OTHER; note = 2-fluororibose uracil
  modified_base 2..3: mod_base = OTHER; note = S-phosphorothioate
  modified_base 3: mod_base = OTHER; note = 2-O-methylribose adenine
  modified_base 3..4: mod_base = OTHER; note = R-phosphorothioate
  modified_base 4: mod_base = OTHER; note = 2-fluororibose uracil
  modified_base 4..5: mod_base = OTHER; note = R-phosphorothioate
  modified_base 5: mod_base = OTHER; note = 2-O-methylribose adenine
  modified_base 5..6: mod_base = OTHER; note = S-phosphorothioate
  modified_base 6: mod_base = OTHER; note = 2-fluororibose guanine
  modified_base 6..7: mod_base = OTHER; note = R-phosphorothioate
  modified_base 7: mod_base = OTHER; note = 2-O-methylribose adenine
  modified_base 7..8: mod_base = OTHER; note = S-phosphorothioate
  modified_base 8: mod_base = OTHER; note = 2-fluororibose guanine
  modified_base 8..9: mod_base = OTHER; note = S-phosphorothioate
  modified_base 9: mod_base = cm
  modified_base 10: mod_base = OTHER; note = 2-fluororibose adenine
  modified_base 11: mod_base = OTHER; note = 2-O-methylribose adenine
  modified_base 12: mod_base = gm
  modified_base 13: mod_base = OTHER; note = 2-O-methylribose adenine
  modified_base 14: mod_base = OTHER; note = 2-fluororibose adenine
  modified_base 15: mod_base = cm
  modified_base 16: mod_base = OTHER; note = 2-fluororibose adenine
  modified_base 17: mod_base = cm
  modified_base 18: mod_base = OTHER; note = 2-fluororibose uracil
  modified_base 19: mod_base = gm
  modified_base 20: mod_base = OTHER; note = 2-fluororibose uracil
  modified_base 21: mod_base = um
  modified_base 21..22: mod_base = OTHER; note = S-phosphorothioate
  modified_base 22: mod_base = um
  modified_base 22..23: mod_base = OTHER; note = S-phosphorothioate
  modified_base 23: mod_base = um
  source 1..23: mol_type = other RNA
ttatagagcaagaacactgtttt

SEQ ID NO: 470 - RNA, 23 nt, synthetic construct
  misc_feature 1..23: note = Synthetic: WV-37183
  misc_feature 1..23: note = Synthetic: SSR-0103300
  modified_base 1: mod_base = um
  modified_base 1..2: mod_base = OTHER; note = S-phosphorothioate
  modified_base 2: mod_base = OTHER; note = 2-fluororibose uracil
  modified_base 2..3: mod_base = OTHER; note = S-phosphorothioate
  modified_base 3: mod_base = OTHER; note = 2-O-methylribose adenine
  modified_base 3..4: mod_base = OTHER; note = R-phosphorothioate
  modified_base 4: mod_base = OTHER; note = 2-fluororibose uracil
  modified_base 4..5: mod_base = OTHER; note = R-phosphorothioate
  modified_base 5: mod_base = OTHER; note = 2-O-methylribose adenine
  modified_base 5..6: mod_base = OTHER; note = S-phosphorothioate
  modified_base 6: mod_base = OTHER; note = 2-fluororibose guanine
  modified_base 6..7: mod_base = OTHER; note = S-phosphorothioate
  modified_base 7: mod_base = OTHER; note = 2-O-methylribose adenine
  modified_base 7..8: mod_base = OTHER; note = R-phosphorothioate
  modified_base 8: mod_base = OTHER; note = 2-fluororibose guanine
  modified_base 8..9: mod_base = OTHER; note = R-phosphorothioate
  modified_base 9: mod_base = cm
  modified_base 10: mod_base = OTHER; note = 2-fluororibose adenine
  modified_base 11: mod_base = OTHER; note = 2-O-methylribose adenine
  modified_base 12: mod_base = gm
  modified_base 13: mod_base = OTHER; note = 2-O-methylribose adenine
  modified_base 14: mod_base = OTHER; note = 2-fluororibose adenine
  modified_base 15: mod_base = cm
  modified_base 16: mod_base = OTHER; note = 2-fluororibose adenine
  modified_base 17: mod_base = cm
  modified_base 18: mod_base = OTHER; note = 2-fluororibose uracil
  modified_base 19: mod_base = gm
  modified_base 20: mod_base = OTHER; note = 2-fluororibose uracil
  modified_base 21: mod_base = um
  modified_base 21..22: mod_base = OTHER; note = S-phosphorothioate
  modified_base 22: mod_base = um
  modified_base 22..23: mod_base = OTHER; note = S-phosphorothioate
  modified_base 23: mod_base = um
  source 1..23: mol_type = other RNA
ttatagagcaagaacactgtttt

SEQ ID NO: 471 - RNA, 23 nt, synthetic construct
  misc_feature 1..23: note = Synthetic: WV-37184
  misc_feature 1..23: note = Synthetic: SSR-0103301
  modified_base 1: mod_base = um
  modified_base 1..2: mod_base = OTHER; note = S-phosphorothioate
  modified_base 2: mod_base = OTHER; note = 2-fluororibose uracil
  modified_base 2..3: mod_base = OTHER; note = S-phosphorothioate
  modified_base 3: mod_base = OTHER; note = 2-O-methylribose adenine
  modified_base 3..4: mod_base = OTHER; note = R-phosphorothioate
  modified_base 4: mod_base = OTHER; note = 2-fluororibose uracil
  modified_base 4..5: mod_base = OTHER; note = R-phosphorothioate
  modified_base 5: mod_base = OTHER; note = 2-O-methylribose adenine
  modified_base 5..6: mod_base = OTHER; note = S-phosphorothioate
  modified_base 6: mod_base = OTHER; note = 2-fluororibose guanine
  modified_base 6..7: mod_base = OTHER; note = S-phosphorothioate
  modified_base 7: mod_base = OTHER; note = 2-O-methylribose adenine
  modified_base 7..8: mod_base = OTHER; note = R-phosphorothioate
  modified_base 8: mod_base = OTHER; note = 2-fluororibose guanine
  modified_base 8..9: mod_base = OTHER; note = S-phosphorothioate
  modified_base 9: mod_base = cm
  modified_base 10: mod_base = OTHER; note = 2-fluororibose adenine
  modified_base 11: mod_base = OTHER; note = 2-O-methylribose adenine
  modified_base 12: mod_base = gm
  modified_base 13: mod_base = OTHER; note = 2-O-methylribose adenine
  modified_base 14: mod_base = OTHER; note = 2-fluororibose adenine
  modified_base 15: mod_base = cm
  modified_base 16: mod_base = OTHER; note = 2-fluororibose adenine
  modified_base 17: mod_base = cm
  modified_base 18: mod_base = OTHER; note = 2-fluororibose uracil
  modified_base 19: mod_base = gm
  modified_base 20: mod_base = OTHER; note = 2-fluororibose uracil
  modified_base 21: mod_base = um
  modified_base 21..22: mod_base = OTHER; note = S-phosphorothioate
  modified_base 22: mod_base = um
  modified_base 22..23: mod_base = OTHER; note = S-phosphorothioate
  modified_base 23: mod_base = um
  source 1..23: mol_type = other RNA
ttatagagcaagaacactgtttt

SEQ ID NO: 472 - RNA, 23 nt, synthetic construct
  misc_feature 1..23: note = Synthetic: WV-37185
  misc_feature 1..23: note = Synthetic: SSR-0103302
  modified_base 1: mod_base = um
  modified_base 1..2: mod_base = OTHER; note = S-phosphorothioate
  modified_base 2: mod_base = OTHER; note = 2-fluororibose uracil
  modified_base 2..3: mod_base = OTHER; note = S-phosphorothioate
  modified_base 3: mod_base = OTHER; note = 2-O-methylribose adenine
  modified_base 3..4: mod_base = OTHER; note = R-phosphorothioate
  modified_base 4: mod_base = OTHER; note = 2-fluororibose uracil
  modified_base 4..5: mod_base = OTHER; note = R-phosphorothioate
  modified_base 5: mod_base = OTHER; note = 2-O-methylribose adenine
  modified_base 5..6: mod_base = OTHER; note = S-phosphorothioate
  modified_base 6: mod_base = OTHER; note = 2-fluororibose guanine
  modified_base 6..7: mod_base = OTHER; note = S-phosphorothioate
  modified_base 7: mod_base = OTHER; note = 2-O-methylribose adenine
  modified_base 7..8: mod_base = OTHER; note = S-phosphorothioate
  modified_base 8: mod_base = OTHER; note = 2-fluororibose guanine
  modified_base 8..9: mod_base = OTHER; note = R-phosphorothioate
  modified_base 9: mod_base = cm
  modified_base 10: mod_base = OTHER; note = 2-fluororibose adenine
  modified_base 11: mod_base = OTHER; note = 2-O-methylribose adenine
  modified_base 12: mod_base = gm
  modified_base 13: mod_base = OTHER; note = 2-O-methylribose adenine
  modified_base 14: mod_base = OTHER; note = 2-fluororibose adenine
  modified_base 15: mod_base = cm
  modified_base 16: mod_base = OTHER; note = 2-fluororibose adenine
  modified_base 17: mod_base = cm
  modified_base 18: mod_base = OTHER; note = 2-fluororibose uracil
  modified_base 19: mod_base = gm
  modified_base 20: mod_base = OTHER; note = 2-fluororibose uracil
  modified_base 21: mod_base = um
  modified_base 21..22: mod_base = OTHER; note = S-phosphorothioate
  modified_base 22: mod_base = um
  modified_base 22..23: mod_base = OTHER; note = S-phosphorothioate
  modified_base 23: mod_base = um
  source 1..23: mol_type = other RNA
ttatagagcaagaacactgtttt

SEQ ID NO: 473 - RNA, 23 nt, synthetic construct
  misc_feature 1..23: note = Synthetic: WV-37186
  misc_feature 1..23: note = Synthetic: SSR-0103303
  modified_base 1: mod_base = um
  modified_base 1..2: mod_base = OTHER; note = S-phosphorothioate
  modified_base 2: mod_base = OTHER; note = 2-fluororibose uracil
  modified_base 2..3: mod_base = OTHER; note = S-phosphorothioate
  modified_base 3: mod_base = OTHER; note = 2-O-methylribose adenine
  modified_base 3..4: mod_base = OTHER; note = R-phosphorothioate
  modified_base 4: mod_base = OTHER; note = 2-fluororibose uracil
  modified_base 4..5: mod_base = OTHER; note = R-phosphorothioate
  modified_base 5: mod_base = OTHER; note = 2-O-methylribose adenine
  modified_base 5..6: mod_base = OTHER; note = S-phosphorothioate
  modified_base 6: mod_base = OTHER; note = 2-fluororibose guanine
  modified_base 6..7: mod_base = OTHER; note = S-phosphorothioate
  modified_base 7: mod_base = OTHER; note = 2-O-methylribose adenine
  modified_base 7..8: mod_base = OTHER; note = S-phosphorothioate
  modified_base 8: mod_base = OTHER; note = 2-fluororibose guanine
  modified_base 8..9: mod_base = OTHER; note = S-phosphorothioate
  modified_base 9: mod_base = cm
  modified_base 10: mod_base = OTHER; note = 2-fluororibose adenine
  modified_base 11: mod_base = OTHER; note = 2-O-methylribose adenine
  modified_base 12: mod_base = gm
  modified_base 13: mod_base = OTHER; note = 2-O-methylribose adenine
  modified_base 14: mod_base = OTHER; note = 2-fluororibose adenine
  modified_base 15: mod_base = cm
  modified_base 16: mod_base = OTHER; note = 2-fluororibose adenine
  modified_base 17: mod_base = cm
  modified_base 18: mod_base = OTHER; note = 2-fluororibose uracil
  modified_base 19: mod_base = gm
  modified_base 20: mod_base = OTHER; note = 2-fluororibose uracil
  modified_base 21: mod_base = um
  modified_base 21..22: mod_base = OTHER; note = S-phosphorothioate
  modified_base 22: mod_base = um
  modified_base 22..23: mod_base = OTHER; note = S-phosphorothioate
  modified_base 23: mod_base = um
  source 1..23: mol_type = other RNA
ttatagagcaagaacactgtttt

SEQ ID NO: 474 - RNA, 23 nt, synthetic construct
  misc_feature 1..23: note = Synthetic: WV-37187
  misc_feature 1..23: note = Synthetic: SSR-0103304
  modified_base 1: mod_base = um
  modified_base 1..2: mod_base = OTHER; note = S-phosphorothioate
  modified_base 2: mod_base = OTHER; note = 2-fluororibose uracil
  modified_base 2..3: mod_base = OTHER; note = S-phosphorothioate
  modified_base 3: mod_base = OTHER; note = 2-O-methylribose adenine
  modified_base 3..4: mod_base = OTHER; note = R-phosphorothioate
  modified_base 4: mod_base = OTHER; note = 2-fluororibose uracil
  modified_base 4..5: mod_base = OTHER; note = S-phosphorothioate
  modified_base 5: mod_base = OTHER; note = 2-O-methylribose adenine
  modified_base 5..6: mod_base = OTHER; note = R-phosphorothioate
  modified_base 6: mod_base = OTHER; note = 2-fluororibose guanine
  modified_base 6..7: mod_base = OTHER; note = R-phosphorothioate
  modified_base 7: mod_base = OTHER; note = 2-O-methylribose adenine
  modified_base 7..8: mod_base = OTHER; note = R-phosphorothioate
  modified_base 8: mod_base = OTHER; note = 2-fluororibose guanine
  modified_base 8..9: mod_base = OTHER; note = R-phosphorothioate
  modified_base 9: mod_base = cm
  modified_base 10: mod_base = OTHER; note = 2-fluororibose adenine
  modified_base 11: mod_base = OTHER; note = 2-O-methylribose adenine
  modified_base 12: mod_base = gm
  modified_base 13: mod_base = OTHER; note = 2-O-methylribose adenine
  modified_base 14: mod_base = OTHER; note = 2-fluororibose adenine
  modified_base 15: mod_base = cm
  modified_base 16: mod_base = OTHER; note = 2-fluororibose adenine
  modified_base 17: mod_base = cm
  modified_base 18: mod_base = OTHER; note = 2-fluororibose uracil
  modified_base 19: mod_base = gm
  modified_base 20: mod_base = OTHER; note = 2-fluororibose uracil
  modified_base 21: mod_base = um
  modified_base 21..22: mod_base = OTHER; note = S-phosphorothioate
  modified_base 22: mod_base = um
  modified_base 22..23: mod_base = OTHER; note = S-phosphorothioate
  modified_base 23: mod_base = um
  source 1..23: mol_type = other RNA
ttatagagcaagaacactgtttt

SEQ ID NO: 475 - RNA, 23 nt, synthetic construct
  misc_feature 1..23: note = Synthetic: WV-37188
  misc_feature 1..23: note = Synthetic: SSR-0103305
  modified_base 1: mod_base = um
  modified_base 1..2: mod_base = OTHER; note = S-phosphorothioate
  modified_base 2: mod_base = OTHER; note = 2-fluororibose uracil
  modified_base 2..3: mod_base = OTHER; note = S-phosphorothioate
  modified_base 3: mod_base = OTHER; note = 2-O-methylribose adenine
  modified_base 3..4: mod_base = OTHER; note = R-phosphorothioate
  modified_base 4: mod_base = OTHER; note = 2-fluororibose uracil
  modified_base 4..5: mod_base = OTHER; note = S-phosphorothioate
  modified_base 5: mod_base = OTHER; note = 2-O-methylribose adenine
  modified_base 5..6: mod_base = OTHER; note = R-phosphorothioate
  modified_base 6: mod_base = OTHER; note = 2-fluororibose guanine
  modified_base 6..7: mod_base = OTHER; note = R-phosphorothioate
  modified_base 7: mod_base = OTHER; note = 2-O-methylribose adenine
  modified_base 7..8: mod_base = OTHER; note = R-phosphorothioate
  modified_base 8: mod_base = OTHER; note = 2-fluororibose guanine
  modified_base 8..9: mod_base = OTHER; note = S-phosphorothioate
  modified_base 9: mod_base = cm
  modified_base 10: mod_base = OTHER; note = 2-fluororibose adenine
  modified_base 11: mod_base = OTHER; note = 2-O-methylribose adenine
  modified_base 12: mod_base = gm
  modified_base 13: mod_base = OTHER; note = 2-O-methylribose adenine
  modified_base 14: mod_base = OTHER; note = 2-fluororibose adenine
  modified_base 15: mod_base = cm
  modified_base 16: mod_base = OTHER; note = 2-fluororibose adenine
  modified_base 17: mod_base = cm
  modified_base 18: mod_base = OTHER; note = 2-fluororibose uracil
  modified_base 19: mod_base = gm
  modified_base 20: mod_base = OTHER; note = 2-fluororibose uracil
  modified_base 21: mod_base = um
  modified_base 21..22: mod_base = OTHER; note = S-phosphorothioate
  modified_base 22: mod_base = um
  modified_base 22..23: mod_base = OTHER; note = S-phosphorothioate
  modified_base 23: mod_base = um
  source 1..23: mol_type = other RNA
ttatagagcaagaacactgtttt

SEQ ID NO: 476 - RNA, 23 nt, synthetic construct
  misc_feature 1..23: note = Synthetic: WV-37189
  misc_feature 1..23: note = Synthetic: SSR-0103306
  modified_base 1: mod_base = um
  modified_base 1..2: mod_base = OTHER; note = S-phosphorothioate
  modified_base 2: mod_base = OTHER; note = 2-fluororibose uracil
  modified_base 2..3: mod_base = OTHER; note = S-phosphorothioate
  modified_base 3: mod_base = OTHER; note = 2-O-methylribose adenine
  modified_base 3..4: mod_base = OTHER; note = R-phosphorothioate
  modified_base 4: mod_base = OTHER; note = 2-fluororibose uracil
  modified_base 4..5: mod_base = OTHER; note = S-phosphorothioate
  modified_base 5: mod_base = OTHER; note = 2-O-methylribose adenine
  modified_base 5..6: mod_base = OTHER; note = R-phosphorothioate
  modified_base 6: mod_base = OTHER; note = 2-fluororibose guanine
  modified_base 6..7: mod_base = OTHER; note = R-phosphorothioate
  modified_base 7: mod_base = OTHER; note = 2-O-methylribose adenine
  modified_base 7..8: mod_base = OTHER; note = S-phosphorothioate
  modified_base 8: mod_base = OTHER; note = 2-fluororibose guanine
  modified_base 8..9: mod_base = OTHER; note = R-phosphorothioate
  modified_base 9: mod_base = cm
  modified_base 10: mod_base = OTHER; note = 2-fluororibose adenine
  modified_base 11: mod_base = OTHER; note = 2-O-methylribose adenine
  modified_base 12: mod_base = gm
  modified_base 13: mod_base = OTHER; note = 2-O-methylribose adenine
  modified_base 14: mod_base = OTHER; note = 2-fluororibose adenine
  modified_base 15: mod_base = cm
  modified_base 16: mod_base = OTHER; note = 2-fluororibose adenine
  modified_base 17: mod_base = cm
  modified_base 18: mod_base = OTHER; note = 2-fluororibose uracil
  modified_base 19: mod_base = gm
  modified_base 20: mod_base = OTHER; note = 2-fluororibose uracil
  modified_base 21: mod_base = um
  modified_base 21..22: mod_base = OTHER; note = S-phosphorothioate
  modified_base 22: mod_base = um
  modified_base 22..23: mod_base = OTHER; note = S-phosphorothioate
  modified_base 23: mod_base = um
  source 1..23: mol_type = other RNA
ttatagagcaagaacactgtttt

SEQ ID NO: 477 - RNA, 23 nt, synthetic construct
  misc_feature 1..23: note = Synthetic: WV-37190
  misc_feature 1..23: note = Synthetic: SSR-0103307
  modified_base 1: mod_base = um
  modified_base 1..2: mod_base = OTHER; note = S-phosphorothioate
  modified_base 2: mod_base = OTHER; note = 2-fluororibose uracil
  modified_base 2..3: mod_base = OTHER; note = S-phosphorothioate
  modified_base 3: mod_base = OTHER; note = 2-O-methylribose adenine
  modified_base 3..4: mod_base = OTHER; note = R-phosphorothioate
  modified_base 4: mod_base = OTHER; note = 2-fluororibose uracil
  modified_base 4..5: mod_base = OTHER; note = S-phosphorothioate
  modified_base 5: mod_base = OTHER; note = 2-O-methylribose adenine
  modified_base 5..6: mod_base = OTHER; note = R-phosphorothioate
  modified_base 6: mod_base = OTHER; note = 2-fluororibose guanine
  modified_base 6..7: mod_base = OTHER; note = R-phosphorothioate
  modified_base 7: mod_base = OTHER; note = 2-O-methylribose adenine
  modified_base 7..8: mod_base = OTHER; note = S-phosphorothioate
  modified_base 8: mod_base = OTHER; note = 2-fluororibose guanine
  modified_base 8..9: mod_base = OTHER; note = S-phosphorothioate
  modified_base 9: mod_base = cm
  modified_base 10: mod_base = OTHER; note = 2-fluororibose adenine
  modified_base 11: mod_base = OTHER; note = 2-O-methylribose adenine
  modified_base 12: mod_base = gm
  modified_base 13: mod_base = OTHER; note = 2-O-methylribose adenine
  modified_base 14: mod_base = OTHER; note = 2-fluororibose adenine
  modified_base 15: mod_base = cm
  modified_base 16: mod_base = OTHER; note = 2-fluororibose adenine
  modified_base 17: mod_base = cm
  modified_base 18: mod_base = OTHER; note = 2-fluororibose uracil
  modified_base 19: mod_base = gm
  modified_base 20: mod_base = OTHER; note = 2-fluororibose uracil
  modified_base 21: mod_base = um
  modified_base 21..22: mod_base = OTHER; note = S-phosphorothioate
  modified_base 22: mod_base = um
  modified_base 22..23: mod_base = OTHER; note = S-phosphorothioate
  modified_base 23: mod_base = um
  source 1..23: mol_type = other RNA
ttatagagcaagaacactgtttt

SEQ ID NO: 478 - RNA, 23 nt, synthetic construct
  misc_feature 1..23: note = Synthetic: WV-37191
  misc_feature 1..23: note = Synthetic: SSR-0103308
  modified_base 1: mod_base = um
  modified_base 1..2: mod_base = OTHER; note = S-phosphorothioate
  modified_base 2: mod_base = OTHER; note = 2-fluororibose uracil
  modified_base 2..3: mod_base = OTHER; note = S-phosphorothioate
  modified_base 3: mod_base = OTHER; note = 2-O-methylribose adenine
  modified_base 3..4: mod_base = OTHER; note = R-phosphorothioate
  modified_base 4: mod_base = OTHER; note = 2-fluororibose uracil
  modified_base 4..5: mod_base = OTHER; note = S-phosphorothioate
  modified_base 5: mod_base = OTHER; note = 2-O-methylribose adenine
  modified_base 5..6: mod_base = OTHER; note = R-phosphorothioate
  modified_base 6: mod_base = OTHER; note = 2-fluororibose guanine
  modified_base 6..7: mod_base = OTHER; note = S-phosphorothioate
  modified_base 7: mod_base = OTHER; note = 2-O-methylribose adenine
  modified_base 7..8: mod_base = OTHER; note = R-phosphorothioate
  modified_base 8: mod_base = OTHER; note = 2-fluororibose guanine
  modified_base 8..9: mod_base = OTHER; note = R-phosphorothioate
  modified_base 9: mod_base = cm
  modified_base 10: mod_base = OTHER; note = 2-fluororibose adenine
  modified_base 11: mod_base = OTHER; note = 2-O-methylribose adenine
  modified_base 12: mod_base = gm
  modified_base 13: mod_base = OTHER; note = 2-O-methylribose adenine
  modified_base 14: mod_base = OTHER; note = 2-fluororibose adenine
  modified_base 15: mod_base = cm
  modified_base 16: mod_base = OTHER; note = 2-fluororibose adenine
  modified_base 17: mod_base = cm
  modified_base 18: mod_base = OTHER; note = 2-fluororibose uracil
  modified_base 19: mod_base = gm
  modified_base 20: mod_base = OTHER; note = 2-fluororibose uracil
  modified_base 21: mod_base = um
  modified_base 21..22: mod_base = OTHER; note = S-phosphorothioate
  modified_base 22: mod_base = um
  modified_base 22..23: mod_base = OTHER; note = S-phosphorothioate
  modified_base 23: mod_base = um
  source 1..23: mol_type = other RNA
ttatagagcaagaacactgtttt

SEQ ID NO: 479 - RNA, 23 nt, synthetic construct
  misc_feature 1..23: note = Synthetic: WV-37192
  misc_feature 1..23: note = Synthetic: SSR-0103309
  modified_base 1: mod_base = um
  modified_base 1..2: mod_base = OTHER; note = S-phosphorothioate
  modified_base 2: mod_base = OTHER; note = 2-fluororibose uracil
  modified_base 2..3: mod_base = OTHER; note = S-phosphorothioate
  modified_base 3: mod_base = OTHER; note = 2-O-methylribose adenine
  modified_base 3..4: mod_base = OTHER; note = R-phosphorothioate
  modified_base 4: mod_base = OTHER; note = 2-fluororibose uracil
  modified_base 4..5: mod_base = OTHER; note = S-phosphorothioate
  modified_base 5: mod_base = OTHER; note = 2-O-methylribose adenine
  modified_base 5..6: mod_base = OTHER; note = R-phosphorothioate
  modified_base 6: mod_base = OTHER; note = 2-fluororibose guanine
  modified_base 6..7: mod_base = OTHER; note = S-phosphorothioate
  modified_base 7: mod_base = OTHER; note = 2-O-methylribose adenine
  modified_base 7..8: mod_base = OTHER; note = R-phosphorothioate
  modified_base 8: mod_base = OTHER; note = 2-fluororibose guanine
  modified_base 8..9: mod_base = OTHER; note = S-phosphorothioate
  modified_base 9: mod_base = cm
  modified_base 10: mod_base = OTHER; note = 2-fluororibose adenine
  modified_base 11: mod_base = OTHER; note = 2-O-methylribose adenine
  modified_base 12: mod_base = gm
  modified_base 13: mod_base = OTHER; note = 2-O-methylribose adenine
  modified_base 14: mod_base = OTHER; note = 2-fluororibose adenine
  modified_base 15: mod_base = cm
  modified_base 16: mod_base = OTHER; note = 2-fluororibose adenine
  modified_base 17: mod_base = cm
  modified_base 18: mod_base = OTHER; note = 2-fluororibose uracil
  modified_base 19: mod_base = gm
  modified_base 20: mod_base = OTHER; note = 2-fluororibose uracil
  modified_base 21: mod_base = um
  modified_base 21..22: mod_base = OTHER; note = S-phosphorothioate
  modified_base 22: mod_base = um
  modified_base 22..23: mod_base = OTHER; note = S-phosphorothioate
  modified_base 23: mod_base = um
  source 1..23: mol_type = other RNA
ttatagagcaagaacactgtttt

SEQ ID NO: 480 - RNA, 23 nt, synthetic construct
  misc_feature 1..23: note = Synthetic: WV-37193
  misc_feature 1..23: note = Synthetic: SSR-0103310
  modified_base 1: mod_base = um
  modified_base 1..2: mod_base = OTHER; note = S-phosphorothioate
  modified_base 2: mod_base = OTHER; note = 2-fluororibose uracil
  modified_base 2..3: mod_base = OTHER; note = S-phosphorothioate
  modified_base 3: mod_base = OTHER; note = 2-O-methylribose adenine
  modified_base 3..4: mod_base = OTHER; note = R-phosphorothioate
  modified_base 4: mod_base = OTHER; note = 2-fluororibose uracil
  modified_base 4..5: mod_base = OTHER; note = S-phosphorothioate
  modified_base 5: mod_base = OTHER; note = 2-O-methylribose adenine
  modified_base 5..6: mod_base = OTHER; note = R-phosphorothioate
  modified_base 6: mod_base = OTHER; note = 2-fluororibose guanine
  modified_base 6..7: mod_base = OTHER; note = S-phosphorothioate
  modified_base 7: mod_base = OTHER; note = 2-O-methylribose adenine
  modified_base 7..8: mod_base = OTHER; note = S-phosphorothioate
  modified_base 8: mod_base = OTHER; note = 2-fluororibose guanine
  modified_base 8..9: mod_base = OTHER; note = R-phosphorothioate
  modified_base 9: mod_base = cm
  modified_base 10: mod_base = OTHER; note = 2-fluororibose adenine
  modified_base 11: mod_base = OTHER; note = 2-O-methylribose adenine
  modified_base 12: mod_base = gm
  modified_base 13: mod_base = OTHER; note = 2-O-methylribose adenine
  modified_base 14: mod_base = OTHER; note = 2-fluororibose adenine
  modified_base 15: mod_base = cm
  modified_base 16: mod_base = OTHER; note = 2-fluororibose adenine
  modified_base 17: mod_base = cm
  modified_base 18: mod_base = OTHER; note = 2-fluororibose uracil
  modified_base 19: mod_base = gm
  modified_base 20: mod_base = OTHER; note = 2-fluororibose uracil
  modified_base 21: mod_base = um
  modified_base 21..22: mod_base = OTHER; note = S-phosphorothioate
  modified_base 22: mod_base = um
  modified_base 22..23: mod_base = OTHER; note = S-phosphorothioate
  modified_base 23: mod_base = um
  source 1..23: mol_type = other RNA
ttatagagcaagaacactgtttt

SEQ ID NO: 481 - RNA, 23 nt, synthetic construct
  misc_feature 1..23: note = Synthetic: WV-37194
  misc_feature 1..23: note = Synthetic: SSR-0103311
  modified_base 1: mod_base = um
  modified_base 1..2: mod_base = OTHER; note = S-phosphorothioate
  modified_base 2: mod_base = OTHER; note = 2-fluororibose uracil
  modified_base 2..3: mod_base = OTHER; note = S-phosphorothioate
  modified_base 3: mod_base = OTHER; note = 2-O-methylribose adenine
  modified_base 3..4: mod_base = OTHER; note = R-phosphorothioate
  modified_base 4: mod_base = OTHER; note = 2-fluororibose uracil
  modified_base 4..5: mod_base = OTHER; note = S-phosphorothioate
  modified_base 5: mod_base = OTHER; note = 2-O-methylribose adenine
  modified_base 5..6: mod_base = OTHER; note = R-phosphorothioate
  modified_base 6: mod_base = OTHER; note = 2-fluororibose guanine
  modified_base 6..7: mod_base = OTHER; note = S-phosphorothioate
  modified_base 7: mod_base = OTHER; note = 2-O-methylribose adenine
  modified_base 7..8: mod_base = OTHER; note = S-phosphorothioate
  modified_base 8: mod_base = OTHER; note = 2-fluororibose guanine
  modified_base 8..9: mod_base = OTHER; note = S-phosphorothioate
  modified_base 9: mod_base = cm
  modified_base 10: mod_base = OTHER; note = 2-fluororibose adenine
  modified_base 11: mod_base = OTHER; note = 2-O-methylribose adenine
  modified_base 12: mod_base = gm
  modified_base 13: mod_base = OTHER; note = 2-O-methylribose adenine
  modified_base 14: mod_base = OTHER; note = 2-fluororibose adenine
  modified_base 15: mod_base = cm
  modified_base 16: mod_base = OTHER; note = 2-fluororibose adenine
  modified_base 17: mod_base = cm
  modified_base 18: mod_base = OTHER; note = 2-fluororibose uracil
  modified_base 19: mod_base = gm
  modified_base 20: mod_base = OTHER; note = 2-fluororibose uracil
  modified_base 21: mod_base = um
  modified_base 21..22: mod_base = OTHER; note = S-phosphorothioate
  modified_base 22: mod_base = um
  modified_base 22..23: mod_base = OTHER; note = S-phosphorothioate
  modified_base 23: mod_base = um
  source 1..23: mol_type = other RNA
ttatagagcaagaacactgtttt

SEQ ID NO: 482 - RNA, 23 nt, synthetic construct
  misc_feature 1..23: note = Synthetic: WV-37195
  misc_feature 1..23: note = Synthetic: SSR-0103312
  modified_base 1: mod_base = um
  modified_base 1..2: mod_base = OTHER; note = S-phosphorothioate
  modified_base 2: mod_base = OTHER; note = 2-fluororibose uracil
  modified_base 2..3: mod_base = OTHER; note = S-phosphorothioate
  modified_base 3: mod_base = OTHER; note = 2-O-methylribose adenine
  modified_base 3..4: mod_base = OTHER; note = R-phosphorothioate
  modified_base 4: mod_base = OTHER; note = 2-fluororibose uracil
  modified_base 4..5: mod_base = OTHER; note = S-phosphorothioate
  modified_base 5: mod_base = OTHER; note = 2-O-methylribose adenine
  modified_base 5..6: mod_base = OTHER; note = S-phosphorothioate
  modified_base 6: mod_base = OTHER; note = 2-fluororibose guanine
  modified_base 6..7: mod_base = OTHER; note = R-phosphorothioate
  modified_base 7: mod_base = OTHER; note = 2-O-methylribose adenine
  modified_base 7..8: mod_base = OTHER; note = R-phosphorothioate
  modified_base 8: mod_base = OTHER; note = 2-fluororibose guanine
  modified_base 8..9: mod_base = OTHER; note = R-phosphorothioate
  modified_base 9: mod_base = cm
  modified_base 10: mod_base = OTHER; note = 2-fluororibose adenine
  modified_base 11: mod_base = OTHER; note = 2-O-methylribose adenine
  modified_base 12: mod_base = gm
  modified_base 13: mod_base = OTHER; note = 2-O-methylribose adenine
  modified_base 14: mod_base = OTHER; note = 2-fluororibose adenine
  modified_base 15: mod_base = cm
  modified_base 16: mod_base = OTHER; note = 2-fluororibose adenine
  modified_base 17: mod_base = cm
  modified_base 18: mod_base = OTHER; note = 2-fluororibose uracil
  modified_base 19: mod_base = gm
  modified_base 20: mod_base = OTHER; note = 2-fluororibose uracil
  modified_base 21: mod_base = um
  modified_base 21..22: mod_base = OTHER; note = S-phosphorothioate
  modified_base 22: mod_base = um
  modified_base 22..23: mod_base = OTHER; note = S-phosphorothioate
  modified_base 23: mod_base = um
  source 1..23: mol_type = other RNA
ttatagagcaagaacactgtttt

SEQ ID NO: 483 - RNA, 23 nt, synthetic construct
  misc_feature 1..23: note = Synthetic: WV-37196
  misc_feature 1..23: note = Synthetic: SSR-0103313
  modified_base 1: mod_base = um
  modified_base 1..2: mod_base = OTHER; note = S-phosphorothioate
  modified_base 2: mod_base = OTHER; note = 2-fluororibose uracil
  modified_base 2..3: mod_base = OTHER; note = S-phosphorothioate
  modified_base 3: mod_base = OTHER; note = 2-O-methylribose adenine
  modified_base 3..4: mod_base = OTHER; note = R-phosphorothioate
  modified_base 4: mod_base = OTHER; note = 2-fluororibose uracil
  modified_base 4..5: mod_base = OTHER; note = S-phosphorothioate
  modified_base 5: mod_base = OTHER; note = 2-O-methylribose adenine
  modified_base 5..6: mod_base = OTHER; note = S-phosphorothioate
  modified_base 6: mod_base = OTHER; note = 2-fluororibose guanine
  modified_base 6..7: mod_base = OTHER; note = R-phosphorothioate
  modified_base 7: mod_base = OTHER; note = 2-O-methylribose adenine
  modified_base 7..8: mod_base = OTHER; note = R-phosphorothioate
  modified_base 8: mod_base = OTHER; note = 2-fluororibose guanine
  modified_base 8..9: mod_base = OTHER; note = S-phosphorothioate
  modified_base 9: mod_base = cm
  modified_base 10: mod_base = OTHER; note = 2-fluororibose adenine
  modified_base 11: mod_base = OTHER; note = 2-O-methylribose adenine
  modified_base 12: mod_base = gm
  modified_base 13: mod_base = OTHER; note = 2-O-methylribose adenine
  modified_base 14: mod_base = OTHER; note = 2-fluororibose adenine
  modified_base 15: mod_base = cm
  modified_base 16: mod_base = OTHER; note = 2-fluororibose adenine
  modified_base 17: mod_base = cm
  modified_base 18: mod_base = OTHER; note = 2-fluororibose uracil
  modified_base 19: mod_base = gm
  modified_base 20: mod_base = OTHER; note = 2-fluororibose uracil
  modified_base 21: mod_base = um
  modified_base 21..22: mod_base = OTHER; note = S-phosphorothioate
  modified_base 22: mod_base = um
  modified_base 22..23: mod_base = OTHER; note = S-phosphorothioate
  modified_base 23: mod_base = um
  source 1..23: mol_type = other RNA
ttatagagcaagaacactgtttt

SEQ ID NO: 484 - RNA, 23 nt, synthetic construct
  misc_feature 1..23: note = Synthetic: WV-37197
  misc_feature 1..23: note = Synthetic: SSR-0103314
  modified_base 1: mod_base = um
  modified_base 1..2: mod_base = OTHER; note = S-phosphorothioate
  modified_base 2: mod_base = OTHER; note = 2-fluororibose uracil
  modified_base 2..3: mod_base = OTHER; note = S-phosphorothioate
  modified_base 3: mod_base = OTHER; note = 2-O-methylribose adenine
  modified_base 3..4: mod_base = OTHER; note = R-phosphorothioate
  modified_base 4: mod_base = OTHER; note = 2-fluororibose uracil
  modified_base 4..5: mod_base = OTHER; note = S-phosphorothioate
  modified_base 5: mod_base = OTHER; note = 2-O-methylribose adenine
  modified_base 5..6: mod_base = OTHER; note = S-phosphorothioate
  modified_base 6: mod_base = OTHER; note = 2-fluororibose guanine
  modified_base 6..7: mod_base = OTHER; note = R-phosphorothioate
  modified_base 7: mod_base = OTHER; note = 2-O-methylribose adenine
  modified_base 7..8: mod_base = OTHER; note = S-phosphorothioate
  modified_base 8: mod_base = OTHER; note = 2-fluororibose guanine
  modified_base 8..9: mod_base = OTHER; note = R-phosphorothioate
  modified_base 9: mod_base = cm
  modified_base 10: mod_base = OTHER; note = 2-fluororibose adenine
  modified_base 11: mod_base = OTHER; note = 2-O-methylribose adenine
  modified_base 12: mod_base = gm
  modified_base 13: mod_base = OTHER; note = 2-O-methylribose adenine
  modified_base 14: mod_base = OTHER; note = 2-fluororibose adenine
  modified_base 15: mod_base = cm
  modified_base 16: mod_base = OTHER; note = 2-fluororibose adenine
  modified_base 17: mod_base = cm
  modified_base 18: mod_base = OTHER; note = 2-fluororibose uracil
  modified_base 19: mod_base = gm
  modified_base 20: mod_base = OTHER; note = 2-fluororibose uracil
  modified_base 21: mod_base = um
  modified_base 21..22: mod_base = OTHER; note = S-phosphorothioate
  modified_base 22: mod_base = um
  modified_base 22..23: mod_base = OTHER; note = S-phosphorothioate
  modified_base 23: mod_base = um
  source 1..23: mol_type = other RNA
ttatagagcaagaacactgtttt

SEQ ID NO: 485 - RNA, 23 nt, synthetic construct
  misc_feature 1..23: note = Synthetic: WV-37198
  misc_feature 1..23: note = Synthetic: SSR-0103315
  modified_base 1: mod_base = um
  modified_base 1..2: mod_base = OTHER; note = S-phosphorothioate
  modified_base 2: mod_base = OTHER; note = 2-fluororibose uracil
  modified_base 2..3: mod_base = OTHER; note = S-phosphorothioate
  modified_base 3: mod_base = OTHER; note = 2-O-methylribose adenine
  modified_base 3..4: mod_base = OTHER; note = R-phosphorothioate
  modified_base 4: mod_base = OTHER; note = 2-fluororibose uracil
  modified_base 4..5: mod_base = OTHER; note = S-phosphorothioate
  modified_base 5: mod_base = OTHER; note = 2-O-methylribose adenine
  modified_base 5..6: mod_base = OTHER; note = S-phosphorothioate
  modified_base 6: mod_base = OTHER; note = 2-fluororibose guanine
  modified_base 6..7: mod_base = OTHER; note = R-phosphorothioate
  modified_base 7: mod_base = OTHER; note = 2-O-methylribose adenine
  modified_base 7..8: mod_base = OTHER; note = S-phosphorothioate
  modified_base 8: mod_base = OTHER; note = 2-fluororibose guanine
  modified_base 8..9: mod_base = OTHER; note = S-phosphorothioate
  modified_base 9: mod_base = cm
  modified_base 10: mod_base = OTHER; note = 2-fluororibose adenine
  modified_base 11: mod_base = OTHER; note = 2-O-methylribose adenine
  modified_base 12: mod_base = gm
  modified_base 13: mod_base = OTHER; note = 2-O-methylribose adenine
  modified_base 14: mod_base = OTHER; note = 2-fluororibose adenine
  modified_base 15: mod_base = cm
  modified_base 16: mod_base = OTHER; note = 2-fluororibose adenine
  modified_base 17: mod_base = cm
  modified_base 18: mod_base = OTHER; note = 2-fluororibose uracil
  modified_base 19: mod_base = gm
  modified_base 20: mod_base = OTHER; note = 2-fluororibose uracil
  modified_base 21: mod_base = um
  modified_base 21..22: mod_base = OTHER; note = S-phosphorothioate
  modified_base 22: mod_base = um
  modified_base 22..23: mod_base = OTHER; note = S-phosphorothioate
  modified_base 23: mod_base = um
  source 1..23: mol_type = other RNA
ttatagagcaagaacactgtttt

SEQ ID NO: 486 - RNA, 23 nt, synthetic construct
  misc_feature 1..23: note = Synthetic: WV-37199
  misc_feature 1..23: note = Synthetic: SSR-0103316
  modified_base 1: mod_base = um
  modified_base 1..2: mod_base = OTHER; note = S-phosphorothioate
  modified_base 2: mod_base = OTHER; note = 2-fluororibose uracil
  modified_base 2..3: mod_base = OTHER; note = S-phosphorothioate
  modified_base 3: mod_base = OTHER; note = 2-O-methylribose adenine
  modified_base 3..4: mod_base = OTHER; note = R-phosphorothioate
  modified_base 4: mod_base = OTHER; note = 2-fluororibose uracil
  modified_base 4..5: mod_base = OTHER; note = S-phosphorothioate
  modified_base 5: mod_base = OTHER; note = 2-O-methylribose adenine
  modified_base 5..6: mod_base = OTHER; note = S-phosphorothioate
  modified_base 6: mod_base = OTHER; note = 2-fluororibose guanine
  modified_base 6..7: mod_base = OTHER; note = S-phosphorothioate
  modified_base 7: mod_base = OTHER; note = 2-O-methylribose adenine
  modified_base 7..8: mod_base = OTHER; note = R-phosphorothioate
  modified_base 8: mod_base = OTHER; note = 2-fluororibose guanine
  modified_base 8..9: mod_base = OTHER; note = R-phosphorothioate
  modified_base 9: mod_base = cm
  modified_base 10: mod_base = OTHER; note = 2-fluororibose adenine
  modified_base 11: mod_base = OTHER; note = 2-O-methylribose adenine
  modified_base 12: mod_base = gm
  modified_base 13: mod_base = OTHER; note = 2-O-methylribose adenine
  modified_base 14: mod_base = OTHER; note = 2-fluororibose adenine
  modified_base 15: mod_base = cm
  modified_base 16: mod_base = OTHER; note = 2-fluororibose adenine
  modified_base 17: mod_base = cm
  modified_base 18: mod_base = OTHER; note = 2-fluororibose uracil
  modified_base 19: mod_base = gm
  modified_base 20: mod_base = OTHER; note = 2-fluororibose uracil
  modified_base 21: mod_base = um
  modified_base 21..22: mod_base = OTHER; note = S-phosphorothioate
  modified_base 22: mod_base = um
  modified_base 22..23: mod_base = OTHER; note = S-phosphorothioate
  modified_base 23: mod_base = um
  source 1..23: mol_type = other RNA
ttatagagcaagaacactgtttt

SEQ ID NO: 487 - RNA, 23 nt, synthetic construct
  misc_feature 1..23: note = Synthetic: WV-37200
  misc_feature 1..23: note = Synthetic: SSR-0103317
  modified_base 1: mod_base = um
  modified_base 1..2: mod_base = OTHER; note = S-phosphorothioate
  modified_base 2: mod_base = OTHER; note = 2-fluororibose uracil
  modified_base 2..3: mod_base = OTHER; note = S-phosphorothioate
  modified_base 3: mod_base = OTHER; note = 2-O-methylribose adenine
  modified_base 3..4: mod_base = OTHER; note = R-phosphorothioate
  modified_base 4: mod_base = OTHER; note = 2-fluororibose uracil
  modified_base 4..5: mod_base = OTHER; note = S-phosphorothioate
  modified_base 5: mod_base = OTHER; note = 2-O-methylribose adenine
  modified_base 5..6: mod_base = OTHER; note = S-phosphorothioate
  modified_base 6: mod_base = OTHER; note = 2-fluororibose guanine
  modified_base 6..7: mod_base = OTHER; note = S-phosphorothioate
  modified_base 7: mod_base = OTHER; note = 2-O-methylribose adenine
  modified_base 7..8: mod_base = OTHER; note = R-phosphorothioate
  modified_base 8: mod_base = OTHER; note = 2-fluororibose guanine
  modified_base 8..9: mod_base = OTHER; note = S-phosphorothioate
  modified_base 9: mod_base = cm
  modified_base 10: mod_base = OTHER; note = 2-fluororibose adenine
  modified_base 11: mod_base = OTHER; note = 2-O-methylribose adenine
  modified_base 12: mod_base = gm
  modified_base 13: mod_base = OTHER; note = 2-O-methylribose adenine
  modified_base 14: mod_base = OTHER; note = 2-fluororibose adenine
  modified_base 15: mod_base = cm
  modified_base 16: mod_base = OTHER; note = 2-fluororibose adenine
  modified_base 17: mod_base = cm
  modified_base 18: mod_base = OTHER; note = 2-fluororibose uracil
  modified_base 19: mod_base = gm
  modified_base 20: mod_base = OTHER; note = 2-fluororibose uracil
  modified_base 21: mod_base = um
  modified_base 21..22: mod_base = OTHER; note = S-phosphorothioate
  modified_base 22: mod_base = um
  modified_base 22..23: mod_base = OTHER; note = S-phosphorothioate
  modified_base 23: mod_base = um
  source 1..23: mol_type = other RNA
ttatagagcaagaacactgtttt

SEQ ID NO: 488 - RNA, 23 nt, synthetic construct
  misc_feature 1..23: note = Synthetic: WV-37201
  misc_feature 1..23: note = Synthetic: SSR-0103318
  modified_base 1: mod_base = um
  modified_base 1..2: mod_base = OTHER; note = S-phosphorothioate
  modified_base 2: mod_base = OTHER; note = 2-fluororibose uracil
  modified_base 2..3: mod_base = OTHER; note = S-phosphorothioate
  modified_base 3: mod_base = OTHER; note = 2-O-methylribose adenine
  modified_base 3..4: mod_base = OTHER; note = R-phosphorothioate
  modified_base 4: mod_base = OTHER; note = 2-fluororibose uracil
  modified_base 4..5: mod_base = OTHER; note = S-phosphorothioate
  modified_base 5: mod_base = OTHER; note = 2-O-methylribose adenine
  modified_base 5..6: mod_base = OTHER; note = S-phosphorothioate
  modified_base 6: mod_base = OTHER; note = 2-fluororibose guanine
  modified_base 6..7: mod_base = OTHER; note = S-phosphorothioate
  modified_base 7: mod_base = OTHER; note = 2-O-methylribose adenine
  modified_base 7..8: mod_base = OTHER; note = S-phosphorothioate
  modified_base 8: mod_base = OTHER; note = 2-fluororibose guanine
  modified_base 8..9: mod_base = OTHER; note = R-phosphorothioate
  modified_base 9: mod_base = cm
  modified_base 10: mod_base = OTHER; note = 2-fluororibose adenine
  modified_base 11: mod_base = OTHER; note = 2-O-methylribose adenine
  modified_base 12: mod_base = gm
  modified_base 13: mod_base = OTHER; note = 2-O-methylribose adenine
  modified_base 14: mod_base = OTHER; note = 2-fluororibose adenine
  modified_base 15: mod_base = cm
  modified_base 16: mod_base = OTHER; note = 2-fluororibose adenine
  modified_base 17: mod_base = cm
  modified_base 18: mod_base = OTHER; note = 2-fluororibose uracil
  modified_base 19: mod_base = gm
  modified_base 20: mod_base = OTHER; note = 2-fluororibose uracil
  modified_base 21: mod_base = um
  modified_base 21..22: mod_base = OTHER; note = S-phosphorothioate
  modified_base 22: mod_base = um
  modified_base 22..23: mod_base = OTHER; note = S-phosphorothioate
  modified_base 23: mod_base = um
  source 1..23: mol_type = other RNA
ttatagagcaagaacactgtttt

SEQ ID NO: 489 - RNA, 23 nt, synthetic construct
  misc_feature 1..23: note = Synthetic: WV-37202
  misc_feature 1..23: note = Synthetic: SSR-0103319
  modified_base 1: mod_base = um
  modified_base 1..2: mod_base = OTHER; note = S-phosphorothioate
  modified_base 2: mod_base = OTHER; note = 2-fluororibose uracil
  modified_base 2..3: mod_base = OTHER; note = S-phosphorothioate
  modified_base 3: mod_base = OTHER; note = 2-O-methylribose adenine
  modified_base 3..4: mod_base = OTHER; note = R-phosphorothioate
  modified_base 4: mod_base = OTHER; note = 2-fluororibose uracil
  modified_base 4..5: mod_base = OTHER; note = S-phosphorothioate
  modified_base 5: mod_base = OTHER; note = 2-O-methylribose adenine
  modified_base 5..6: mod_base = OTHER; note = S-phosphorothioate
  modified_base 6: mod_base = OTHER; note = 2-fluororibose guanine
  modified_base 6..7: mod_base = OTHER; note = S-phosphorothioate
  modified_base 7: mod_base = OTHER; note = 2-O-methylribose adenine
  modified_base 7..8: mod_base = OTHER; note = S-phosphorothioate
  modified_base 8: mod_base = OTHER; note = 2-fluororibose guanine
  modified_base 8..9: mod_base = OTHER; note = S-phosphorothioate
  modified_base 9: mod_base = cm
  modified_base 10: mod_base = OTHER; note = 2-fluororibose adenine
  modified_base 11: mod_base = OTHER; note = 2-O-methylribose adenine
  modified_base 12: mod_base = gm
  modified_base 13: mod_base = OTHER; note = 2-O-methylribose adenine
  modified_base 14: mod_base = OTHER; note = 2-fluororibose adenine
  modified_base 15: mod_base = cm
  modified_base 16: mod_base = OTHER; note = 2-fluororibose adenine
  modified_base 17: mod_base = cm
  modified_base 18: mod_base = OTHER; note = 2-fluororibose uracil
  modified_base 19: mod_base = gm
  modified_base 20: mod_base = OTHER; note = 2-fluororibose uracil
  modified_base 21: mod_base = um
  modified_base 21..22: mod_base = OTHER; note = S-phosphorothioate
  modified_base 22: mod_base = um
  modified_base 22..23: mod_base = OTHER; note = S-phosphorothioate
  modified_base 23: mod_base = um
  source 1..23: mol_type = other RNA
ttatagagcaagaacactgtttt

SEQ ID NO: 490 - RNA, 23 nt, synthetic construct
  misc_feature 1..23: note = Synthetic: WV-37203
  misc_feature 1..23: note = Synthetic: SSR-0103320
  modified_base 1: mod_base = um
  modified_base 1..2: mod_base = OTHER; note = S-phosphorothioate
  modified_base 2: mod_base = OTHER; note = 2-fluororibose uracil
  modified_base 2..3: mod_base = OTHER; note = S-phosphorothioate
  modified_base 3: mod_base = OTHER; note = 2-O-methylribose adenine
  modified_base 3..4: mod_base = OTHER; note = S-phosphorothioate
  modified_base 4: mod_base = OTHER; note = 2-fluororibose uracil
  modified_base 4..5: mod_base = OTHER; note = R-phosphorothioate
  modified_base 5: mod_base = OTHER; note = 2-O-methylribose adenine
  modified_base 5..6: mod_base = OTHER; note = R-phosphorothioate
  modified_base 6: mod_base = OTHER; note = 2-fluororibose guanine
  modified_base 6..7: mod_base = OTHER; note = R-phosphorothioate
  modified_base 7: mod_base = OTHER; note = 2-O-methylribose adenine
  modified_base 7..8: mod_base = OTHER; note = R-phosphorothioate
  modified_base 8: mod_base = OTHER; note = 2-fluororibose guanine
  modified_base 8..9: mod_base = OTHER; note = R-phosphorothioate
  modified_base 9: mod_base = cm
  modified_base 10: mod_base = OTHER; note = 2-fluororibose adenine
  modified_base 11: mod_base = OTHER; note = 2-O-methylribose adenine
  modified_base 12: mod_base = gm
  modified_base 13: mod_base = OTHER; note = 2-O-methylribose adenine
  modified_base 14: mod_base = OTHER; note = 2-fluororibose adenine
  modified_base 15: mod_base = cm
  modified_base 16: mod_base = OTHER; note = 2-fluororibose adenine
  modified_base 17: mod_base = cm
  modified_base 18: mod_base = OTHER; note = 2-fluororibose uracil
  modified_base 19: mod_base = gm
  modified_base 20: mod_base = OTHER; note = 2-fluororibose uracil
  modified_base 21: mod_base = um
  modified_base 21..22: mod_base = OTHER; note = S-phosphorothioate
  modified_base 22: mod_base = um
  modified_base 22..23: mod_base = OTHER; note = S-phosphorothioate
  modified_base 23: mod_base = um
  source 1..23: mol_type = other RNA
ttatagagcaagaacactgtttt

SEQ ID NO: 491 - RNA, 23 nt, synthetic construct
  misc_feature 1..23: note = Synthetic: WV-37204
  misc_feature 1..23: note = Synthetic: SSR-0103321
  modified_base 1: mod_base = um
  modified_base 1..2: mod_base = OTHER; note = S-phosphorothioate
  modified_base 2: mod_base = OTHER; note = 2-fluororibose uracil
  modified_base 2..3: mod_base = OTHER; note = S-phosphorothioate
  modified_base 3: mod_base = OTHER; note = 2-O-methylribose adenine
  modified_base 3..4: mod_base = OTHER; note = S-phosphorothioate
  modified_base 4: mod_base = OTHER; note = 2-fluororibose uracil
  modified_base 4..5: mod_base = OTHER; note = R-phosphorothioate
  modified_base 5: mod_base = OTHER; note = 2-O-methylribose adenine
  modified_base 5..6: mod_base = OTHER; note = R-phosphorothioate
  modified_base 6: mod_base = OTHER; note = 2-fluororibose guanine
  modified_base 6..7: mod_base = OTHER; note = R-phosphorothioate
  modified_base 7: mod_base = OTHER; note = 2-O-methylribose adenine
  modified_base 7..8: mod_base = OTHER; note = R-phosphorothioate
  modified_base 8: mod_base = OTHER; note = 2-fluororibose guanine
  modified_base 8..9: mod_base = OTHER; note = S-phosphorothioate
  modified_base 9: mod_base = cm
  modified_base 10: mod_base = OTHER; note = 2-fluororibose adenine
  modified_base 11: mod_base = OTHER; note = 2-O-methylribose adenine
  modified_base 12: mod_base = gm
  modified_base 13: mod_base = OTHER; note = 2-O-methylribose adenine
  modified_base 14: mod_base = OTHER; note = 2-fluororibose adenine
  modified_base 15: mod_base = cm
  modified_base 16: mod_base = OTHER; note = 2-fluororibose adenine
  modified_base 17: mod_base = cm
  modified_base 18: mod_base = OTHER; note = 2-fluororibose uracil
  modified_base 19: mod_base = gm
  modified_base 20: mod_base = OTHER; note = 2-fluororibose uracil
  modified_base 21: mod_base = um
  modified_base 21..22: mod_base = OTHER; note = S-phosphorothioate
  modified_base 22: mod_base = um
  modified_base 22..23: mod_base = OTHER; note = S-phosphorothioate
  modified_base 23: mod_base = um
  source 1..23: mol_type = other RNA
ttatagagcaagaacactgtttt

SEQ ID NO: 492 - RNA, 23 nt, synthetic construct
  misc_feature 1..23: note = Synthetic: WV-37205
  misc_feature 1..23: note = Synthetic: SSR-0103322
  modified_base 1: mod_base = um
  modified_base 1..2: mod_base = OTHER; note = S-phosphorothioate
  modified_base 2: mod_base = OTHER; note = 2-fluororibose uracil
  modified_base 2..3: mod_base = OTHER; note = S-phosphorothioate
  modified_base 3: mod_base = OTHER; note = 2-O-methylribose adenine
  modified_base 3..4: mod_base = OTHER; note = S-phosphorothioate
  modified_base 4: mod_base = OTHER; note = 2-fluororibose uracil
  modified_base 4..5: mod_base = OTHER; note = R-phosphorothioate
  modified_base 5: mod_base = OTHER; note = 2-O-methylribose adenine
  modified_base 5..6: mod_base = OTHER; note = R-phosphorothioate
  modified_base 6: mod_base = OTHER; note = 2-fluororibose guanine
  modified_base 6..7: mod_base = OTHER; note = R-phosphorothioate
  modified_base 7: mod_base = OTHER; note = 2-O-methylribose adenine
  modified_base 7..8: mod_base = OTHER; note = S-phosphorothioate
  modified_base 8: mod_base = OTHER; note = 2-fluororibose guanine
  modified_base 8..9: mod_base = OTHER; note = R-phosphorothioate
  modified_base 9: mod_base = cm
  modified_base 10: mod_base = OTHER; note = 2-fluororibose adenine
  modified_base 11: mod_base = OTHER; note = 2-O-methylribose adenine
  modified_base 12: mod_base = gm
  modified_base 13: mod_base = OTHER; note = 2-O-methylribose adenine
  modified_base 14: mod_base = OTHER; note = 2-fluororibose adenine
  modified_base 15: mod_base = cm
  modified_base 16: mod_base = OTHER; note = 2-fluororibose adenine
  modified_base 17: mod_base = cm
  modified_base 18: mod_base = OTHER; note = 2-fluororibose uracil
  modified_base 19: mod_base = gm
  modified_base 20: mod_base = OTHER; note = 2-fluororibose uracil
  modified_base 21: mod_base = um
  modified_base 21..22: mod_base = OTHER; note = S-phosphorothioate
  modified_base 22: mod_base = um
  modified_base 22..23: mod_base = OTHER; note = S-phosphorothioate
  modified_base 23: mod_base = um
  source 1..23: mol_type = other RNA
ttatagagcaagaacactgtttt

SEQ ID NO: 493 - RNA, 23 nt, synthetic construct
  misc_feature 1..23: note = Synthetic: WV-37206
  misc_feature 1..23: note = Synthetic: SSR-0103323
  modified_base 1: mod_base = um
  modified_base 1..2: mod_base = OTHER; note = S-phosphorothioate
  modified_base 2: mod_base = OTHER; note = 2-fluororibose uracil
  modified_base 2..3: mod_base = OTHER; note = S-phosphorothioate
  modified_base 3: mod_base = OTHER; note = 2-O-methylribose adenine
  modified_base 3..4: mod_base = OTHER; note = S-phosphorothioate
  modified_base 4: mod_base = OTHER; note = 2-fluororibose uracil
  modified_base 4..5: mod_base = OTHER; note = R-phosphorothioate
  modified_base 5: mod_base = OTHER; note = 2-O-methylribose adenine
  modified_base 5..6: mod_base = OTHER; note = R-phosphorothioate
  modified_base 6: mod_base = OTHER; note = 2-fluororibose guanine
  modified_base 6..7: mod_base = OTHER; note = R-phosphorothioate
  modified_base 7: mod_base = OTHER; note = 2-O-methylribose adenine
  modified_base 7..8: mod_base = OTHER; note = S-phosphorothioate
  modified_base 8: mod_base = OTHER; note = 2-fluororibose guanine
  modified_base 8..9: mod_base = OTHER; note = S-phosphorothioate
  modified_base 9: mod_base = cm
  modified_base 10: mod_base = OTHER; note = 2-fluororibose adenine
  modified_base 11: mod_base = OTHER; note = 2-O-methylribose adenine
  modified_base 12: mod_base = gm
  modified_base 13: mod_base = OTHER; note = 2-O-methylribose adenine
  modified_base 14: mod_base = OTHER; note = 2-fluororibose adenine
  modified_base 15: mod_base = cm
  modified_base 16: mod_base = OTHER; note = 2-fluororibose adenine
  modified_base 17: mod_base = cm
  modified_base 18: mod_base = OTHER; note = 2-fluororibose uracil
  modified_base 19: mod_base = gm
  modified_base 20: mod_base = OTHER; note = 2-fluororibose uracil
  modified_base 21: mod_base = um
  modified_base 21..22: mod_base = OTHER; note = S-phosphorothioate
  modified_base 22: mod_base = um
  modified_base 22..23: mod_base = OTHER; note = S-phosphorothioate
  modified_base 23: mod_base = um
  source 1..23: mol_type = other RNA
ttatagagcaagaacactgtttt

SEQ ID NO: 494 - RNA, 23 nt, synthetic construct
  misc_feature 1..23: note = Synthetic: WV-37207
  misc_feature 1..23: note = Synthetic: SSR-0103324
  modified_base 1: mod_base = um
  modified_base 1..2: mod_base = OTHER; note = S-phosphorothioate
  modified_base 2: mod_base = OTHER; note = 2-fluororibose uracil
  modified_base 2..3: mod_base = OTHER; note = S-phosphorothioate
  modified_base 3: mod_base = OTHER; note = 2-O-methylribose adenine
  modified_base 3..4: mod_base = OTHER; note = S-phosphorothioate
  modified_base 4: mod_base = OTHER; note = 2-fluororibose uracil
  modified_base 4..5: mod_base = OTHER; note = R-phosphorothioate
  modified_base 5: mod_base = OTHER; note = 2-O-methylribose adenine
  modified_base 5..6: mod_base = OTHER; note = R-phosphorothioate
  modified_base 6: mod_base = OTHER; note = 2-fluororibose guanine
  modified_base 6..7: mod_base = OTHER; note = S-phosphorothioate
  modified_base 7: mod_base = OTHER; note = 2-O-methylribose adenine
  modified_base 7..8: mod_base = OTHER; note = R-phosphorothioate
  modified_base 8: mod_base = OTHER; note = 2-fluororibose guanine
  modified_base 8..9: mod_base = OTHER; note = R-phosphorothioate
  modified_base 9: mod_base = cm
  modified_base 10: mod_base = OTHER; note = 2-fluororibose adenine
  modified_base 11: mod_base = OTHER; note = 2-O-methylribose adenine
  modified_base 12: mod_base = gm
  modified_base 13: mod_base = OTHER; note = 2-O-methylribose adenine
  modified_base 14: mod_base = OTHER; note = 2-fluororibose adenine
  modified_base 15: mod_base = cm
  modified_base 16: mod_base = OTHER; note = 2-fluororibose adenine
  modified_base 17: mod_base = cm
  modified_base 18: mod_base = OTHER; note = 2-fluororibose uracil
  modified_base 19: mod_base = gm
  modified_base 20: mod_base = OTHER; note = 2-fluororibose uracil
  modified_base 21: mod_base = um
  modified_base 21..22: mod_base = OTHER; note = S-phosphorothioate
  modified_base 22: mod_base = um
  modified_base 22..23: mod_base = OTHER; note = S-phosphorothioate
  modified_base 23: mod_base = um
  source 1..23: mol_type = other RNA
ttatagagcaagaacactgtttt

SEQ ID NO: 495 - RNA, 23 nt, synthetic construct
  misc_feature 1..23: note = Synthetic: WV-37208
  misc_feature 1..23: note = Synthetic: SSR-0103325
  modified_base 1: mod_base = um
  modified_base 1..2: mod_base = OTHER; note = S-phosphorothioate
  modified_base 2: mod_base = OTHER; note = 2-fluororibose uracil
  modified_base 2..3: mod_base = OTHER; note = S-phosphorothioate
  modified_base 3: mod_base = OTHER; note = 2-O-methylribose adenine
  modified_base 3..4: mod_base = OTHER; note = S-phosphorothioate
  modified_base 4: mod_base = OTHER; note = 2-fluororibose uracil
  modified_base 4..5: mod_base = OTHER; note = R-phosphorothioate
  modified_base 5: mod_base = OTHER; note = 2-O-methylribose adenine
  modified_base 5..6: mod_base = OTHER; note = R-phosphorothioate
  modified_base 6: mod_base = OTHER; note = 2-fluororibose guanine
  modified_base 6..7: mod_base = OTHER; note = S-phosphorothioate
  modified_base 7: mod_base = OTHER; note = 2-O-methylribose adenine
  modified_base 7..8: mod_base = OTHER; note = R-phosphorothioate
  modified_base 8: mod_base = OTHER; note = 2-fluororibose guanine
  modified_base 8..9: mod_base = OTHER; note = S-phosphorothioate
  modified_base 9: mod_base = cm
  modified_base 10: mod_base = OTHER; note = 2-fluororibose adenine
  modified_base 11: mod_base = OTHER; note = 2-O-methylribose adenine
  modified_base 12: mod_base = gm
  modified_base 13: mod_base = OTHER; note = 2-O-methylribose adenine
  modified_base 14: mod_base = OTHER; note = 2-fluororibose adenine
  modified_base 15: mod_base = cm
  modified_base 16: mod_base = OTHER; note = 2-fluororibose adenine
  modified_base 17: mod_base = cm
  modified_base 18: mod_base = OTHER; note = 2-fluororibose uracil
  modified_base 19: mod_base = gm
  modified_base 20: mod_base = OTHER; note = 2-fluororibose uracil
  modified_base 21: mod_base = um
  modified_base 21..22: mod_base = OTHER; note = S-phosphorothioate
  modified_base 22: mod_base = um
  modified_base 22..23: mod_base = OTHER; note = S-phosphorothioate
  modified_base 23: mod_base = um
  source 1..23: mol_type = other RNA
ttatagagcaagaacactgtttt

SEQ ID NO: 496 - RNA, 23 nt, synthetic construct
  misc_feature 1..23: note = Synthetic: WV-37209
  misc_feature 1..23: note = Synthetic: SSR-0103326
  modified_base 1: mod_base = um
  modified_base 1..2: mod_base = OTHER; note = S-phosphorothioate
  modified_base 2: mod_base = OTHER; note = 2-fluororibose uracil
  modified_base 2..3: mod_base = OTHER; note = S-phosphorothioate
  modified_base 3: mod_base = OTHER; note = 2-O-methylribose adenine
  modified_base 3..4: mod_base = OTHER; note = S-phosphorothioate
  modified_base 4: mod_base = OTHER; note = 2-fluororibose uracil
  modified_base 4..5: mod_base = OTHER; note = R-phosphorothioate
  modified_base 5: mod_base = OTHER; note = 2-O-methylribose adenine
  modified_base 5..6: mod_base = OTHER; note = R-phosphorothioate
  modified_base 6: mod_base = OTHER; note = 2-fluororibose guanine
  modified_base 6..7: mod_base = OTHER; note = S-phosphorothioate
  modified_base 7: mod_base = OTHER; note = 2-O-methylribose adenine
  modified_base 7..8: mod_base = OTHER; note = S-phosphorothioate
  modified_base 8: mod_base = OTHER; note = 2-fluororibose guanine
  modified_base 8..9: mod_base = OTHER; note = R-phosphorothioate
  modified_base 9: mod_base = cm
  modified_base 10: mod_base = OTHER; note = 2-fluororibose adenine
  modified_base 11: mod_base = OTHER; note = 2-O-methylribose adenine
  modified_base 12: mod_base = gm
  modified_base 13: mod_base = OTHER; note = 2-O-methylribose adenine
  modified_base 14: mod_base = OTHER; note = 2-fluororibose adenine
  modified_base 15: mod_base = cm
  modified_base 16: mod_base = OTHER; note = 2-fluororibose adenine
  modified_base 17: mod_base = cm
  modified_base 18: mod_base = OTHER; note = 2-fluororibose uracil
  modified_base 19: mod_base = gm
  modified_base 20: mod_base = OTHER; note = 2-fluororibose uracil
  modified_base 21: mod_base = um
  modified_base 21..22: mod_base = OTHER; note = S-phosphorothioate
  modified_base 22: mod_base = um
  modified_base 22..23: mod_base = OTHER; note = S-phosphorothioate
  modified_base 23: mod_base = um
  source 1..23: mol_type = other RNA
ttatagagcaagaacactgtttt

SEQ ID NO: 497 - RNA, 23 nt, synthetic construct
  misc_feature 1..23: note = Synthetic: WV-37210
  misc_feature 1..23: note = Synthetic: SSR-0103327
  modified_base 1: mod_base = um
  modified_base 1..2: mod_base = OTHER; note = S-phosphorothioate
  modified_base 2: mod_base = OTHER; note = 2-fluororibose uracil
  modified_base 2..3: mod_base = OTHER; note = S-phosphorothioate
  modified_base 3: mod_base = OTHER; note = 2-O-methylribose adenine
  modified_base 3..4: mod_base = OTHER; note = S-phosphorothioate
  modified_base 4: mod_base = OTHER; note = 2-fluororibose uracil
  modified_base 4..5: mod_base = OTHER; note = R-phosphorothioate
  modified_base 5: mod_base = OTHER; note = 2-O-methylribose adenine
  modified_base 5..6: mod_base = OTHER; note = R-phosphorothioate
  modified_base 6: mod_base = OTHER; note = 2-fluororibose guanine
  modified_base 6..7: mod_base = OTHER; note = S-phosphorothioate
  modified_base 7: mod_base = OTHER; note = 2-O-methylribose adenine
  modified_base 7..8: mod_base = OTHER; note = S-phosphorothioate
  modified_base 8: mod_base = OTHER; note = 2-fluororibose guanine
  modified_base 8..9: mod_base = OTHER; note = S-phosphorothioate
  modified_base 9: mod_base = cm
  modified_base 10: mod_base = OTHER; note = 2-fluororibose adenine
  modified_base 11: mod_base = OTHER; note = 2-O-methylribose adenine
  modified_base 12: mod_base = gm
  modified_base 13: mod_base = OTHER; note = 2-O-methylribose adenine
  modified_base 14: mod_base = OTHER; note = 2-fluororibose adenine
  modified_base 15: mod_base = cm
  modified_base 16: mod_base = OTHER; note = 2-fluororibose adenine
  modified_base 17: mod_base = cm
  modified_base 18: mod_base = OTHER; note = 2-fluororibose uracil
  modified_base 19: mod_base = gm
  modified_base 20: mod_base = OTHER; note = 2-fluororibose uracil
  modified_base 21: mod_base = um
  modified_base 21..22: mod_base = OTHER; note = S-phosphorothioate
  modified_base 22: mod_base = um
  modified_base 22..23: mod_base = OTHER; note = S-phosphorothioate
  modified_base 23: mod_base = um
  source 1..23: mol_type = other RNA
ttatagagcaagaacactgtttt

SEQ ID NO: 498 - RNA, 23 nt, synthetic construct
  misc_feature 1..23: note = Synthetic: WV-37211
  misc_feature 1..23: note = Synthetic: SSR-0103328
  modified_base 1: mod_base = um
  modified_base 1..2: mod_base = OTHER; note = S-phosphorothioate
  modified_base 2: mod_base = OTHER; note = 2-fluororibose uracil
  modified_base 2..3: mod_base = OTHER; note = S-phosphorothioate
  modified_base 3: mod_base = OTHER; note = 2-O-methylribose adenine
  modified_base 3..4: mod_base = OTHER; note = S-phosphorothioate
  modified_base 4: mod_base = OTHER; note = 2-fluororibose uracil
  modified_base 4..5: mod_base = OTHER; note = R-phosphorothioate
  modified_base 5: mod_base = OTHER; note = 2-O-methylribose adenine
  modified_base 5..6: mod_base = OTHER; note = S-phosphorothioate
  modified_base 6: mod_base = OTHER; note = 2-fluororibose guanine
  modified_base 6..7: mod_base = OTHER; note = R-phosphorothioate
  modified_base 7: mod_base = OTHER; note = 2-O-methylribose adenine
  modified_base 7..8: mod_base = OTHER; note = R-phosphorothioate
  modified_base 8: mod_base = OTHER; note = 2-fluororibose guanine
  modified_base 8..9: mod_base = OTHER; note = R-phosphorothioate
  modified_base 9: mod_base = cm
  modified_base 10: mod_base = OTHER; note = 2-fluororibose adenine
  modified_base 11: mod_base = OTHER; note = 2-O-methylribose adenine
  modified_base 12: mod_base = gm
  modified_base 13: mod_base = OTHER; note = 2-O-methylribose adenine
  modified_base 14: mod_base = OTHER; note = 2-fluororibose adenine
  modified_base 15: mod_base = cm
  modified_base 16: mod_base = OTHER; note = 2-fluororibose adenine
  modified_base 17: mod_base = cm
  modified_base 18: mod_base = OTHER; note = 2-fluororibose uracil
  modified_base 19: mod_base = gm
  modified_base 20: mod_base = OTHER; note = 2-fluororibose uracil
  modified_base 21: mod_base = um
  modified_base 21..22: mod_base = OTHER; note = S-phosphorothioate
  modified_base 22: mod_base = um
  modified_base 22..23: mod_base = OTHER; note = S-phosphorothioate
  modified_base 23: mod_base = um
  source 1..23: mol_type = other RNA
ttatagagcaagaacactgtttt

SEQ ID NO: 499 - RNA, 23 nt, synthetic construct
  misc_feature 1..23: note = Synthetic: WV-37212
  misc_feature 1..23: note = Synthetic: SSR-0103329
  modified_base 1: mod_base = um
  modified_base 1..2: mod_base = OTHER; note = S-phosphorothioate
  modified_base 2: mod_base = OTHER; note = 2-fluororibose uracil
  modified_base 2..3: mod_base = OTHER; note = S-phosphorothioate
  modified_base 3: mod_base = OTHER; note = 2-O-methylribose adenine
  modified_base 3..4: mod_base = OTHER; note = S-phosphorothioate
  modified_base 4: mod_base = OTHER; note = 2-fluororibose uracil
  modified_base 4..5: mod_base = OTHER; note = R-phosphorothioate
  modified_base 5: mod_base = OTHER; note = 2-O-methylribose adenine
  modified_base 5..6: mod_base = OTHER; note = S-phosphorothioate
  modified_base 6: mod_base = OTHER; note = 2-fluororibose guanine
  modified_base 6..7: mod_base = OTHER; note = R-phosphorothioate
  modified_base 7: mod_base = OTHER; note = 2-O-methylribose adenine
  modified_base 7..8: mod_base = OTHER; note = R-phosphorothioate
  modified_base 8: mod_base = OTHER; note = 2-fluororibose guanine
  modified_base 8..9: mod_base = OTHER; note = S-phosphorothioate
  modified_base 9: mod_base = cm
  modified_base 10: mod_base = OTHER; note = 2-fluororibose adenine
  modified_base 11: mod_base = OTHER; note = 2-O-methylribose adenine
  modified_base 12: mod_base = gm
  modified_base 13: mod_base = OTHER; note = 2-O-methylribose adenine
  modified_base 14: mod_base = OTHER; note = 2-fluororibose adenine
  modified_base 15: mod_base = cm
  modified_base 16: mod_base = OTHER; note = 2-fluororibose adenine
  modified_base 17: mod_base = cm
  modified_base 18: mod_base = OTHER; note = 2-fluororibose uracil
  modified_base 19: mod_base = gm
  modified_base 20: mod_base = OTHER; note = 2-fluororibose uracil
  modified_base 21: mod_base = um
  modified_base 21..22: mod_base = OTHER; note = S-phosphorothioate
  modified_base 22: mod_base = um
  modified_base 22..23: mod_base = OTHER; note = S-phosphorothioate
  modified_base 23: mod_base = um
  source 1..23: mol_type = other RNA
ttatagagcaagaacactgtttt

SEQ ID NO: 500 - RNA, 23 nt, synthetic construct
  misc_feature 1..23: note = Synthetic: WV-37213
  misc_feature 1..23: note = Synthetic: SSR-0103330
  modified_base 1: mod_base = um
  modified_base 1..2: mod_base = OTHER; note = S-phosphorothioate
  modified_base 2: mod_base = OTHER; note = 2-fluororibose uracil
  modified_base 2..3: mod_base = OTHER; note = S-phosphorothioate
  modified_base 3: mod_base = OTHER; note = 2-O-methylribose adenine
  modified_base 3..4: mod_base = OTHER; note = S-phosphorothioate
  modified_base 4: mod_base = OTHER; note = 2-fluororibose uracil
  modified_base 4..5: mod_base = OTHER; note = R-phosphorothioate
  modified_base 5: mod_base = OTHER; note = 2-O-methylribose adenine
  modified_base 5..6: mod_base = OTHER; note = S-phosphorothioate
  modified_base 6: mod_base = OTHER; note = 2-fluororibose guanine
  modified_base 6..7: mod_base = OTHER; note = R-phosphorothioate
  modified_base 7: mod_base = OTHER; note = 2-O-methylribose adenine
  modified_base 7..8: mod_base = OTHER; note = S-phosphorothioate
  modified_base 8: mod_base = OTHER; note = 2-fluororibose guanine
  modified_base 8..9: mod_base = OTHER; note = R-phosphorothioate
  modified_base 9: mod_base = cm
  modified_base 10: mod_base = OTHER; note = 2-fluororibose adenine
  modified_base 11: mod_base = OTHER; note = 2-O-methylribose adenine
  modified_base 12: mod_base = gm
  modified_base 13: mod_base = OTHER; note = 2-O-methylribose adenine
  modified_base 14: mod_base = OTHER; note = 2-fluororibose adenine
  modified_base 15: mod_base = cm
  modified_base 16: mod_base = OTHER; note = 2-fluororibose adenine
  modified_base 17: mod_base = cm
  modified_base 18: mod_base = OTHER; note = 2-fluororibose uracil
  modified_base 19: mod_base = gm
  modified_base 20: mod_base = OTHER; note = 2-fluororibose uracil
  modified_base 21: mod_base = um
  modified_base 21..22: mod_base = OTHER; note = S-phosphorothioate
  modified_base 22: mod_base = um
  modified_base 22..23: mod_base = OTHER; note = S-phosphorothioate
  modified_base 23: mod_base = um
  source 1..23: mol_type = other RNA
ttatagagcaagaacactgtttt

SEQ ID NO: 501 - RNA, 23 nt, synthetic construct
  misc_feature 1..23: note = Synthetic: WV-37214
  misc_feature 1..23: note = Synthetic: SSR-0103331
  modified_base 1: mod_base = um
  modified_base 1..2: mod_base = OTHER; note = S-phosphorothioate
  modified_base 2: mod_base = OTHER; note = 2-fluororibose uracil
  modified_base 2..3: mod_base = OTHER; note = S-phosphorothioate
  modified_base 3: mod_base = OTHER; note = 2-O-methylribose adenine
  modified_base 3..4: mod_base = OTHER; note = S-phosphorothioate
  modified_base 4: mod_base = OTHER; note = 2-fluororibose uracil
  modified_base 4..5: mod_base = OTHER; note = R-phosphorothioate
  modified_base 5: mod_base = OTHER; note = 2-O-methylribose adenine
  modified_base 5..6: mod_base = OTHER; note = S-phosphorothioate
  modified_base 6: mod_base = OTHER; note = 2-fluororibose guanine
  modified_base 6..7: mod_base = OTHER; note = R-phosphorothioate
  modified_base 7: mod_base = OTHER; note = 2-O-methylribose adenine
  modified_base 7..8: mod_base = OTHER; note = S-phosphorothioate
  modified_base 8: mod_base = OTHER; note = 2-fluororibose guanine
  modified_base 8..9: mod_base = OTHER; note = S-phosphorothioate
  modified_base 9: mod_base = cm
  modified_base 10: mod_base = OTHER; note = 2-fluororibose adenine
  modified_base 11: mod_base = OTHER; note = 2-O-methylribose adenine
  modified_base 12: mod_base = gm
  modified_base 13: mod_base = OTHER; note = 2-O-methylribose adenine
  modified_base 14: mod_base = OTHER; note = 2-fluororibose adenine
  modified_base 15: mod_base = cm
  modified_base 16: mod_base = OTHER; note = 2-fluororibose adenine
  modified_base 17: mod_base = cm
  modified_base 18: mod_base = OTHER; note = 2-fluororibose uracil
  modified_base 19: mod_base = gm
  modified_base 20: mod_base = OTHER; note = 2-fluororibose uracil
  modified_base 21: mod_base = um
  modified_base 21..22: mod_base = OTHER; note = S-phosphorothioate
  modified_base 22: mod_base = um
  modified_base 22..23: mod_base = OTHER; note = S-phosphorothioate
  modified_base 23: mod_base = um
  source 1..23: mol_type = other RNA
ttatagagcaagaacactgtttt

SEQ ID NO: 502 - RNA, 23 nt, synthetic construct
  misc_feature 1..23: note = Synthetic: WV-37215
  misc_feature 1..23: note = Synthetic: SSR-0103332
  modified_base 1: mod_base = um
  modified_base 1..2: mod_base = OTHER; note = S-phosphorothioate
  modified_base 2: mod_base = OTHER; note = 2-fluororibose uracil
  modified_base 2..3: mod_base = OTHER; note = S-phosphorothioate
  modified_base 3: mod_base = OTHER; note = 2-O-methylribose adenine
  modified_base 3..4: mod_base = OTHER; note = S-phosphorothioate
  modified_base 4: mod_base = OTHER; note = 2-fluororibose uracil
  modified_base 4..5: mod_base = OTHER; note = R-phosphorothioate
  modified_base 5: mod_base = OTHER; note = 2-O-methylribose adenine
  modified_base 5..6: mod_base = OTHER; note = S-phosphorothioate
  modified_base 6: mod_base = OTHER; note = 2-fluororibose guanine
  modified_base 6..7: mod_base = OTHER; note = S-phosphorothioate
  modified_base 7: mod_base = OTHER; note = 2-O-methylribose adenine
  modified_base 7..8: mod_base = OTHER; note = R-phosphorothioate
  modified_base 8: mod_base = OTHER; note = 2-fluororibose guanine
  modified_base 8..9: mod_base = OTHER; note = R-phosphorothioate
  modified_base 9: mod_base = cm
  modified_base 10: mod_base = OTHER; note = 2-fluororibose adenine
  modified_base 11: mod_base = OTHER; note = 2-O-methylribose adenine
  modified_base 12: mod_base = gm
  modified_base 13: mod_base = OTHER; note = 2-O-methylribose adenine
  modified_base 14: mod_base = OTHER; note = 2-fluororibose adenine
  modified_base 15: mod_base = cm
  modified_base 16: mod_base = OTHER; note = 2-fluororibose adenine
  modified_base 17: mod_base = cm
  modified_base 18: mod_base = OTHER; note = 2-fluororibose uracil
  modified_base 19: mod_base = gm
  modified_base 20: mod_base = OTHER; note = 2-fluororibose uracil
  modified_base 21: mod_base = um
  modified_base 21..22: mod_base = OTHER; note = S-phosphorothioate
  modified_base 22: mod_base = um
  modified_base 22..23: mod_base = OTHER; note = S-phosphorothioate
  modified_base 23: mod_base = um
  source 1..23: mol_type = other RNA
ttatagagcaagaacactgtttt

SEQ ID NO: 503 - RNA, 23 nt, synthetic construct
  misc_feature 1..23: note = Synthetic: WV-37216
  misc_feature 1..23: note = Synthetic: SSR-0103333
  modified_base 1: mod_base = um
  modified_base 1..2: mod_base = OTHER; note = S-phosphorothioate
  modified_base 2: mod_base = OTHER; note = 2-fluororibose uracil
  modified_base 2..3: mod_base = OTHER; note = S-phosphorothioate
  modified_base 3: mod_base = OTHER; note = 2-O-methylribose adenine
  modified_base 3..4: mod_base = OTHER; note = S-phosphorothioate
  modified_base 4: mod_base = OTHER; note = 2-fluororibose uracil
  modified_base 4..5: mod_base = OTHER; note = R-phosphorothioate
  modified_base 5: mod_base = OTHER; note = 2-O-methylribose adenine
  modified_base 5..6: mod_base = OTHER; note = S-phosphorothioate
  modified_base 6: mod_base = OTHER; note = 2-fluororibose guanine
  modified_base 6..7: mod_base = OTHER; note = S-phosphorothioate
  modified_base 7: mod_base = OTHER; note = 2-O-methylribose adenine
  modified_base 7..8: mod_base = OTHER; note = R-phosphorothioate
  modified_base 8: mod_base = OTHER; note = 2-fluororibose guanine
  modified_base 8..9: mod_base = OTHER; note = S-phosphorothioate
  modified_base 9: mod_base = cm
  modified_base 10: mod_base = OTHER; note = 2-fluororibose adenine
  modified_base 11: mod_base = OTHER; note = 2-O-methylribose adenine
  modified_base 12: mod_base = gm
  modified_base 13: mod_base = OTHER; note = 2-O-methylribose adenine
  modified_base 14: mod_base = OTHER; note = 2-fluororibose adenine
  modified_base 15: mod_base = cm
  modified_base 16: mod_base = OTHER; note = 2-fluororibose adenine
  modified_base 17: mod_base = cm
  modified_base 18: mod_base = OTHER; note = 2-fluororibose uracil
  modified_base 19: mod_base = gm
  modified_base 20: mod_base = OTHER; note = 2-fluororibose uracil
  modified_base 21: mod_base = um
  modified_base 21..22: mod_base = OTHER; note = S-phosphorothioate
  modified_base 22: mod_base = um
  modified_base 22..23: mod_base = OTHER; note = S-phosphorothioate
  modified_base 23: mod_base = um
  source 1..23: mol_type = other RNA
ttatagagcaagaacactgtttt

SEQ ID NO: 504 - RNA, 23 nt, synthetic construct
  misc_feature 1..23: note = Synthetic: WV-37217
  misc_feature 1..23: note = Synthetic: SSR-0103334
  modified_base 1: mod_base = um
  modified_base 1..2: mod_base = OTHER; note = S-phosphorothioate
  modified_base 2: mod_base = OTHER; note = 2-fluororibose uracil
  modified_base 2..3: mod_base = OTHER; note = S-phosphorothioate
  modified_base 3: mod_base = OTHER; note = 2-O-methylribose adenine
  modified_base 3..4: mod_base = OTHER; note = S-phosphorothioate
  modified_base 4: mod_base = OTHER; note = 2-fluororibose uracil
  modified_base 4..5: mod_base = OTHER; note = R-phosphorothioate
  modified_base 5: mod_base = OTHER; note = 2-O-methylribose adenine
  modified_base 5..6: mod_base = OTHER; note = S-phosphorothioate
  modified_base 6: mod_base = OTHER; note = 2-fluororibose guanine
  modified_base 6..7: mod_base = OTHER; note = S-phosphorothioate
  modified_base 7: mod_base = OTHER; note = 2-O-methylribose adenine
  modified_base 7..8: mod_base = OTHER; note = S-phosphorothioate
  modified_base 8: mod_base = OTHER; note = 2-fluororibose guanine
  modified_base 8..9: mod_base = OTHER; note = R-phosphorothioate
  modified_base 9: mod_base = cm
  modified_base 10: mod_base = OTHER; note = 2-fluororibose adenine
  modified_base 11: mod_base = OTHER; note = 2-O-methylribose adenine
  modified_base 12: mod_base = gm
  modified_base 13: mod_base = OTHER; note = 2-O-methylribose adenine
  modified_base 14: mod_base = OTHER; note = 2-fluororibose adenine
  modified_base 15: mod_base = cm
  modified_base 16: mod_base = OTHER; note = 2-fluororibose adenine
  modified_base 17: mod_base = cm
  modified_base 18: mod_base = OTHER; note = 2-fluororibose uracil
  modified_base 19: mod_base = gm
  modified_base 20: mod_base = OTHER; note = 2-fluororibose uracil
  modified_base 21: mod_base = um
  modified_base 21..22: mod_base = OTHER; note = S-phosphorothioate
  modified_base 22: mod_base = um
  modified_base 22..23: mod_base = OTHER; note = S-phosphorothioate
  modified_base 23: mod_base = um
  source 1..23: mol_type = other RNA
ttatagagcaagaacactgtttt

SEQ ID NO: 505 - RNA, 23 nt, synthetic construct
  misc_feature 1..23: note = Synthetic: WV-37218
  misc_feature 1..23: note = Synthetic: SSR-0103335
  modified_base 1: mod_base = um
  modified_base 1..2: mod_base = OTHER; note = S-phosphorothioate
  modified_base 2: mod_base = OTHER; note = 2-fluororibose uracil
  modified_base 2..3: mod_base = OTHER; note = S-phosphorothioate
  modified_base 3: mod_base = OTHER; note = 2-O-methylribose adenine
  modified_base 3..4: mod_base = OTHER; note = S-phosphorothioate
  modified_base 4: mod_base = OTHER; note = 2-fluororibose uracil
  modified_base 4..5: mod_base = OTHER; note = R-phosphorothioate
  modified_base 5: mod_base = OTHER; note = 2-O-methylribose adenine
  modified_base 5..6: mod_base = OTHER; note = S-phosphorothioate
  modified_base 6: mod_base = OTHER; note = 2-fluororibose guanine
  modified_base 6..7: mod_base = OTHER; note = S-phosphorothioate
  modified_base 7: mod_base = OTHER; note = 2-O-methylribose adenine
  modified_base 7..8: mod_base = OTHER; note = S-phosphorothioate
  modified_base 8: mod_base = OTHER; note = 2-fluororibose guanine
  modified_base 8..9: mod_base = OTHER; note = S-phosphorothioate
  modified_base 9: mod_base = cm
  modified_base 10: mod_base = OTHER; note = 2-fluororibose adenine
  modified_base 11: mod_base = OTHER; note = 2-O-methylribose adenine
  modified_base 12: mod_base = gm
  modified_base 13: mod_base = OTHER; note = 2-O-methylribose adenine
  modified_base 14: mod_base = OTHER; note = 2-fluororibose adenine
  modified_base 15: mod_base = cm
  modified_base 16: mod_base = OTHER; note = 2-fluororibose adenine
  modified_base 17: mod_base = cm
  modified_base 18: mod_base = OTHER; note = 2-fluororibose uracil
  modified_base 19: mod_base = gm
  modified_base 20: mod_base = OTHER; note = 2-fluororibose uracil
  modified_base 21: mod_base = um
  modified_base 21..22: mod_base = OTHER; note = S-phosphorothioate
  modified_base 22: mod_base = um
  modified_base 22..23: mod_base = OTHER; note = S-phosphorothioate
  modified_base 23: mod_base = um
  source 1..23: mol_type = other RNA
ttatagagcaagaacactgtttt

SEQ ID NO: 506 - RNA, 23 nt, synthetic construct
  misc_feature 1..23: note = Synthetic: WV-37219
  misc_feature 1..23: note = Synthetic: SSR-0103336
  modified_base 1: mod_base = um
  modified_base 1..2: mod_base = OTHER; note = S-phosphorothioate
  modified_base 2: mod_base = OTHER; note = 2-fluororibose uracil
  modified_base 2..3: mod_base = OTHER; note = S-phosphorothioate
  modified_base 3: mod_base = OTHER; note = 2-O-methylribose adenine
  modified_base 3..4: mod_base = OTHER; note = S-phosphorothioate
  modified_base 4: mod_base = OTHER; note = 2-fluororibose uracil
  modified_base 4..5: mod_base = OTHER; note = S-phosphorothioate
  modified_base 5: mod_base = OTHER; note = 2-O-methylribose adenine
  modified_base 5..6: mod_base = OTHER; note = R-phosphorothioate
  modified_base 6: mod_base = OTHER; note = 2-fluororibose guanine
  modified_base 6..7: mod_base = OTHER; note = R-phosphorothioate
  modified_base 7: mod_base = OTHER; note = 2-O-methylribose adenine
  modified_base 7..8: mod_base = OTHER; note = R-phosphorothioate
  modified_base 8: mod_base = OTHER; note = 2-fluororibose guanine
  modified_base 8..9: mod_base = OTHER; note = R-phosphorothioate
  modified_base 9: mod_base = cm
  modified_base 10: mod_base = OTHER; note = 2-fluororibose adenine
  modified_base 11: mod_base = OTHER; note = 2-O-methylribose adenine
  modified_base 12: mod_base = gm
  modified_base 13: mod_base = OTHER; note = 2-O-methylribose adenine
  modified_base 14: mod_base = OTHER; note = 2-fluororibose adenine
  modified_base 15: mod_base = cm
  modified_base 16: mod_base = OTHER; note = 2-fluororibose adenine
  modified_base 17: mod_base = cm
  modified_base 18: mod_base = OTHER; note = 2-fluororibose uracil
  modified_base 19: mod_base = gm
  modified_base 20: mod_base = OTHER; note = 2-fluororibose uracil
  modified_base 21: mod_base = um
  modified_base 21..22: mod_base = OTHER; note = S-phosphorothioate
  modified_base 22: mod_base = um
  modified_base 22..23: mod_base = OTHER; note = S-phosphorothioate
  modified_base 23: mod_base = um
  source 1..23: mol_type = other RNA
ttatagagcaagaacactgtttt

SEQ ID NO: 507 - RNA, 23 nt, synthetic construct
  misc_feature 1..23: note = Synthetic: WV-37220
  misc_feature 1..23: note = Synthetic: SSR-0103337
  modified_base 1: mod_base = um
  modified_base 1..2: mod_base = OTHER; note = S-phosphorothioate
  modified_base 2: mod_base = OTHER; note = 2-fluororibose uracil
  modified_base 2..3: mod_base = OTHER; note = S-phosphorothioate
  modified_base 3: mod_base = OTHER; note = 2-O-methylribose adenine
  modified_base 3..4: mod_base = OTHER; note = S-phosphorothioate
  modified_base 4: mod_base = OTHER; note = 2-fluororibose uracil
  modified_base 4..5: mod_base = OTHER; note = S-phosphorothioate
  modified_base 5: mod_base = OTHER; note = 2-O-methylribose adenine
  modified_base 5..6: mod_base = OTHER; note = R-phosphorothioate
  modified_base 6: mod_base = OTHER; note = 2-fluororibose guanine
  modified_base 6..7: mod_base = OTHER; note = R-phosphorothioate
  modified_base 7: mod_base = OTHER; note = 2-O-methylribose adenine
  modified_base 7..8: mod_base = OTHER; note = R-phosphorothioate
  modified_base 8: mod_base = OTHER; note = 2-fluororibose guanine
  modified_base 8..9: mod_base = OTHER; note = S-phosphorothioate
  modified_base 9: mod_base = cm
  modified_base 10: mod_base = OTHER; note = 2-fluororibose adenine
  modified_base 11: mod_base = OTHER; note = 2-O-methylribose adenine
  modified_base 12: mod_base = gm
  modified_base 13: mod_base = OTHER; note = 2-O-methylribose adenine
  modified_base 14: mod_base = OTHER; note = 2-fluororibose adenine
  modified_base 15: mod_base = cm
  modified_base 16: mod_base = OTHER; note = 2-fluororibose adenine
  modified_base 17: mod_base = cm
  modified_base 18: mod_base = OTHER; note = 2-fluororibose uracil
  modified_base 19: mod_base = gm
  modified_base 20: mod_base = OTHER; note = 2-fluororibose uracil
  modified_base 21: mod_base = um
  modified_base 21..22: mod_base = OTHER; note = S-phosphorothioate
  modified_base 22: mod_base = um
  modified_base 22..23: mod_base = OTHER; note = S-phosphorothioate
  modified_base 23: mod_base = um
  source 1..23: mol_type = other RNA
ttatagagcaagaacactgtttt

SEQ ID NO: 508 - RNA, 23 nt, synthetic construct
  misc_feature 1..23: note = Synthetic: WV-37221
  misc_feature 1..23: note = Synthetic: SSR-0103338
  modified_base 1: mod_base = um
  modified_base 1..2: mod_base = OTHER; note = S-phosphorothioate
  modified_base 2: mod_base = OTHER; note = 2-fluororibose uracil
  modified_base 2..3: mod_base = OTHER; note = S-phosphorothioate
  modified_base 3: mod_base = OTHER; note = 2-O-methylribose adenine
  modified_base 3..4: mod_base = OTHER; note = S-phosphorothioate
  modified_base 4: mod_base = OTHER; note = 2-fluororibose uracil
  modified_base 4..5: mod_base = OTHER; note = S-phosphorothioate
  modified_base 5: mod_base = OTHER; note = 2-O-methylribose adenine
  modified_base 5..6: mod_base = OTHER; note = R-phosphorothioate
  modified_base 6: mod_base = OTHER; note = 2-fluororibose guanine
  modified_base 6..7: mod_base = OTHER; note = R-phosphorothioate
  modified_base 7: mod_base = OTHER; note = 2-O-methylribose adenine
  modified_base 7..8: mod_base = OTHER; note = S-phosphorothioate
  modified_base 8: mod_base = OTHER; note = 2-fluororibose guanine
  modified_base 8..9: mod_base = OTHER; note = R-phosphorothioate
  modified_base 9: mod_base = cm
  modified_base 10: mod_base = OTHER; note = 2-fluororibose adenine
  modified_base 11: mod_base = OTHER; note = 2-O-methylribose adenine
  modified_base 12: mod_base = gm
  modified_base 13: mod_base = OTHER; note = 2-O-methylribose adenine
  modified_base 14: mod_base = OTHER; note = 2-fluororibose adenine
  modified_base 15: mod_base = cm
  modified_base 16: mod_base = OTHER; note = 2-fluororibose adenine
  modified_base 17: mod_base = cm
  modified_base 18: mod_base = OTHER; note = 2-fluororibose uracil
  modified_base 19: mod_base = gm
  modified_base 20: mod_base = OTHER; note = 2-fluororibose uracil
  modified_base 21: mod_base = um
  modified_base 21..22: mod_base = OTHER; note = S-phosphorothioate
  modified_base 22: mod_base = um
  modified_base 22..23: mod_base = OTHER; note = S-phosphorothioate
  modified_base 23: mod_base = um
  source 1..23: mol_type = other RNA
ttatagagcaagaacactgtttt

SEQ ID NO: 509 - RNA, 23 nt, synthetic construct
  misc_feature 1..23: note = Synthetic: WV-37222
  misc_feature 1..23: note = Synthetic: SSR-0103339
  modified_base 1: mod_base = um
  modified_base 1..2: mod_base = OTHER; note = S-phosphorothioate
  modified_base 2: mod_base = OTHER; note = 2-fluororibose uracil
  modified_base 2..3: mod_base = OTHER; note = S-phosphorothioate
  modified_base 3: mod_base = OTHER; note = 2-O-methylribose adenine
  modified_base 3..4: mod_base = OTHER; note = S-phosphorothioate
  modified_base 4: mod_base = OTHER; note = 2-fluororibose uracil
  modified_base 4..5: mod_base = OTHER; note = S-phosphorothioate
  modified_base 5: mod_base = OTHER; note = 2-O-methylribose adenine
  modified_base 5..6: mod_base = OTHER; note = R-phosphorothioate
  modified_base 6: mod_base = OTHER; note = 2-fluororibose guanine
  modified_base 6..7: mod_base = OTHER; note = R-phosphorothioate
  modified_base 7: mod_base = OTHER; note = 2-O-methylribose adenine
  modified_base 7..8: mod_base = OTHER; note = S-phosphorothioate
  modified_base 8: mod_base = OTHER; note = 2-fluororibose guanine
  modified_base 8..9: mod_base = OTHER; note = S-phosphorothioate
  modified_base 9: mod_base = cm
  modified_base 10: mod_base = OTHER; note = 2-fluororibose adenine
  modified_base 11: mod_base = OTHER; note = 2-O-methylribose adenine
  modified_base 12: mod_base = gm
  modified_base 13: mod_base = OTHER; note = 2-O-methylribose adenine
  modified_base 14: mod_base = OTHER; note = 2-fluororibose adenine
  modified_base 15: mod_base = cm
  modified_base 16: mod_base = OTHER; note = 2-fluororibose adenine
  modified_base 17: mod_base = cm
  modified_base 18: mod_base = OTHER; note = 2-fluororibose uracil
  modified_base 19: mod_base = gm
  modified_base 20: mod_base = OTHER; note = 2-fluororibose uracil
  modified_base 21: mod_base = um
  modified_base 21..22: mod_base = OTHER; note = S-phosphorothioate
  modified_base 22: mod_base = um
  modified_base 22..23: mod_base = OTHER; note = S-phosphorothioate
  modified_base 23: mod_base = um
  source 1..23: mol_type = other RNA
ttatagagcaagaacactgtttt

SEQ ID NO: 510 - RNA, 23 nt, synthetic construct
  misc_feature 1..23: note = Synthetic: WV-37223
  misc_feature 1..23: note = Synthetic: SSR-0103340
  modified_base 1: mod_base = um
  modified_base 1..2: mod_base = OTHER; note = S-phosphorothioate
  modified_base 2: mod_base = OTHER; note = 2-fluororibose uracil
  modified_base 2..3: mod_base = OTHER; note = S-phosphorothioate
  modified_base 3: mod_base = OTHER; note = 2-O-methylribose adenine
  modified_base 3..4: mod_base = OTHER; note = S-phosphorothioate
  modified_base 4: mod_base = OTHER; note = 2-fluororibose uracil
  modified_base 4..5: mod_base = OTHER; note = S-phosphorothioate
  modified_base 5: mod_base = OTHER; note = 2-O-methylribose adenine
  modified_base 5..6: mod_base = OTHER; note = R-phosphorothioate
  modified_base 6: mod_base = OTHER; note = 2-fluororibose guanine
  modified_base 6..7: mod_base = OTHER; note = S-phosphorothioate
  modified_base 7: mod_base = OTHER; note = 2-O-methylribose adenine
  modified_base 7..8: mod_base = OTHER; note = R-phosphorothioate
  modified_base 8: mod_base = OTHER; note = 2-fluororibose guanine
  modified_base 8..9: mod_base = OTHER; note = R-phosphorothioate
  modified_base 9: mod_base = cm
  modified_base 10: mod_base = OTHER; note = 2-fluororibose adenine
  modified_base 11: mod_base = OTHER; note = 2-O-methylribose adenine
  modified_base 12: mod_base = gm
  modified_base 13: mod_base = OTHER; note = 2-O-methylribose adenine
  modified_base 14: mod_base = OTHER; note = 2-fluororibose adenine
  modified_base 15: mod_base = cm
  modified_base 16: mod_base = OTHER; note = 2-fluororibose adenine
  modified_base 17: mod_base = cm
  modified_base 18: mod_base = OTHER; note = 2-fluororibose uracil
  modified_base 19: mod_base = gm
  modified_base 20: mod_base = OTHER; note = 2-fluororibose uracil
  modified_base 21: mod_base = um
  modified_base 21..22: mod_base = OTHER; note = S-phosphorothioate
  modified_base 22: mod_base = um
  modified_base 22..23: mod_base = OTHER; note = S-phosphorothioate
  modified_base 23: mod_base = um
  source 1..23: mol_type = other RNA
ttatagagcaagaacactgtttt

SEQ ID NO: 511 - RNA, 23 nt, synthetic construct
  misc_feature 1..23: note = Synthetic: WV-37224
  misc_feature 1..23: note = Synthetic: SSR-0103341
  modified_base 1: mod_base = um
  modified_base 1..2: mod_base = OTHER; note = S-phosphorothioate
  modified_base 2: mod_base = OTHER; note = 2-fluororibose uracil
  modified_base 2..3: mod_base = OTHER; note = S-phosphorothioate
  modified_base 3: mod_base = OTHER; note = 2-O-methylribose adenine
  modified_base 3..4: mod_base = OTHER; note = S-phosphorothioate
  modified_base 4: mod_base = OTHER; note = 2-fluororibose uracil
  modified_base 4..5: mod_base = OTHER; note = S-phosphorothioate
  modified_base 5: mod_base = OTHER; note = 2-O-methylribose adenine
  modified_base 5..6: mod_base = OTHER; note = R-phosphorothioate
  modified_base 6: mod_base = OTHER; note = 2-fluororibose guanine
  modified_base 6..7: mod_base = OTHER; note = S-phosphorothioate
  modified_base 7: mod_base = OTHER; note = 2-O-methylribose adenine
  modified_base 7..8: mod_base = OTHER; note = R-phosphorothioate
  modified_base 8: mod_base = OTHER; note = 2-fluororibose guanine
  modified_base 8..9: mod_base = OTHER; note = S-phosphorothioate
  modified_base 9: mod_base = cm
  modified_base 10: mod_base = OTHER; note = 2-fluororibose adenine
  modified_base 11: mod_base = OTHER; note = 2-O-methylribose adenine
  modified_base 12: mod_base = gm
  modified_base 13: mod_base = OTHER; note = 2-O-methylribose adenine
  modified_base 14: mod_base = OTHER; note = 2-fluororibose adenine
  modified_base 15: mod_base = cm
  modified_base 16: mod_base = OTHER; note = 2-fluororibose adenine
  modified_base 17: mod_base = cm
  modified_base 18: mod_base = OTHER; note = 2-fluororibose uracil
  modified_base 19: mod_base = gm
  modified_base 20: mod_base = OTHER; note = 2-fluororibose uracil
  modified_base 21: mod_base = um
  modified_base 21..22: mod_base = OTHER; note = S-phosphorothioate
  modified_base 22: mod_base = um
  modified_base 22..23: mod_base = OTHER; note = S-phosphorothioate
  modified_base 23: mod_base = um
  source 1..23: mol_type = other RNA
ttatagagcaagaacactgtttt

SEQ ID NO: 512 - RNA, 23 nt, synthetic construct
  misc_feature 1..23: note = Synthetic: WV-37225
  misc_feature 1..23: note = Synthetic: SSR-0103342
  modified_base 1: mod_base = um
  modified_base 1..2: mod_base = OTHER; note = S-phosphorothioate
  modified_base 2: mod_base = OTHER; note = 2-fluororibose uracil
  modified_base 2..3: mod_base = OTHER; note = S-phosphorothioate
  modified_base 3: mod_base = OTHER; note = 2-O-methylribose adenine
  modified_base 3..4: mod_base = OTHER; note = S-phosphorothioate
  modified_base 4: mod_base = OTHER; note = 2-fluororibose uracil
  modified_base 4..5: mod_base = OTHER; note = S-phosphorothioate
  modified_base 5: mod_base = OTHER; note = 2-O-methylribose adenine
  modified_base 5..6: mod_base = OTHER; note = R-phosphorothioate
  modified_base 6: mod_base = OTHER; note = 2-fluororibose guanine
  modified_base 6..7: mod_base = OTHER; note = S-phosphorothioate
  modified_base 7: mod_base = OTHER; note = 2-O-methylribose adenine
  modified_base 7..8: mod_base = OTHER; note = S-phosphorothioate
  modified_base 8: mod_base = OTHER; note = 2-fluororibose guanine
  modified_base 8..9: mod_base = OTHER; note = R-phosphorothioate
  modified_base 9: mod_base = cm
  modified_base 10: mod_base = OTHER; note = 2-fluororibose adenine
  modified_base 11: mod_base = OTHER; note = 2-O-methylribose adenine
  modified_base 12: mod_base = gm
  modified_base 13: mod_base = OTHER; note = 2-O-methylribose adenine
  modified_base 14: mod_base = OTHER; note = 2-fluororibose adenine
  modified_base 15: mod_base = cm
  modified_base 16: mod_base = OTHER; note = 2-fluororibose adenine
  modified_base 17: mod_base = cm
  modified_base 18: mod_base = OTHER; note = 2-fluororibose uracil
  modified_base 19: mod_base = gm
  modified_base 20: mod_base = OTHER; note = 2-fluororibose uracil
  modified_base 21: mod_base = um
  modified_base 21..22: mod_base = OTHER; note = S-phosphorothioate
  modified_base 22: mod_base = um
  modified_base 22..23: mod_base = OTHER; note = S-phosphorothioate
  modified_base 23: mod_base = um
  source 1..23: mol_type = other RNA
ttatagagcaagaacactgtttt

SEQ ID NO: 513 - RNA, 23 nt, synthetic construct
  misc_feature 1..23: note = Synthetic: WV-37226
  misc_feature 1..23: note = Synthetic: SSR-0103343
  modified_base 1: mod_base = um
  modified_base 1..2: mod_base = OTHER; note = S-phosphorothioate
  modified_base 2: mod_base = OTHER; note = 2-fluororibose uracil
  modified_base 2..3: mod_base = OTHER; note = S-phosphorothioate
  modified_base 3: mod_base = OTHER; note = 2-O-methylribose adenine
  modified_base 3..4: mod_base = OTHER; note = S-phosphorothioate
  modified_base 4: mod_base = OTHER; note = 2-fluororibose uracil
  modified_base 4..5: mod_base = OTHER; note = S-phosphorothioate
  modified_base 5: mod_base = OTHER; note = 2-O-methylribose adenine
  modified_base 5..6: mod_base = OTHER; note = R-phosphorothioate
  modified_base 6: mod_base = OTHER; note = 2-fluororibose guanine
  modified_base 6..7: mod_base = OTHER; note = S-phosphorothioate
  modified_base 7: mod_base = OTHER; note = 2-O-methylribose adenine
  modified_base 7..8: mod_base = OTHER; note = S-phosphorothioate
  modified_base 8: mod_base = OTHER; note = 2-fluororibose guanine
  modified_base 8..9: mod_base = OTHER; note = S-phosphorothioate
  modified_base 9: mod_base = cm
  modified_base 10: mod_base = OTHER; note = 2-fluororibose adenine
  modified_base 11: mod_base = OTHER; note = 2-O-methylribose adenine
  modified_base 12: mod_base = gm
  modified_base 13: mod_base = OTHER; note = 2-O-methylribose adenine
  modified_base 14: mod_base = OTHER; note = 2-fluororibose adenine
  modified_base 15: mod_base = cm
  modified_base 16: mod_base = OTHER; note = 2-fluororibose adenine
  modified_base 17: mod_base = cm
  modified_base 18: mod_base = OTHER; note = 2-fluororibose uracil
  modified_base 19: mod_base = gm
  modified_base 20: mod_base = OTHER; note = 2-fluororibose uracil
  modified_base 21: mod_base = um
  modified_base 21..22: mod_base = OTHER; note = S-phosphorothioate
  modified_base 22: mod_base = um
  modified_base 22..23: mod_base = OTHER; note = S-phosphorothioate
  modified_base 23: mod_base = um
  source 1..23: mol_type = other RNA
ttatagagcaagaacactgtttt

SEQ ID NO: 514 - RNA, 23 nt, synthetic construct
  misc_feature 1..23: note = Synthetic: WV-37227
  misc_feature 1..23: note = Synthetic: SSR-0103344
  modified_base 1: mod_base = um
  modified_base 1..2: mod_base = OTHER; note = S-phosphorothioate
  modified_base 2: mod_base = OTHER; note = 2-fluororibose uracil
  modified_base 2..3: mod_base = OTHER; note = S-phosphorothioate
  modified_base 3: mod_base = OTHER; note = 2-O-methylribose adenine
  modified_base 3..4: mod_base = OTHER; note = S-phosphorothioate
  modified_base 4: mod_base = OTHER; note = 2-fluororibose uracil
  modified_base 4..5: mod_base = OTHER; note = S-phosphorothioate
  modified_base 5: mod_base = OTHER; note = 2-O-methylribose adenine
  modified_base 5..6: mod_base = OTHER; note = S-phosphorothioate
  modified_base 6: mod_base = OTHER; note = 2-fluororibose guanine
  modified_base 6..7: mod_base = OTHER; note = R-phosphorothioate
  modified_base 7: mod_base = OTHER; note = 2-O-methylribose adenine
  modified_base 7..8: mod_base = OTHER; note = R-phosphorothioate
  modified_base 8: mod_base = OTHER; note = 2-fluororibose guanine
  modified_base 8..9: mod_base = OTHER; note = R-phosphorothioate
  modified_base 9: mod_base = cm
  modified_base 10: mod_base = OTHER; note = 2-fluororibose adenine
  modified_base 11: mod_base = OTHER; note = 2-O-methylribose adenine
  modified_base 12: mod_base = gm
  modified_base 13: mod_base = OTHER; note = 2-O-methylribose adenine
  modified_base 14: mod_base = OTHER; note = 2-fluororibose adenine
  modified_base 15: mod_base = cm
  modified_base 16: mod_base = OTHER; note = 2-fluororibose adenine
  modified_base 17: mod_base = cm
  modified_base 18: mod_base = OTHER; note = 2-fluororibose uracil
  modified_base 19: mod_base = gm
  modified_base 20: mod_base = OTHER; note = 2-fluororibose uracil
  modified_base 21: mod_base = um
  modified_base 21..22: mod_base = OTHER; note = S-phosphorothioate
  modified_base 22: mod_base = um
  modified_base 22..23: mod_base = OTHER; note = S-phosphorothioate
  modified_base 23: mod_base = um
  source 1..23: mol_type = other RNA
ttatagagcaagaacactgtttt

SEQ ID NO: 515 - RNA, 23 nt, synthetic construct
  misc_feature 1..23: note = Synthetic: WV-37228
  misc_feature 1..23: note = Synthetic: SSR-0103345
  modified_base 1: mod_base = um
  modified_base 1..2: mod_base = OTHER; note = S-phosphorothioate
  modified_base 2: mod_base = OTHER; note = 2-fluororibose uracil
  modified_base 2..3: mod_base = OTHER; note = S-phosphorothioate
  modified_base 3: mod_base = OTHER; note = 2-O-methylribose adenine
  modified_base 3..4: mod_base = OTHER; note = S-phosphorothioate
  modified_base 4: mod_base = OTHER; note = 2-fluororibose uracil
  modified_base 4..5: mod_base = OTHER; note = S-phosphorothioate
  modified_base 5: mod_base = OTHER; note = 2-O-methylribose adenine
  modified_base 5..6: mod_base = OTHER; note = S-phosphorothioate
  modified_base 6: mod_base = OTHER; note = 2-fluororibose guanine
  modified_base 6..7: mod_base = OTHER; note = R-phosphorothioate
  modified_base 7: mod_base = OTHER; note = 2-O-methylribose adenine
  modified_base 7..8: mod_base = OTHER; note = R-phosphorothioate
  modified_base 8: mod_base = OTHER; note = 2-fluororibose guanine
  modified_base 8..9: mod_base = OTHER; note = S-phosphorothioate
  modified_base 9: mod_base = cm
  modified_base 10: mod_base = OTHER; note = 2-fluororibose adenine
  modified_base 11: mod_base = OTHER; note = 2-O-methylribose adenine
  modified_base 12: mod_base = gm
  modified_base 13: mod_base = OTHER; note = 2-O-methylribose adenine
  modified_base 14: mod_base = OTHER; note = 2-fluororibose adenine
  modified_base 15: mod_base = cm
  modified_base 16: mod_base = OTHER; note = 2-fluororibose adenine
  modified_base 17: mod_base = cm
  modified_base 18: mod_base = OTHER; note = 2-fluororibose uracil
  modified_base 19: mod_base = gm
  modified_base 20: mod_base = OTHER; note = 2-fluororibose uracil
  modified_base 21: mod_base = um
  modified_base 21..22: mod_base = OTHER; note = S-phosphorothioate
  modified_base 22: mod_base = um
  modified_base 22..23: mod_base = OTHER; note = S-phosphorothioate
  modified_base 23: mod_base = um
  source 1..23: mol_type = other RNA
ttatagagcaagaacactgtttt

SEQ ID NO: 516 - RNA, 23 nt, synthetic construct
  misc_feature 1..23: note = Synthetic: WV-37229
  misc_feature 1..23: note = Synthetic: SSR-0103346
  modified_base 1: mod_base = um
  modified_base 1..2: mod_base = OTHER; note = S-phosphorothioate
  modified_base 2: mod_base = OTHER; note = 2-fluororibose uracil
  modified_base 2..3: mod_base = OTHER; note = S-phosphorothioate
  modified_base 3: mod_base = OTHER; note = 2-O-methylribose adenine
  modified_base 3..4: mod_base = OTHER; note = S-phosphorothioate
  modified_base 4: mod_base = OTHER; note = 2-fluororibose uracil
  modified_base 4..5: mod_base = OTHER; note = S-phosphorothioate
  modified_base 5: mod_base = OTHER; note = 2-O-methylribose adenine
  modified_base 5..6: mod_base = OTHER; note = S-phosphorothioate
  modified_base 6: mod_base = OTHER; note = 2-fluororibose guanine
  modified_base 6..7: mod_base = OTHER; note = R-phosphorothioate
  modified_base 7: mod_base = OTHER; note = 2-O-methylribose adenine
  modified_base 7..8: mod_base = OTHER; note = S-phosphorothioate
  modified_base 8: mod_base = OTHER; note = 2-fluororibose guanine
  modified_base 8..9: mod_base = OTHER; note = R-phosphorothioate
  modified_base 9: mod_base = cm
  modified_base 10: mod_base = OTHER; note = 2-fluororibose adenine
  modified_base 11: mod_base = OTHER; note = 2-O-methylribose adenine
  modified_base 12: mod_base = gm
  modified_base 13: mod_base = OTHER; note = 2-O-methylribose adenine
  modified_base 14: mod_base = OTHER; note = 2-fluororibose adenine
  modified_base 15: mod_base = cm
  modified_base 16: mod_base = OTHER; note = 2-fluororibose adenine
  modified_base 17: mod_base = cm
  modified_base 18: mod_base = OTHER; note = 2-fluororibose uracil
  modified_base 19: mod_base = gm
  modified_base 20: mod_base = OTHER; note = 2-fluororibose uracil
  modified_base 21: mod_base = um
  modified_base 21..22: mod_base = OTHER; note = S-phosphorothioate
  modified_base 22: mod_base = um
  modified_base 22..23: mod_base = OTHER; note = S-phosphorothioate
  modified_base 23: mod_base = um
  source 1..23: mol_type = other RNA
ttatagagcaagaacactgtttt

SEQ ID NO: 517 - RNA, 23 nt, synthetic construct
  misc_feature 1..23: note = Synthetic: WV-37230
  misc_feature 1..23: note = Synthetic: SSR-0103347
  modified_base 1: mod_base = um
  modified_base 1..2: mod_base = OTHER; note = S-phosphorothioate
  modified_base 2: mod_base = OTHER; note = 2-fluororibose uracil
  modified_base 2..3: mod_base = OTHER; note = S-phosphorothioate
  modified_base 3: mod_base = OTHER; note = 2-O-methylribose adenine
  modified_base 3..4: mod_base = OTHER; note = S-phosphorothioate
  modified_base 4: mod_base = OTHER; note = 2-fluororibose uracil
  modified_base 4..5: mod_base = OTHER; note = S-phosphorothioate
  modified_base 5: mod_base = OTHER; note = 2-O-methylribose adenine
  modified_base 5..6: mod_base = OTHER; note = S-phosphorothioate
  modified_base 6: mod_base = OTHER; note = 2-fluororibose guanine
  modified_base 6..7: mod_base = OTHER; note = R-phosphorothioate
  modified_base 7: mod_base = OTHER; note = 2-O-methylribose adenine
  modified_base 7..8: mod_base = OTHER; note = S-phosphorothioate
  modified_base 8: mod_base = OTHER; note = 2-fluororibose guanine
  modified_base 8..9: mod_base = OTHER; note = S-phosphorothioate
  modified_base 9: mod_base = cm
  modified_base 10: mod_base = OTHER; note = 2-fluororibose adenine
  modified_base 11: mod_base = OTHER; note = 2-O-methylribose adenine
  modified_base 12: mod_base = gm
  modified_base 13: mod_base = OTHER; note = 2-O-methylribose adenine
  modified_base 14: mod_base = OTHER; note = 2-fluororibose adenine
  modified_base 15: mod_base = cm
  modified_base 16: mod_base = OTHER; note = 2-fluororibose adenine
  modified_base 17: mod_base = cm
  modified_base 18: mod_base = OTHER; note = 2-fluororibose uracil
  modified_base 19: mod_base = gm
  modified_base 20: mod_base = OTHER; note = 2-fluororibose uracil
  modified_base 21: mod_base = um
  modified_base 21..22: mod_base = OTHER; note = S-phosphorothioate
  modified_base 22: mod_base = um
  modified_base 22..23: mod_base = OTHER; note = S-phosphorothioate
  modified_base 23: mod_base = um
  source 1..23: mol_type = other RNA
ttatagagcaagaacactgtttt

SEQ ID NO: 518 - RNA, 23 nt, synthetic construct
  misc_feature 1..23: note = Synthetic: WV-37231
  misc_feature 1..23: note = Synthetic: SSR-0103348
  modified_base 1: mod_base = um
  modified_base 1..2: mod_base = OTHER; note = S-phosphorothioate
  modified_base 2: mod_base = OTHER; note = 2-fluororibose uracil
  modified_base 2..3: mod_base = OTHER; note = S-phosphorothioate
  modified_base 3: mod_base = OTHER; note = 2-O-methylribose adenine
  modified_base 3..4: mod_base = OTHER; note = S-phosphorothioate
  modified_base 4: mod_base = OTHER; note = 2-fluororibose uracil
  modified_base 4..5: mod_base = OTHER; note = S-phosphorothioate
  modified_base 5: mod_base = OTHER; note = 2-O-methylribose adenine
  modified_base 5..6: mod_base = OTHER; note = S-phosphorothioate
  modified_base 6: mod_base = OTHER; note = 2-fluororibose guanine
  modified_base 6..7: mod_base = OTHER; note = S-phosphorothioate
  modified_base 7: mod_base = OTHER; note = 2-O-methylribose adenine
  modified_base 7..8: mod_base = OTHER; note = R-phosphorothioate
  modified_base 8: mod_base = OTHER; note = 2-fluororibose guanine
  modified_base 8..9: mod_base = OTHER; note = R-phosphorothioate
  modified_base 9: mod_base = cm
  modified_base 10: mod_base = OTHER; note = 2-fluororibose adenine
  modified_base 11: mod_base = OTHER; note = 2-O-methylribose adenine
  modified_base 12: mod_base = gm
  modified_base 13: mod_base = OTHER; note = 2-O-methylribose adenine
  modified_base 14: mod_base = OTHER; note = 2-fluororibose adenine
  modified_base 15: mod_base = cm
  modified_base 16: mod_base = OTHER; note = 2-fluororibose adenine
  modified_base 17: mod_base = cm
  modified_base 18: mod_base = OTHER; note = 2-fluororibose uracil
  modified_base 19: mod_base = gm
  modified_base 20: mod_base = OTHER; note = 2-fluororibose uracil
  modified_base 21: mod_base = um
  modified_base 21..22: mod_base = OTHER; note = S-phosphorothioate
  modified_base 22: mod_base = um
  modified_base 22..23: mod_base = OTHER; note = S-phosphorothioate
  modified_base 23: mod_base = um
  source 1..23: mol_type = other RNA
ttatagagcaagaacactgtttt

SEQ ID NO: 519 - RNA, 23 nt, synthetic construct
  misc_feature 1..23: note = Synthetic: WV-37232
  misc_feature 1..23: note = Synthetic: SSR-0103349
  modified_base 1: mod_base = um
  modified_base 1..2: mod_base = OTHER; note = S-phosphorothioate
  modified_base 2: mod_base = OTHER; note = 2-fluororibose uracil
  modified_base 2..3: mod_base = OTHER; note = S-phosphorothioate
  modified_base 3: mod_base = OTHER; note = 2-O-methylribose adenine
  modified_base 3..4: mod_base = OTHER; note = S-phosphorothioate
  modified_base 4: mod_base = OTHER; note = 2-fluororibose uracil
  modified_base 4..5: mod_base = OTHER; note = S-phosphorothioate
  modified_base 5: mod_base = OTHER; note = 2-O-methylribose adenine
  modified_base 5..6: mod_base = OTHER; note = S-phosphorothioate
  modified_base 6: mod_base = OTHER; note = 2-fluororibose guanine
  modified_base 6..7: mod_base = OTHER; note = S-phosphorothioate
  modified_base 7: mod_base = OTHER; note = 2-O-methylribose adenine
  modified_base 7..8: mod_base = OTHER; note = R-phosphorothioate
  modified_base 8: mod_base = OTHER; note = 2-fluororibose guanine
  modified_base 8..9: mod_base = OTHER; note = S-phosphorothioate
  modified_base 9: mod_base = cm
  modified_base 10: mod_base = OTHER; note = 2-fluororibose adenine
  modified_base 11: mod_base = OTHER; note = 2-O-methylribose adenine
  modified_base 12: mod_base = gm
  modified_base 13: mod_base = OTHER; note = 2-O-methylribose adenine
  modified_base 14: mod_base = OTHER; note = 2-fluororibose adenine
  modified_base 15: mod_base = cm
  modified_base 16: mod_base = OTHER; note = 2-fluororibose adenine
  modified_base 17: mod_base = cm
  modified_base 18: mod_base = OTHER; note = 2-fluororibose uracil
  modified_base 19: mod_base = gm
  modified_base 20: mod_base = OTHER; note = 2-fluororibose uracil
  modified_base 21: mod_base = um
  modified_base 21..22: mod_base = OTHER; note = S-phosphorothioate
  modified_base 22: mod_base = um
  modified_base 22..23: mod_base = OTHER; note = S-phosphorothioate
  modified_base 23: mod_base = um
  source 1..23: mol_type = other RNA
ttatagagcaagaacactgtttt

SEQ ID NO: 520 - RNA, 23 nt, synthetic construct
  misc_feature 1..23: note = Synthetic: WV-37233
  misc_feature 1..23: note = Synthetic: SSR-0103350
  modified_base 1: mod_base = um
  modified_base 1..2: mod_base = OTHER; note = S-phosphorothioate
  modified_base 2: mod_base = OTHER; note = 2-fluororibose uracil
  modified_base 2..3: mod_base = OTHER; note = S-phosphorothioate
  modified_base 3: mod_base = OTHER; note = 2-O-methylribose adenine
  modified_base 3..4: mod_base = OTHER; note = S-phosphorothioate
  modified_base 4: mod_base = OTHER; note = 2-fluororibose uracil
  modified_base 4..5: mod_base = OTHER; note = S-phosphorothioate
  modified_base 5: mod_base = OTHER; note = 2-O-methylribose adenine
  modified_base 5..6: mod_base = OTHER; note = S-phosphorothioate
  modified_base 6: mod_base = OTHER; note = 2-fluororibose guanine
  modified_base 6..7: mod_base = OTHER; note = S-phosphorothioate
  modified_base 7: mod_base = OTHER; note = 2-O-methylribose adenine
  modified_base 7..8: mod_base = OTHER; note = S-phosphorothioate
  modified_base 8: mod_base = OTHER; note = 2-fluororibose guanine
  modified_base 8..9: mod_base = OTHER; note = R-phosphorothioate
  modified_base 9: mod_base = cm
  modified_base 10: mod_base = OTHER; note = 2-fluororibose adenine
  modified_base 11: mod_base = OTHER; note = 2-O-methylribose adenine
  modified_base 12: mod_base = gm
  modified_base 13: mod_base = OTHER; note = 2-O-methylribose adenine
  modified_base 14: mod_base = OTHER; note = 2-fluororibose adenine
  modified_base 15: mod_base = cm
  modified_base 16: mod_base = OTHER; note = 2-fluororibose adenine
  modified_base 17: mod_base = cm
  modified_base 18: mod_base = OTHER; note = 2-fluororibose uracil
  modified_base 19: mod_base = gm
  modified_base 20: mod_base = OTHER; note = 2-fluororibose uracil
  modified_base 21: mod_base = um
  modified_base 21..22: mod_base = OTHER; note = S-phosphorothioate
  modified_base 22: mod_base = um
  modified_base 22..23: mod_base = OTHER; note = S-phosphorothioate
  modified_base 23: mod_base = um
  source 1..23: mol_type = other RNA
ttatagagcaagaacactgtttt

SEQ ID NO: 521 - RNA, 23 nt, synthetic construct
  misc_feature 1..23: note = Synthetic: WV-37234
  misc_feature 1..23: note = Synthetic: SSR-0103351
  modified_base 1: mod_base = um
  modified_base 1..2: mod_base = OTHER; note = S-phosphorothioate
  modified_base 2: mod_base = OTHER; note = 2-fluororibose uracil
  modified_base 2..3: mod_base = OTHER; note = S-phosphorothioate
  modified_base 3: mod_base = OTHER; note = 2-O-methylribose adenine
  modified_base 3..4: mod_base = OTHER; note = S-phosphorothioate
  modified_base 4: mod_base = OTHER; note = 2-fluororibose uracil
  modified_base 4..5: mod_base = OTHER; note = S-phosphorothioate
  modified_base 5: mod_base = OTHER; note = 2-O-methylribose adenine
  modified_base 5..6: mod_base = OTHER; note = S-phosphorothioate
  modified_base 6: mod_base = OTHER; note = 2-fluororibose guanine
  modified_base 6..7: mod_base = OTHER; note = S-phosphorothioate
  modified_base 7: mod_base = OTHER; note = 2-O-methylribose adenine
  modified_base 7..8: mod_base = OTHER; note = S-phosphorothioate
  modified_base 8: mod_base = OTHER; note = 2-fluororibose guanine
  modified_base 8..9: mod_base = OTHER; note = S-phosphorothioate
  modified_base 9: mod_base = cm
  modified_base 10: mod_base = OTHER; note = 2-fluororibose adenine
  modified_base 11: mod_base = OTHER; note = 2-O-methylribose adenine
  modified_base 12: mod_base = gm
  modified_base 13: mod_base = OTHER; note = 2-O-methylribose adenine
  modified_base 14: mod_base = OTHER; note = 2-fluororibose adenine
  modified_base 15: mod_base = cm
  modified_base 16: mod_base = OTHER; note = 2-fluororibose adenine
  modified_base 17: mod_base = cm
  modified_base 18: mod_base = OTHER; note = 2-fluororibose uracil
  modified_base 19: mod_base = gm
  modified_base 20: mod_base = OTHER; note = 2-fluororibose uracil
  modified_base 21: mod_base = um
  modified_base 21..22: mod_base = OTHER; note = S-phosphorothioate
  modified_base 22: mod_base = um
  modified_base 22..23: mod_base = OTHER; note = S-phosphorothioate
  modified_base 23: mod_base = um
  source 1..23: mol_type = other RNA
ttatagagcaagaacactgtttt

SEQ ID NO: 522 - RNA, 23 nt, synthetic construct
  misc_feature 1..23: note = Synthetic: WV-37235
  misc_feature 1..23: note = Synthetic: SSR-0102991
  modified_base 1: mod_base = um
  modified_base 1..2: mod_base = OTHER; note = R-phosphorothioate
  modified_base 2: mod_base = OTHER; note = 2-fluororibose uracil
  modified_base 2..3: mod_base = OTHER; note = R-phosphorothioate
  modified_base 3: mod_base = OTHER; note = 2-O-methylribose adenine
  modified_base 3..4: mod_base = OTHER; note = R-phosphorothioate
  modified_base 4: mod_base = OTHER; note = 2-fluororibose uracil
  modified_base 4..5: mod_base = OTHER; note = R-phosphorothioate
  modified_base 5: mod_base = OTHER; note = 2-O-methylribose adenine
  modified_base 5..6: mod_base = OTHER; note = R-phosphorothioate
  modified_base 6: mod_base = OTHER; note = 2-fluororibose guanine
  modified_base 6..7: mod_base = OTHER; note = R-phosphorothioate
  modified_base 7: mod_base = OTHER; note = 2-O-methylribose adenine
  modified_base 7..8: mod_base = OTHER; note = R-phosphorothioate
  modified_base 8: mod_base = OTHER; note = 2-fluororibose guanine
  modified_base 8..9: mod_base = OTHER; note = R-phosphorothioate
  modified_base 9: mod_base = cm
  modified_base 10: mod_base = OTHER; note = 2-fluororibose adenine
  modified_base 11: mod_base = OTHER; note = 2-O-methylribose adenine
  modified_base 12: mod_base = gm
  modified_base 13: mod_base = OTHER; note = 2-O-methylribose adenine
  modified_base 14: mod_base = OTHER; note = 2-fluororibose adenine
  modified_base 15: mod_base = cm
  modified_base 16: mod_base = OTHER; note = 2-fluororibose adenine
  modified_base 17: mod_base = cm
  modified_base 18: mod_base = OTHER; note = 2-fluororibose uracil
  modified_base 19: mod_base = gm
  modified_base 20: mod_base = OTHER; note = 2-fluororibose uracil
  modified_base 21: mod_base = um
  modified_base 21..22: mod_base = OTHER; note = S-phosphorothioate
  modified_base 22: mod_base = um
  modified_base 22..23: mod_base = OTHER; note = S-phosphorothioate
  modified_base 23: mod_base = um
  source 1..23: mol_type = other RNA
ttatagagcaagaacactgtttt

SEQ ID NO: 523 - RNA, 23 nt, synthetic construct
  misc_feature 1..23: note = Synthetic: WV-37236
  misc_feature 1..23: note = Synthetic: SSR-0103398
  modified_base 1: mod_base = um
  modified_base 1..2: mod_base = OTHER; note = phosphorothioate
  modified_base 2: mod_base = OTHER; note = 2-fluororibose uracil
  modified_base 2..3: mod_base = OTHER; note = phosphorothioate
  modified_base 3: mod_base = OTHER; note = 2-O-methylribose adenine
  modified_base 3..4: mod_base = OTHER; note = phosphorothioate
  modified_base 4: mod_base = OTHER; note = 2-fluororibose uracil
  modified_base 4..5: mod_base = OTHER; note = phosphorothioate
  modified_base 5: mod_base = OTHER; note = 2-O-methylribose adenine
  modified_base 5..6: mod_base = OTHER; note = phosphorothioate
  modified_base 6: mod_base = OTHER; note = 2-fluororibose guanine
  modified_base 6..7: mod_base = OTHER; note = phosphorothioate
  modified_base 7: mod_base = OTHER; note = 2-O-methylribose adenine
  modified_base 7..8: mod_base = OTHER; note = phosphorothioate
  modified_base 8: mod_base = OTHER; note = 2-fluororibose guanine
  modified_base 8..9: mod_base = OTHER; note = phosphorothioate
  modified_base 9: mod_base = cm
  modified_base 10: mod_base = OTHER; note = 2-fluororibose adenine
  modified_base 11: mod_base = OTHER; note = 2-O-methylribose adenine
  modified_base 12: mod_base = gm
  modified_base 13: mod_base = OTHER; note = 2-O-methylribose adenine
  modified_base 14: mod_base = OTHER; note = 2-fluororibose adenine
  modified_base 15: mod_base = cm
  modified_base 16: mod_base = OTHER; note = 2-fluororibose adenine
  modified_base 17: mod_base = cm
  modified_base 18: mod_base = OTHER; note = 2-fluororibose uracil
  modified_base 19: mod_base = gm
  modified_base 20: mod_base = OTHER; note = 2-fluororibose uracil
  modified_base 21: mod_base = um
  modified_base 21..22: mod_base = OTHER; note = phosphorothioate
  modified_base 22: mod_base = um
  modified_base 22..23: mod_base = OTHER; note = phosphorothioate
  modified_base 23: mod_base = um
  source 1..23: mol_type = other RNA
ttatagagcaagaacactgtttt

SEQ ID NO: 524 - RNA, 23 nt, synthetic construct
  misc_feature 1..23: note = Synthetic: WV-38082
  misc_feature 1..23: note = Synthetic: SSR-0103481
  modified_base 1: mod_base = um
  modified_base 2: mod_base = OTHER; note = 2-fluororibose uracil
  modified_base 3: mod_base = OTHER; note = 2-O-methylribose adenine
  modified_base 4: mod_base = OTHER; note = 2-fluororibose uracil
  modified_base 5: mod_base = OTHER; note = 2-O-methylribose adenine
  modified_base 6: mod_base = OTHER; note = 2-fluororibose guanine
  modified_base 7: mod_base = OTHER; note = 2-O-methylribose adenine
  modified_base 8: mod_base = OTHER; note = 2-fluororibose guanine
  modified_base 9: mod_base = cm
  modified_base 10: mod_base = OTHER; note = 2-fluororibose adenine
  modified_base 11: mod_base = OTHER; note = 2-O-methylribose adenine
  modified_base 12: mod_base = gm
  modified_base 13: mod_base = OTHER; note = 2-O-methylribose adenine
  modified_base 14: mod_base = OTHER; note = 2-fluororibose adenine
  modified_base 15: mod_base = cm
  modified_base 16: mod_base = OTHER; note = 2-fluororibose adenine
  modified_base 17: mod_base = cm
  modified_base 18: mod_base = OTHER; note = 2-fluororibose uracil
  modified_base 19: mod_base = gm
  modified_base 20: mod_base = OTHER; note = 2-fluororibose uracil
  modified_base 21: mod_base = um
  modified_base 21..22: mod_base = OTHER; note = phosphorothioate
  modified_base 22: mod_base = um
  modified_base 22..23: mod_base = OTHER; note = phosphorothioate
  modified_base 23: mod_base = um
  source 1..23: mol_type = other RNA
ttatagagcaagaacactgtttt

SEQ ID NO: 525 - RNA, 23 nt, synthetic construct
  misc_feature 1..23: note = Synthetic: WV-38083
  misc_feature 1..23: note = Synthetic: SSR-0103480
  modified_base 1: mod_base = um
  modified_base 2: mod_base = OTHER; note = 2-fluororibose uracil
  modified_base 3: mod_base = OTHER; note = 2-O-methylribose adenine
  modified_base 4: mod_base = OTHER; note = 2-fluororibose uracil
  modified_base 5: mod_base = OTHER; note = 2-O-methylribose adenine
  modified_base 6: mod_base = OTHER; note = 2-fluororibose guanine
  modified_base 7: mod_base = OTHER; note = 2-O-methylribose adenine
  modified_base 8: mod_base = OTHER; note = 2-fluororibose guanine
  modified_base 9: mod_base = cm
  modified_base 10: mod_base = OTHER; note = 2-fluororibose adenine
  modified_base 11: mod_base = OTHER; note = 2-O-methylribose adenine
  modified_base 12: mod_base = gm
  modified_base 13: mod_base = OTHER; note = 2-O-methylribose adenine
  modified_base 14: mod_base = OTHER; note = 2-fluororibose adenine
  modified_base 15: mod_base = cm
  modified_base 16: mod_base = OTHER; note = 2-fluororibose adenine
  modified_base 17: mod_base = cm
  modified_base 18: mod_base = OTHER; note = 2-fluororibose uracil
  modified_base 19: mod_base = gm
  modified_base 20: mod_base = OTHER; note = 2-fluororibose uracil
  modified_base 21: mod_base = um
  modified_base 21..22: mod_base = OTHER; note = S-phosphorothioate
  modified_base 22: mod_base = um
  modified_base 22..23: mod_base = OTHER; note = S-phosphorothioate
  modified_base 23: mod_base = um
  source 1..23: mol_type = other RNA
ttatagagcaagaacactgtttt

SEQ ID NO: 526 - RNA, 23 nt, synthetic construct
  misc_feature 1..23: note = Synthetic: WV-38087
  misc_feature 1..23: note = Synthetic: SSR-0103207
  modified_base 1: mod_base = um
  modified_base 1..2: mod_base = OTHER; note = R-phosphorothioate
  modified_base 2: mod_base = OTHER; note = 2-fluororibose uracil
  modified_base 3: mod_base = OTHER; note = 2-O-methylribose adenine
  modified_base 4: mod_base = OTHER; note = 2-fluororibose uracil
  modified_base 5: mod_base = OTHER; note = 2-O-methylribose adenine
  modified_base 6: mod_base = OTHER; note = 2-fluororibose guanine
  modified_base 7: mod_base = OTHER; note = 2-O-methylribose adenine
  modified_base 8: mod_base = OTHER; note = 2-fluororibose guanine
  modified_base 9: mod_base = cm
  modified_base 10: mod_base = OTHER; note = 2-fluororibose adenine
  modified_base 11: mod_base = OTHER; note = 2-O-methylribose adenine
  modified_base 12: mod_base = gm
  modified_base 13: mod_base = OTHER; note = 2-O-methylribose adenine
  modified_base 14: mod_base = OTHER; note = 2-fluororibose adenine
  modified_base 15: mod_base = cm
  modified_base 16: mod_base = OTHER; note = 2-fluororibose adenine
  modified_base 17: mod_base = cm
  modified_base 18: mod_base = OTHER; note = 2-fluororibose uracil
  modified_base 19: mod_base = gm
  modified_base 20: mod_base = OTHER; note = 2-fluororibose uracil
  modified_base 21: mod_base = um
  modified_base 21..22: mod_base = OTHER; note = S-phosphorothioate
  modified_base 22: mod_base = um
  modified_base 22..23: mod_base = OTHER; note = S-phosphorothioate
  modified_base 23: mod_base = um
  source 1..23: mol_type = other RNA
ttatagagcaagaacactgtttt

SEQ ID NO: 527 - RNA, 23 nt, synthetic construct
  misc_feature 1..23: note = Synthetic: WV-38088
  misc_feature 1..23: note = Synthetic: SSR-0103420
  modified_base 1: mod_base = um
  modified_base 2: mod_base = OTHER; note = 2-fluororibose uracil
  modified_base 2..3: mod_base = OTHER; note = R-phosphorothioate
  modified_base 3: mod_base = OTHER; note = 2-O-methylribose adenine
  modified_base 4: mod_base = OTHER; note = 2-fluororibose uracil
  modified_base 5: mod_base = OTHER; note = 2-O-methylribose adenine
  modified_base 6: mod_base = OTHER; note = 2-fluororibose guanine
  modified_base 7: mod_base = OTHER; note = 2-O-methylribose adenine
  modified_base 8: mod_base = OTHER; note = 2-fluororibose guanine
  modified_base 9: mod_base = cm
  modified_base 10: mod_base = OTHER; note = 2-fluororibose adenine
  modified_base 11: mod_base = OTHER; note = 2-O-methylribose adenine
  modified_base 12: mod_base = gm
  modified_base 13: mod_base = OTHER; note = 2-O-methylribose adenine
  modified_base 14: mod_base = OTHER; note = 2-fluororibose adenine
  modified_base 15: mod_base = cm
  modified_base 16: mod_base = OTHER; note = 2-fluororibose adenine
  modified_base 17: mod_base = cm
  modified_base 18: mod_base = OTHER; note = 2-fluororibose uracil
  modified_base 19: mod_base = gm
  modified_base 20: mod_base = OTHER; note = 2-fluororibose uracil
  modified_base 21: mod_base = um
  modified_base 21..22: mod_base = OTHER; note = S-phosphorothioate
  modified_base 22: mod_base = um
  modified_base 22..23: mod_base = OTHER; note = S-phosphorothioate
  modified_base 23: mod_base = um
  source 1..23: mol_type = other RNA
ttatagagcaagaacactgtttt

SEQ ID NO: 528 - RNA, 23 nt, synthetic construct
  misc_feature 1..23: note = Synthetic: WV-38089
  misc_feature 1..23: note = Synthetic: SSR-0103423
  modified_base 1: mod_base = um
  modified_base 2: mod_base = OTHER; note = 2-fluororibose uracil
  modified_base 3: mod_base = OTHER; note = 2-O-methylribose adenine
  modified_base 3..4: mod_base = OTHER; note = R-phosphorothioate
  modified_base 4: mod_base = OTHER; note = 2-fluororibose uracil
  modified_base 5: mod_base = OTHER; note = 2-O-methylribose adenine
  modified_base 6: mod_base = OTHER; note = 2-fluororibose guanine
  modified_base 7: mod_base = OTHER; note = 2-O-methylribose adenine
  modified_base 8: mod_base = OTHER; note = 2-fluororibose guanine
  modified_base 9: mod_base = cm
  modified_base 10: mod_base = OTHER; note = 2-fluororibose adenine
  modified_base 11: mod_base = OTHER; note = 2-O-methylribose adenine
  modified_base 12: mod_base = gm
  modified_base 13: mod_base = OTHER; note = 2-O-methylribose adenine
  modified_base 14: mod_base = OTHER; note = 2-fluororibose adenine
  modified_base 15: mod_base = cm
  modified_base 16: mod_base = OTHER; note = 2-fluororibose adenine
  modified_base 17: mod_base = cm
  modified_base 18: mod_base = OTHER; note = 2-fluororibose uracil
  modified_base 19: mod_base = gm
  modified_base 20: mod_base = OTHER; note = 2-fluororibose uracil
  modified_base 21: mod_base = um
  modified_base 21..22: mod_base = OTHER; note = S-phosphorothioate
  modified_base 22: mod_base = um
  modified_base 22..23: mod_base = OTHER; note = S-phosphorothioate
  modified_base 23: mod_base = um
  source 1..23: mol_type = other RNA
ttatagagcaagaacactgtttt

SEQ ID NO: 529 - RNA, 23 nt, synthetic construct
  misc_feature 1..23: note = Synthetic: WV-38090
  misc_feature 1..23: note = Synthetic: SSR-0103426
  modified_base 1: mod_base = um
  modified_base 2: mod_base = OTHER; note = 2-fluororibose uracil
  modified_base 3: mod_base = OTHER; note = 2-O-methylribose adenine
  modified_base 4: mod_base = OTHER; note = 2-fluororibose uracil
  modified_base 4..5: mod_base = OTHER; note = R-phosphorothioate
  modified_base 5: mod_base = OTHER; note = 2-O-methylribose adenine
  modified_base 6: mod_base = OTHER; note = 2-fluororibose guanine
  modified_base 7: mod_base = OTHER; note = 2-O-methylribose adenine
  modified_base 8: mod_base = OTHER; note = 2-fluororibose guanine
  modified_base 9: mod_base = cm
  modified_base 10: mod_base = OTHER; note = 2-fluororibose adenine
  modified_base 11: mod_base = OTHER; note = 2-O-methylribose adenine
  modified_base 12: mod_base = gm
  modified_base 13: mod_base = OTHER; note = 2-O-methylribose adenine
  modified_base 14: mod_base = OTHER; note = 2-fluororibose adenine
  modified_base 15: mod_base = cm
  modified_base 16: mod_base = OTHER; note = 2-fluororibose adenine
  modified_base 17: mod_base = cm
  modified_base 18: mod_base = OTHER; note = 2-fluororibose uracil
  modified_base 19: mod_base = gm
  modified_base 20: mod_base = OTHER; note = 2-fluororibose uracil
  modified_base 21: mod_base = um
  modified_base 21..22: mod_base = OTHER; note = S-phosphorothioate
  modified_base 22: mod_base = um
  modified_base 22..23: mod_base = OTHER; note = S-phosphorothioate
  modified_base 23: mod_base = um
  source 1..23: mol_type = other RNA
ttatagagcaagaacactgtttt

SEQ ID NO: 530 - RNA, 23 nt, synthetic construct
  misc_feature 1..23: note = Synthetic: WV-38091
  misc_feature 1..23: note = Synthetic: SSR-0103429
  modified_base 1: mod_base = um
  modified_base 2: mod_base = OTHER; note = 2-fluororibose uracil
  modified_base 3: mod_base = OTHER; note = 2-O-methylribose adenine
  modified_base 4: mod_base = OTHER; note = 2-fluororibose uracil
  modified_base 5: mod_base = OTHER; note = 2-O-methylribose adenine
  modified_base 5..6: mod_base = OTHER; note = R-phosphorothioate
  modified_base 6: mod_base = OTHER; note = 2-fluororibose guanine
  modified_base 7: mod_base = OTHER; note = 2-O-methylribose adenine
  modified_base 8: mod_base = OTHER; note = 2-fluororibose guanine
  modified_base 9: mod_base = cm
  modified_base 10: mod_base = OTHER; note = 2-fluororibose adenine
  modified_base 11: mod_base = OTHER; note = 2-O-methylribose adenine
  modified_base 12: mod_base = gm
  modified_base 13: mod_base = OTHER; note = 2-O-methylribose adenine
  modified_base 14: mod_base = OTHER; note = 2-fluororibose adenine
  modified_base 15: mod_base = cm
  modified_base 16: mod_base = OTHER; note = 2-fluororibose adenine
  modified_base 17: mod_base = cm
  modified_base 18: mod_base = OTHER; note = 2-fluororibose uracil
  modified_base 19: mod_base = gm
  modified_base 20: mod_base = OTHER; note = 2-fluororibose uracil
  modified_base 21: mod_base = um
  modified_base 21..22: mod_base = OTHER; note = S-phosphorothioate
  modified_base 22: mod_base = um
  modified_base 22..23: mod_base = OTHER; note = S-phosphorothioate
  modified_base 23: mod_base = um
  source 1..23: mol_type = other RNA
ttatagagcaagaacactgtttt

SEQ ID NO: 531 - RNA, 23 nt, synthetic construct
  misc_feature 1..23: note = Synthetic: WV-38092
  misc_feature 1..23: note = Synthetic: SSR-0103432
  modified_base 1: mod_base = um
  modified_base 2: mod_base = OTHER; note = 2-fluororibose uracil
  modified_base 3: mod_base = OTHER; note = 2-O-methylribose adenine
  modified_base 4: mod_base = OTHER; note = 2-fluororibose uracil
  modified_base 5: mod_base = OTHER; note = 2-O-methylribose adenine
  modified_base 6: mod_base = OTHER; note = 2-fluororibose guanine
  modified_base 6..7: mod_base = OTHER; note = R-phosphorothioate
  modified_base 7: mod_base = OTHER; note = 2-O-methylribose adenine
  modified_base 8: mod_base = OTHER; note = 2-fluororibose guanine
  modified_base 9: mod_base = cm
  modified_base 10: mod_base = OTHER; note = 2-fluororibose adenine
  modified_base 11: mod_base = OTHER; note = 2-O-methylribose adenine
  modified_base 12: mod_base = gm
  modified_base 13: mod_base = OTHER; note = 2-O-methylribose adenine
  modified_base 14: mod_base = OTHER; note = 2-fluororibose adenine
  modified_base 15: mod_base = cm
  modified_base 16: mod_base = OTHER; note = 2-fluororibose adenine
  modified_base 17: mod_base = cm
  modified_base 18: mod_base = OTHER; note = 2-fluororibose uracil
  modified_base 19: mod_base = gm
  modified_base 20: mod_base = OTHER; note = 2-fluororibose uracil
  modified_base 21: mod_base = um
  modified_base 21..22: mod_base = OTHER; note = S-phosphorothioate
  modified_base 22: mod_base = um
  modified_base 22..23: mod_base = OTHER; note = S-phosphorothioate
  modified_base 23: mod_base = um
  source 1..23: mol_type = other RNA
ttatagagcaagaacactgtttt

SEQ ID NO: 532 - RNA, 23 nt, synthetic construct
  misc_feature 1..23: note = Synthetic: WV-38093
  misc_feature 1..23: note = Synthetic: SSR-0103435
  modified_base 1: mod_base = um
  modified_base 2: mod_base = OTHER; note = 2-fluororibose uracil
  modified_base 3: mod_base = OTHER; note = 2-O-methylribose adenine
  modified_base 4: mod_base = OTHER; note = 2-fluororibose uracil
  modified_base 5: mod_base = OTHER; note = 2-O-methylribose adenine
  modified_base 6: mod_base = OTHER; note = 2-fluororibose guanine
  modified_base 7: mod_base = OTHER; note = 2-O-methylribose adenine
  modified_base 7..8: mod_base = OTHER; note = R-phosphorothioate
  modified_base 8: mod_base = OTHER; note = 2-fluororibose guanine
  modified_base 9: mod_base = cm
  modified_base 10: mod_base = OTHER; note = 2-fluororibose adenine
  modified_base 11: mod_base = OTHER; note = 2-O-methylribose adenine
  modified_base 12: mod_base = gm
  modified_base 13: mod_base = OTHER; note = 2-O-methylribose adenine
  modified_base 14: mod_base = OTHER; note = 2-fluororibose adenine
  modified_base 15: mod_base = cm
  modified_base 16: mod_base = OTHER; note = 2-fluororibose adenine
  modified_base 17: mod_base = cm
  modified_base 18: mod_base = OTHER; note = 2-fluororibose uracil
  modified_base 19: mod_base = gm
  modified_base 20: mod_base = OTHER; note = 2-fluororibose uracil
  modified_base 21: mod_base = um
  modified_base 21..22: mod_base = OTHER; note = S-phosphorothioate
  modified_base 22: mod_base = um
  modified_base 22..23: mod_base = OTHER; note = S-phosphorothioate
  modified_base 23: mod_base = um
  source 1..23: mol_type = other RNA
ttatagagcaagaacactgtttt

SEQ ID NO: 533 - RNA, 23 nt, synthetic construct
  misc_feature 1..23: note = Synthetic: WV-38094
  misc_feature 1..23: note = Synthetic: SSR-0103438
  modified_base 1: mod_base = um
  modified_base 2: mod_base = OTHER; note = 2-fluororibose uracil
  modified_base 3: mod_base = OTHER; note = 2-O-methylribose adenine
  modified_base 4: mod_base = OTHER; note = 2-fluororibose uracil
  modified_base 5: mod_base = OTHER; note = 2-O-methylribose adenine
  modified_base 6: mod_base = OTHER; note = 2-fluororibose guanine
  modified_base 7: mod_base = OTHER; note = 2-O-methylribose adenine
  modified_base 8: mod_base = OTHER; note = 2-fluororibose guanine
  modified_base 8..9: mod_base = OTHER; note = R-phosphorothioate
  modified_base 9: mod_base = cm
  modified_base 10: mod_base = OTHER; note = 2-fluororibose adenine
  modified_base 11: mod_base = OTHER; note = 2-O-methylribose adenine
  modified_base 12: mod_base = gm
  modified_base 13: mod_base = OTHER; note = 2-O-methylribose adenine
  modified_base 14: mod_base = OTHER; note = 2-fluororibose adenine
  modified_base 15: mod_base = cm
  modified_base 16: mod_base = OTHER; note = 2-fluororibose adenine
  modified_base 17: mod_base = cm
  modified_base 18: mod_base = OTHER; note = 2-fluororibose uracil
  modified_base 19: mod_base = gm
  modified_base 20: mod_base = OTHER; note = 2-fluororibose uracil
  modified_base 21: mod_base = um
  modified_base 21..22: mod_base = OTHER; note = S-phosphorothioate
  modified_base 22: mod_base = um
  modified_base 22..23: mod_base = OTHER; note = S-phosphorothioate
  modified_base 23: mod_base = um
  source 1..23: mol_type = other RNA
ttatagagcaagaacactgtttt

SEQ ID NO: 534 - RNA, 23 nt, synthetic construct
  misc_feature 1..23: note = Synthetic: WV-38095
  misc_feature 1..23: note = Synthetic: SSR-0103441
  modified_base 1: mod_base = um
  modified_base 2: mod_base = OTHER; note = 2-fluororibose uracil
  modified_base 3: mod_base = OTHER; note = 2-O-methylribose adenine
  modified_base 4: mod_base = OTHER; note = 2-fluororibose uracil
  modified_base 5: mod_base = OTHER; note = 2-O-methylribose adenine
  modified_base 6: mod_base = OTHER; note = 2-fluororibose guanine
  modified_base 7: mod_base = OTHER; note = 2-O-methylribose adenine
  modified_base 8: mod_base = OTHER; note = 2-fluororibose guanine
  modified_base 9: mod_base = cm
  modified_base 9..10: mod_base = OTHER; note = R-phosphorothioate
  modified_base 10: mod_base = OTHER; note = 2-fluororibose adenine
  modified_base 11: mod_base = OTHER; note = 2-O-methylribose adenine
  modified_base 12: mod_base = gm
  modified_base 13: mod_base = OTHER; note = 2-O-methylribose adenine
  modified_base 14: mod_base = OTHER; note = 2-fluororibose adenine
  modified_base 15: mod_base = cm
  modified_base 16: mod_base = OTHER; note = 2-fluororibose adenine
  modified_base 17: mod_base = cm
  modified_base 18: mod_base = OTHER; note = 2-fluororibose uracil
  modified_base 19: mod_base = gm
  modified_base 20: mod_base = OTHER; note = 2-fluororibose uracil
  modified_base 21: mod_base = um
  modified_base 21..22: mod_base = OTHER; note = S-phosphorothioate
  modified_base 22: mod_base = um
  modified_base 22..23: mod_base = OTHER; note = S-phosphorothioate
  modified_base 23: mod_base = um
  source 1..23: mol_type = other RNA
ttatagagcaagaacactgtttt

SEQ ID NO: 535 - RNA, 23 nt, synthetic construct
  misc_feature 1..23: note = Synthetic: WV-38096
  misc_feature 1..23: note = Synthetic: SSR-0103444
  modified_base 1: mod_base = um
  modified_base 2: mod_base = OTHER; note = 2-fluororibose uracil
  modified_base 3: mod_base = OTHER; note = 2-O-methylribose adenine
  modified_base 4: mod_base = OTHER; note = 2-fluororibose uracil
  modified_base 5: mod_base = OTHER; note = 2-O-methylribose adenine
  modified_base 6: mod_base = OTHER; note = 2-fluororibose guanine
  modified_base 7: mod_base = OTHER; note = 2-O-methylribose adenine
  modified_base 8: mod_base = OTHER; note = 2-fluororibose guanine
  modified_base 9: mod_base = cm
  modified_base 10: mod_base = OTHER; note = 2-fluororibose adenine
  modified_base 10..11: mod_base = OTHER; note = R-phosphorothioate
  modified_base 11: mod_base = OTHER; note = 2-O-methylribose adenine
  modified_base 12: mod_base = gm
  modified_base 13: mod_base = OTHER; note = 2-O-methylribose adenine
  modified_base 14: mod_base = OTHER; note = 2-fluororibose adenine
  modified_base 15: mod_base = cm
  modified_base 16: mod_base = OTHER; note = 2-fluororibose adenine
  modified_base 17: mod_base = cm
  modified_base 18: mod_base = OTHER; note = 2-fluororibose uracil
  modified_base 19: mod_base = gm
  modified_base 20: mod_base = OTHER; note = 2-fluororibose uracil
  modified_base 21: mod_base = um
  modified_base 21..22: mod_base = OTHER; note = S-phosphorothioate
  modified_base 22: mod_base = um
  modified_base 22..23: mod_base = OTHER; note = S-phosphorothioate
  modified_base 23: mod_base = um
  source 1..23: mol_type = other RNA
ttatagagcaagaacactgtttt

SEQ ID NO: 536 - RNA, 23 nt, synthetic construct
  misc_feature 1..23: note = Synthetic: WV-38097
  misc_feature 1..23: note = Synthetic: SSR-0103447
  modified_base 1: mod_base = um
  modified_base 2: mod_base = OTHER; note = 2-fluororibose uracil
  modified_base 3: mod_base = OTHER; note = 2-O-methylribose adenine
  modified_base 4: mod_base = OTHER; note = 2-fluororibose uracil
  modified_base 5: mod_base = OTHER; note = 2-O-methylribose adenine
  modified_base 6: mod_base = OTHER; note = 2-fluororibose guanine
  modified_base 7: mod_base = OTHER; note = 2-O-methylribose adenine
  modified_base 8: mod_base = OTHER; note = 2-fluororibose guanine
  modified_base 9: mod_base = cm
  modified_base 10: mod_base = OTHER; note = 2-fluororibose adenine
  modified_base 11: mod_base = OTHER; note = 2-O-methylribose adenine
  modified_base 11..12: mod_base = OTHER; note = R-phosphorothioate
  modified_base 12: mod_base = gm
  modified_base 13: mod_base = OTHER; note = 2-O-methylribose adenine
  modified_base 14: mod_base = OTHER; note = 2-fluororibose adenine
  modified_base 15: mod_base = cm
  modified_base 16: mod_base = OTHER; note = 2-fluororibose adenine
  modified_base 17: mod_base = cm
  modified_base 18: mod_base = OTHER; note = 2-fluororibose uracil
  modified_base 19: mod_base = gm
  modified_base 20: mod_base = OTHER; note = 2-fluororibose uracil
  modified_base 21: mod_base = um
  modified_base 21..22: mod_base = OTHER; note = S-phosphorothioate
  modified_base 22: mod_base = um
  modified_base 22..23: mod_base = OTHER; note = S-phosphorothioate
  modified_base 23: mod_base = um
  source 1..23: mol_type = other RNA
ttatagagcaagaacactgtttt

SEQ ID NO: 537 - RNA, 23 nt, synthetic construct
  misc_feature 1..23: note = Synthetic: WV-38098
  misc_feature 1..23: note = Synthetic: SSR-0103450
  modified_base 1: mod_base = um
  modified_base 2: mod_base = OTHER; note = 2-fluororibose uracil
  modified_base 3: mod_base = OTHER; note = 2-O-methylribose adenine
  modified_base 4: mod_base = OTHER; note = 2-fluororibose uracil
  modified_base 5: mod_base = OTHER; note = 2-O-methylribose adenine
  modified_base 6: mod_base = OTHER; note = 2-fluororibose guanine
  modified_base 7: mod_base = OTHER; note = 2-O-methylribose adenine
  modified_base 8: mod_base = OTHER; note = 2-fluororibose guanine
  modified_base 9: mod_base = cm
  modified_base 10: mod_base = OTHER; note = 2-fluororibose adenine
  modified_base 11: mod_base = OTHER; note = 2-O-methylribose adenine
  modified_base 12: mod_base = gm
  modified_base 12..13: mod_base = OTHER; note = R-phosphorothioate
  modified_base 13: mod_base = OTHER; note = 2-O-methylribose adenine
  modified_base 14: mod_base = OTHER; note = 2-fluororibose adenine
  modified_base 15: mod_base = cm
  modified_base 16: mod_base = OTHER; note = 2-fluororibose adenine
  modified_base 17: mod_base = cm
  modified_base 18: mod_base = OTHER; note = 2-fluororibose uracil
  modified_base 19: mod_base = gm
  modified_base 20: mod_base = OTHER; note = 2-fluororibose uracil
  modified_base 21: mod_base = um
  modified_base 21..22: mod_base = OTHER; note = S-phosphorothioate
  modified_base 22: mod_base = um
  modified_base 22..23: mod_base = OTHER; note = S-phosphorothioate
  modified_base 23: mod_base = um
  source 1..23: mol_type = other RNA
ttatagagcaagaacactgtttt

SEQ ID NO: 538 - RNA, 23 nt, synthetic construct
  misc_feature 1..23: note = Synthetic: WV-38099
  misc_feature 1..23: note = Synthetic: SSR-0103453
  modified_base 1: mod_base = um
  modified_base 2: mod_base = OTHER; note = 2-fluororibose uracil
  modified_base 3: mod_base = OTHER; note = 2-O-methylribose adenine
  modified_base 4: mod_base = OTHER; note = 2-fluororibose uracil
  modified_base 5: mod_base = OTHER; note = 2-O-methylribose adenine
  modified_base 6: mod_base = OTHER; note = 2-fluororibose guanine
  modified_base 7: mod_base = OTHER; note = 2-O-methylribose adenine
  modified_base 8: mod_base = OTHER; note = 2-fluororibose guanine
  modified_base 9: mod_base = cm
  modified_base 10: mod_base = OTHER; note = 2-fluororibose adenine
  modified_base 11: mod_base = OTHER; note = 2-O-methylribose adenine
  modified_base 12: mod_base = gm
  modified_base 13: mod_base = OTHER; note = 2-O-methylribose adenine
  modified_base 13..14: mod_base = OTHER; note = R-phosphorothioate
  modified_base 14: mod_base = OTHER; note = 2-fluororibose adenine
  modified_base 15: mod_base = cm
  modified_base 16: mod_base = OTHER; note = 2-fluororibose adenine
  modified_base 17: mod_base = cm
  modified_base 18: mod_base = OTHER; note = 2-fluororibose uracil
  modified_base 19: mod_base = gm
  modified_base 20: mod_base = OTHER; note = 2-fluororibose uracil
  modified_base 21: mod_base = um
  modified_base 21..22: mod_base = OTHER; note = S-phosphorothioate
  modified_base 22: mod_base = um
  modified_base 22..23: mod_base = OTHER; note = S-phosphorothioate
  modified_base 23: mod_base = um
  source 1..23: mol_type = other RNA
ttatagagcaagaacactgtttt

SEQ ID NO: 539 - RNA, 23 nt, synthetic construct
  misc_feature 1..23: note = Synthetic: WV-38100
  misc_feature 1..23: note = Synthetic: SSR-0103456
  modified_base 1: mod_base = um
  modified_base 2: mod_base = OTHER; note = 2-fluororibose uracil
  modified_base 3: mod_base = OTHER; note = 2-O-methylribose adenine
  modified_base 4: mod_base = OTHER; note = 2-fluororibose uracil
  modified_base 5: mod_base = OTHER; note = 2-O-methylribose adenine
  modified_base 6: mod_base = OTHER; note = 2-fluororibose guanine
  modified_base 7: mod_base = OTHER; note = 2-O-methylribose adenine
  modified_base 8: mod_base = OTHER; note = 2-fluororibose guanine
  modified_base 9: mod_base = cm
  modified_base 10: mod_base = OTHER; note = 2-fluororibose adenine
  modified_base 11: mod_base = OTHER; note = 2-O-methylribose adenine
  modified_base 12: mod_base = gm
  modified_base 13: mod_base = OTHER; note = 2-O-methylribose adenine
  modified_base 14: mod_base = OTHER; note = 2-fluororibose adenine
  modified_base 14..15: mod_base = OTHER; note = R-phosphorothioate
  modified_base 15: mod_base = cm
  modified_base 16: mod_base = OTHER; note = 2-fluororibose adenine
  modified_base 17: mod_base = cm
  modified_base 18: mod_base = OTHER; note = 2-fluororibose uracil
  modified_base 19: mod_base = gm
  modified_base 20: mod_base = OTHER; note = 2-fluororibose uracil
  modified_base 21: mod_base = um
  modified_base 21..22: mod_base = OTHER; note = S-phosphorothioate
  modified_base 22: mod_base = um
  modified_base 22..23: mod_base = OTHER; note = S-phosphorothioate
  modified_base 23: mod_base = um
  source 1..23: mol_type = other RNA
ttatagagcaagaacactgtttt

SEQ ID NO: 540 - RNA, 23 nt, synthetic construct
  misc_feature 1..23: note = Synthetic: WV-38101
  misc_feature 1..23: note = Synthetic: SSR-0103459
  modified_base 1: mod_base = um
  modified_base 2: mod_base = OTHER; note = 2-fluororibose uracil
  modified_base 3: mod_base = OTHER; note = 2-O-methylribose adenine
  modified_base 4: mod_base = OTHER; note = 2-fluororibose uracil
  modified_base 5: mod_base = OTHER; note = 2-O-methylribose adenine
  modified_base 6: mod_base = OTHER; note = 2-fluororibose guanine
  modified_base 7: mod_base = OTHER; note = 2-O-methylribose adenine
  modified_base 8: mod_base = OTHER; note = 2-fluororibose guanine
  modified_base 9: mod_base = cm
  modified_base 10: mod_base = OTHER; note = 2-fluororibose adenine
  modified_base 11: mod_base = OTHER; note = 2-O-methylribose adenine
  modified_base 12: mod_base = gm
  modified_base 13: mod_base = OTHER; note = 2-O-methylribose adenine
  modified_base 14: mod_base = OTHER; note = 2-fluororibose adenine
  modified_base 15: mod_base = cm
  modified_base 15..16: mod_base = OTHER; note = R-phosphorothioate
  modified_base 16: mod_base = OTHER; note = 2-fluororibose adenine
  modified_base 17: mod_base = cm
  modified_base 18: mod_base = OTHER; note = 2-fluororibose uracil
  modified_base 19: mod_base = gm
  modified_base 20: mod_base = OTHER; note = 2-fluororibose uracil
  modified_base 21: mod_base = um
  modified_base 21..22: mod_base = OTHER; note = S-phosphorothioate
  modified_base 22: mod_base = um
  modified_base 22..23: mod_base = OTHER; note = S-phosphorothioate
  modified_base 23: mod_base = um
  source 1..23: mol_type = other RNA
ttatagagcaagaacactgtttt

SEQ ID NO: 541 - RNA, 23 nt, synthetic construct
  misc_feature 1..23: note = Synthetic: WV-38102
  misc_feature 1..23: note = Synthetic: SSR-0103462
  modified_base 1: mod_base = um
  modified_base 2: mod_base = OTHER; note = 2-fluororibose uracil
  modified_base 3: mod_base = OTHER; note = 2-O-methylribose adenine
  modified_base 4: mod_base = OTHER; note = 2-fluororibose uracil
  modified_base 5: mod_base = OTHER; note = 2-O-methylribose adenine
  modified_base 6: mod_base = OTHER; note = 2-fluororibose guanine
  modified_base 7: mod_base = OTHER; note = 2-O-methylribose adenine
  modified_base 8: mod_base = OTHER; note = 2-fluororibose guanine
  modified_base 9: mod_base = cm
  modified_base 10: mod_base = OTHER; note = 2-fluororibose adenine
  modified_base 11: mod_base = OTHER; note = 2-O-methylribose adenine
  modified_base 12: mod_base = gm
  modified_base 13: mod_base = OTHER; note = 2-O-methylribose adenine
  modified_base 14: mod_base = OTHER; note = 2-fluororibose adenine
  modified_base 15: mod_base = cm
  modified_base 16: mod_base = OTHER; note = 2-fluororibose adenine
  modified_base 16..17: mod_base = OTHER; note = R-phosphorothioate
  modified_base 17: mod_base = cm
  modified_base 18: mod_base = OTHER; note = 2-fluororibose uracil
  modified_base 19: mod_base = gm
  modified_base 20: mod_base = OTHER; note = 2-fluororibose uracil
  modified_base 21: mod_base = um
  modified_base 21..22: mod_base = OTHER; note = S-phosphorothioate
  modified_base 22: mod_base = um
  modified_base 22..23: mod_base = OTHER; note = S-phosphorothioate
  modified_base 23: mod_base = um
  source 1..23: mol_type = other RNA
ttatagagcaagaacactgtttt

SEQ ID NO: 542 - RNA, 23 nt, synthetic construct
  misc_feature 1..23: note = Synthetic: WV-38103
  misc_feature 1..23: note = Synthetic: SSR-0103465
  modified_base 1: mod_base = um
  modified_base 2: mod_base = OTHER; note = 2-fluororibose uracil
  modified_base 3: mod_base = OTHER; note = 2-O-methylribose adenine
  modified_base 4: mod_base = OTHER; note = 2-fluororibose uracil
  modified_base 5: mod_base = OTHER; note = 2-O-methylribose adenine
  modified_base 6: mod_base = OTHER; note = 2-fluororibose guanine
  modified_base 7: mod_base = OTHER; note = 2-O-methylribose adenine
  modified_base 8: mod_base = OTHER; note = 2-fluororibose guanine
  modified_base 9: mod_base = cm
  modified_base 10: mod_base = OTHER; note = 2-fluororibose adenine
  modified_base 11: mod_base = OTHER; note = 2-O-methylribose adenine
  modified_base 12: mod_base = gm
  modified_base 13: mod_base = OTHER; note = 2-O-methylribose adenine
  modified_base 14: mod_base = OTHER; note = 2-fluororibose adenine
  modified_base 15: mod_base = cm
  modified_base 16: mod_base = OTHER; note = 2-fluororibose adenine
  modified_base 17: mod_base = cm
  modified_base 17..18: mod_base = OTHER; note = R-phosphorothioate
  modified_base 18: mod_base = OTHER; note = 2-fluororibose uracil
  modified_base 19: mod_base = gm
  modified_base 20: mod_base = OTHER; note = 2-fluororibose uracil
  modified_base 21: mod_base = um
  modified_base 21..22: mod_base = OTHER; note = S-phosphorothioate
  modified_base 22: mod_base = um
  modified_base 22..23: mod_base = OTHER; note = S-phosphorothioate
  modified_base 23: mod_base = um
  source 1..23: mol_type = other RNA
ttatagagcaagaacactgtttt

SEQ ID NO: 543 - RNA, 23 nt, synthetic construct
  misc_feature 1..23: note = Synthetic: WV-38104
  misc_feature 1..23: note = Synthetic: SSR-0103468
  modified_base 1: mod_base = um
  modified_base 2: mod_base = OTHER; note = 2-fluororibose uracil
  modified_base 3: mod_base = OTHER; note = 2-O-methylribose adenine
  modified_base 4: mod_base = OTHER; note = 2-fluororibose uracil
  modified_base 5: mod_base = OTHER; note = 2-O-methylribose adenine
  modified_base 6: mod_base = OTHER; note = 2-fluororibose guanine
  modified_base 7: mod_base = OTHER; note = 2-O-methylribose adenine
  modified_base 8: mod_base = OTHER; note = 2-fluororibose guanine
  modified_base 9: mod_base = cm
  modified_base 10: mod_base = OTHER; note = 2-fluororibose adenine
  modified_base 11: mod_base = OTHER; note = 2-O-methylribose adenine
  modified_base 12: mod_base = gm
  modified_base 13: mod_base = OTHER; note = 2-O-methylribose adenine
  modified_base 14: mod_base = OTHER; note = 2-fluororibose adenine
  modified_base 15: mod_base = cm
  modified_base 16: mod_base = OTHER; note = 2-fluororibose adenine
  modified_base 17: mod_base = cm
  modified_base 18: mod_base = OTHER; note = 2-fluororibose uracil
  modified_base 18..19: mod_base = OTHER; note = R-phosphorothioate
  modified_base 19: mod_base = gm
  modified_base 20: mod_base = OTHER; note = 2-fluororibose uracil
  modified_base 21: mod_base = um
  modified_base 21..22: mod_base = OTHER; note = S-phosphorothioate
  modified_base 22: mod_base = um
  modified_base 22..23: mod_base = OTHER; note = S-phosphorothioate
  modified_base 23: mod_base = um
  source 1..23: mol_type = other RNA
ttatagagcaagaacactgtttt

SEQ ID NO: 544 - RNA, 23 nt, synthetic construct
  misc_feature 1..23: note = Synthetic: WV-38105
  misc_feature 1..23: note = Synthetic: SSR-0103471
  modified_base 1: mod_base = um
  modified_base 2: mod_base = OTHER; note = 2-fluororibose uracil
  modified_base 3: mod_base = OTHER; note = 2-O-methylribose adenine
  modified_base 4: mod_base = OTHER; note = 2-fluororibose uracil
  modified_base 5: mod_base = OTHER; note = 2-O-methylribose adenine
  modified_base 6: mod_base = OTHER; note = 2-fluororibose guanine
  modified_base 7: mod_base = OTHER; note = 2-O-methylribose adenine
  modified_base 8: mod_base = OTHER; note = 2-fluororibose guanine
  modified_base 9: mod_base = cm
  modified_base 10: mod_base = OTHER; note = 2-fluororibose adenine
  modified_base 11: mod_base = OTHER; note = 2-O-methylribose adenine
  modified_base 12: mod_base = gm
  modified_base 13: mod_base = OTHER; note = 2-O-methylribose adenine
  modified_base 14: mod_base = OTHER; note = 2-fluororibose adenine
  modified_base 15: mod_base = cm
  modified_base 16: mod_base = OTHER; note = 2-fluororibose adenine
  modified_base 17: mod_base = cm
  modified_base 18: mod_base = OTHER; note = 2-fluororibose uracil
  modified_base 19: mod_base = gm
  modified_base 19..20: mod_base = OTHER; note = R-phosphorothioate
  modified_base 20: mod_base = OTHER; note = 2-fluororibose uracil
  modified_base 21: mod_base = um
  modified_base 21..22: mod_base = OTHER; note = S-phosphorothioate
  modified_base 22: mod_base = um
  modified_base 22..23: mod_base = OTHER; note = S-phosphorothioate
  modified_base 23: mod_base = um
  source 1..23: mol_type = other RNA
ttatagagcaagaacactgtttt

SEQ ID NO: 545 - RNA, 23 nt, synthetic construct
  misc_feature 1..23: note = Synthetic: WV-38106
  misc_feature 1..23: note = Synthetic: SSR-0103474
  modified_base 1: mod_base = um
  modified_base 2: mod_base = OTHER; note = 2-fluororibose uracil
  modified_base 3: mod_base = OTHER; note = 2-O-methylribose adenine
  modified_base 4: mod_base = OTHER; note = 2-fluororibose uracil
  modified_base 5: mod_base = OTHER; note = 2-O-methylribose adenine
  modified_base 6: mod_base = OTHER; note = 2-fluororibose guanine
  modified_base 7: mod_base = OTHER; note = 2-O-methylribose adenine
  modified_base 8: mod_base = OTHER; note = 2-fluororibose guanine
  modified_base 9: mod_base = cm
  modified_base 10: mod_base = OTHER; note = 2-fluororibose adenine
  modified_base 11: mod_base = OTHER; note = 2-O-methylribose adenine
  modified_base 12: mod_base = gm
  modified_base 13: mod_base = OTHER; note = 2-O-methylribose adenine
  modified_base 14: mod_base = OTHER; note = 2-fluororibose adenine
  modified_base 15: mod_base = cm
  modified_base 16: mod_base = OTHER; note = 2-fluororibose adenine
  modified_base 17: mod_base = cm
  modified_base 18: mod_base = OTHER; note = 2-fluororibose uracil
  modified_base 19: mod_base = gm
  modified_base 20: mod_base = OTHER; note = 2-fluororibose uracil
  modified_base 20..21: mod_base = OTHER; note = R-phosphorothioate
  modified_base 21: mod_base = um
  modified_base 21..22: mod_base = OTHER; note = S-phosphorothioate
  modified_base 22: mod_base = um
  modified_base 22..23: mod_base = OTHER; note = S-phosphorothioate
  modified_base 23: mod_base = um
  source 1..23: mol_type = other RNA
ttatagagcaagaacactgtttt

SEQ ID NO: 546 - RNA, 23 nt, synthetic construct
  misc_feature 1..23: note = Synthetic: WV-38107
  misc_feature 1..23: note = Synthetic: SSR-0103366
  modified_base 1: mod_base = um
  modified_base 1..2: mod_base = OTHER; note = S-phosphorothioate
  modified_base 2: mod_base = OTHER; note = 2-fluororibose uracil
  modified_base 3: mod_base = OTHER; note = 2-O-methylribose adenine
  modified_base 4: mod_base = OTHER; note = 2-fluororibose uracil
  modified_base 5: mod_base = OTHER; note = 2-O-methylribose adenine
  modified_base 6: mod_base = OTHER; note = 2-fluororibose guanine
  modified_base 7: mod_base = OTHER; note = 2-O-methylribose adenine
  modified_base 8: mod_base = OTHER; note = 2-fluororibose guanine
  modified_base 9: mod_base = cm
  modified_base 10: mod_base = OTHER; note = 2-fluororibose adenine
  modified_base 11: mod_base = OTHER; note = 2-O-methylribose adenine
  modified_base 12: mod_base = gm
  modified_base 13: mod_base = OTHER; note = 2-O-methylribose adenine
  modified_base 14: mod_base = OTHER; note = 2-fluororibose adenine
  modified_base 15: mod_base = cm
  modified_base 16: mod_base = OTHER; note = 2-fluororibose adenine
  modified_base 17: mod_base = cm
  modified_base 18: mod_base = OTHER; note = 2-fluororibose uracil
  modified_base 19: mod_base = gm
  modified_base 20: mod_base = OTHER; note = 2-fluororibose uracil
  modified_base 21: mod_base = um
  modified_base 21..22: mod_base = OTHER; note = S-phosphorothioate
  modified_base 22: mod_base = um
  modified_base 22..23: mod_base = OTHER; note = S-phosphorothioate
  modified_base 23: mod_base = um
  source 1..23: mol_type = other RNA
ttatagagcaagaacactgtttt

SEQ ID NO: 547 - RNA, 23 nt, synthetic construct
  misc_feature 1..23: note = Synthetic: WV-38108
  misc_feature 1..23: note = Synthetic: SSR-0103421
  modified_base 1: mod_base = um
  modified_base 2: mod_base = OTHER; note = 2-fluororibose uracil
  modified_base 2..3: mod_base = OTHER; note = S-phosphorothioate
  modified_base 3: mod_base = OTHER; note = 2-O-methylribose adenine
  modified_base 4: mod_base = OTHER; note = 2-fluororibose uracil
  modified_base 5: mod_base = OTHER; note = 2-O-methylribose adenine
  modified_base 6: mod_base = OTHER; note = 2-fluororibose guanine
  modified_base 7: mod_base = OTHER; note = 2-O-methylribose adenine
  modified_base 8: mod_base = OTHER; note = 2-fluororibose guanine
  modified_base 9: mod_base = cm
  modified_base 10: mod_base = OTHER; note = 2-fluororibose adenine
  modified_base 11: mod_base = OTHER; note = 2-O-methylribose adenine
  modified_base 12: mod_base = gm
  modified_base 13: mod_base = OTHER; note = 2-O-methylribose adenine
  modified_base 14: mod_base = OTHER; note = 2-fluororibose adenine
  modified_base 15: mod_base = cm
  modified_base 16: mod_base = OTHER; note = 2-fluororibose adenine
  modified_base 17: mod_base = cm
  modified_base 18: mod_base = OTHER; note = 2-fluororibose uracil
  modified_base 19: mod_base = gm
  modified_base 20: mod_base = OTHER; note = 2-fluororibose uracil
  modified_base 21: mod_base = um
  modified_base 21..22: mod_base = OTHER; note = S-phosphorothioate
  modified_base 22: mod_base = um
  modified_base 22..23: mod_base = OTHER; note = S-phosphorothioate
  modified_base 23: mod_base = um
  source 1..23: mol_type = other RNA
ttatagagcaagaacactgtttt

SEQ ID NO: 548 - RNA, 23 nt, synthetic construct
  misc_feature 1..23: note = Synthetic: WV-38109
  misc_feature 1..23: note = Synthetic: SSR-0103424
  modified_base 1: mod_base = um
  modified_base 2: mod_base = OTHER; note = 2-fluororibose uracil
  modified_base 3: mod_base = OTHER; note = 2-O-methylribose adenine
  modified_base 3..4: mod_base = OTHER; note = S-phosphorothioate
  modified_base 4: mod_base = OTHER; note = 2-fluororibose uracil
  modified_base 5: mod_base = OTHER; note = 2-O-methylribose adenine
  modified_base 6: mod_base = OTHER; note = 2-fluororibose guanine
  modified_base 7: mod_base = OTHER; note = 2-O-methylribose adenine
  modified_base 8: mod_base = OTHER; note = 2-fluororibose guanine
  modified_base 9: mod_base = cm
  modified_base 10: mod_base = OTHER; note = 2-fluororibose adenine
  modified_base 11: mod_base = OTHER; note = 2-O-methylribose adenine
  modified_base 12: mod_base = gm
  modified_base 13: mod_base = OTHER; note = 2-O-methylribose adenine
  modified_base 14: mod_base = OTHER; note = 2-fluororibose adenine
  modified_base 15: mod_base = cm
  modified_base 16: mod_base = OTHER; note = 2-fluororibose adenine
  modified_base 17: mod_base = cm
  modified_base 18: mod_base = OTHER; note = 2-fluororibose uracil
  modified_base 19: mod_base = gm
  modified_base 20: mod_base = OTHER; note = 2-fluororibose uracil
  modified_base 21: mod_base = um
  modified_base 21..22: mod_base = OTHER; note = S-phosphorothioate
  modified_base 22: mod_base = um
  modified_base 22..23: mod_base = OTHER; note = S-phosphorothioate
  modified_base 23: mod_base = um
  source 1..23: mol_type = other RNA
ttatagagcaagaacactgtttt

SEQ ID NO: 549 - RNA, 23 nt, synthetic construct
  misc_feature 1..23: note = Synthetic: WV-38110
  misc_feature 1..23: note = Synthetic: SSR-0103427
  modified_base 1: mod_base = um
  modified_base 2: mod_base = OTHER; note = 2-fluororibose uracil
  modified_base 3: mod_base = OTHER; note = 2-O-methylribose adenine
  modified_base 4: mod_base = OTHER; note = 2-fluororibose uracil
  modified_base 4..5: mod_base = OTHER; note = S-phosphorothioate
  modified_base 5: mod_base = OTHER; note = 2-O-methylribose adenine
  modified_base 6: mod_base = OTHER; note = 2-fluororibose guanine
  modified_base 7: mod_base = OTHER; note = 2-O-methylribose adenine
  modified_base 8: mod_base = OTHER; note = 2-fluororibose guanine
  modified_base 9: mod_base = cm
  modified_base 10: mod_base = OTHER; note = 2-fluororibose adenine
  modified_base 11: mod_base = OTHER; note = 2-O-methylribose adenine
  modified_base 12: mod_base = gm
  modified_base 13: mod_base = OTHER; note = 2-O-methylribose adenine
  modified_base 14: mod_base = OTHER; note = 2-fluororibose adenine
  modified_base 15: mod_base = cm
  modified_base 16: mod_base = OTHER; note = 2-fluororibose adenine
  modified_base 17: mod_base = cm
  modified_base 18: mod_base = OTHER; note = 2-fluororibose uracil
  modified_base 19: mod_base = gm
  modified_base 20: mod_base = OTHER; note = 2-fluororibose uracil
  modified_base 21: mod_base = um
  modified_base 21..22: mod_base = OTHER; note = S-phosphorothioate
  modified_base 22: mod_base = um
  modified_base 22..23: mod_base = OTHER; note = S-phosphorothioate
  modified_base 23: mod_base = um
  source 1..23: mol_type = other RNA
ttatagagcaagaacactgtttt

SEQ ID NO: 550 - RNA, 23 nt, synthetic construct
  misc_feature 1..23: note = Synthetic: WV-38111
  misc_feature 1..23: note = Synthetic: SSR-0103430
  modified_base 1: mod_base = um
  modified_base 2: mod_base = OTHER; note = 2-fluororibose uracil
  modified_base 3: mod_base = OTHER; note = 2-O-methylribose adenine
  modified_base 4: mod_base = OTHER; note = 2-fluororibose uracil
  modified_base 5: mod_base = OTHER; note = 2-O-methylribose adenine
  modified_base 5..6: mod_base = OTHER; note = S-phosphorothioate
  modified_base 6: mod_base = OTHER; note = 2-fluororibose guanine
  modified_base 7: mod_base = OTHER; note = 2-O-methylribose adenine
  modified_base 8: mod_base = OTHER; note = 2-fluororibose guanine
  modified_base 9: mod_base = cm
  modified_base 10: mod_base = OTHER; note = 2-fluororibose adenine
  modified_base 11: mod_base = OTHER; note = 2-O-methylribose adenine
  modified_base 12: mod_base = gm
  modified_base 13: mod_base = OTHER; note = 2-O-methylribose adenine
  modified_base 14: mod_base = OTHER; note = 2-fluororibose adenine
  modified_base 15: mod_base = cm
  modified_base 16: mod_base = OTHER; note = 2-fluororibose adenine
  modified_base 17: mod_base = cm
  modified_base 18: mod_base = OTHER; note = 2-fluororibose uracil
  modified_base 19: mod_base = gm
  modified_base 20: mod_base = OTHER; note = 2-fluororibose uracil
  modified_base 21: mod_base = um
  modified_base 21..22: mod_base = OTHER; note = S-phosphorothioate
  modified_base 22: mod_base = um
  modified_base 22..23: mod_base = OTHER; note = S-phosphorothioate
  modified_base 23: mod_base = um
  source 1..23: mol_type = other RNA
ttatagagcaagaacactgtttt

SEQ ID NO: 551 - RNA, 23 nt, synthetic construct
  misc_feature 1..23: note = Synthetic: WV-38112
  misc_feature 1..23: note = Synthetic: SSR-0103433
  modified_base 1: mod_base = um
  modified_base 2: mod_base = OTHER; note = 2-fluororibose uracil
  modified_base 3: mod_base = OTHER; note = 2-O-methylribose adenine
  modified_base 4: mod_base = OTHER; note = 2-fluororibose uracil
  modified_base 5: mod_base = OTHER; note = 2-O-methylribose adenine
  modified_base 6: mod_base = OTHER; note = 2-fluororibose guanine
  modified_base 6..7: mod_base = OTHER; note = S-phosphorothioate
  modified_base 7: mod_base = OTHER; note = 2-O-methylribose adenine
  modified_base 8: mod_base = OTHER; note = 2-fluororibose guanine
  modified_base 9: mod_base = cm
  modified_base 10: mod_base = OTHER; note = 2-fluororibose adenine
  modified_base 11: mod_base = OTHER; note = 2-O-methylribose adenine
  modified_base 12: mod_base = gm
  modified_base 13: mod_base = OTHER; note = 2-O-methylribose adenine
  modified_base 14: mod_base = OTHER; note = 2-fluororibose adenine
  modified_base 15: mod_base = cm
  modified_base 16: mod_base = OTHER; note = 2-fluororibose adenine
  modified_base 17: mod_base = cm
  modified_base 18: mod_base = OTHER; note = 2-fluororibose uracil
  modified_base 19: mod_base = gm
  modified_base 20: mod_base = OTHER; note = 2-fluororibose uracil
  modified_base 21: mod_base = um
  modified_base 21..22: mod_base = OTHER; note = S-phosphorothioate
  modified_base 22: mod_base = um
  modified_base 22..23: mod_base = OTHER; note = S-phosphorothioate
  modified_base 23: mod_base = um
  source 1..23: mol_type = other RNA
ttatagagcaagaacactgtttt

SEQ ID NO: 552 - RNA, 23 nt, synthetic construct
  misc_feature 1..23: note = Synthetic: WV-38113
  misc_feature 1..23: note = Synthetic: SSR-0103436
  modified_base 1: mod_base = um
  modified_base 2: mod_base = OTHER; note = 2-fluororibose uracil
  modified_base 3: mod_base = OTHER; note = 2-O-methylribose adenine
  modified_base 4: mod_base = OTHER; note = 2-fluororibose uracil
  modified_base 5: mod_base = OTHER; note = 2-O-methylribose adenine
  modified_base 6: mod_base = OTHER; note = 2-fluororibose guanine
  modified_base 7: mod_base = OTHER; note = 2-O-methylribose adenine
  modified_base 7..8: mod_base = OTHER; note = S-phosphorothioate
  modified_base 8: mod_base = OTHER; note = 2-fluororibose guanine
  modified_base 9: mod_base = cm
  modified_base 10: mod_base = OTHER; note = 2-fluororibose adenine
  modified_base 11: mod_base = OTHER; note = 2-O-methylribose adenine
  modified_base 12: mod_base = gm
  modified_base 13: mod_base = OTHER; note = 2-O-methylribose adenine
  modified_base 14: mod_base = OTHER; note = 2-fluororibose adenine
  modified_base 15: mod_base = cm
  modified_base 16: mod_base = OTHER; note = 2-fluororibose adenine
  modified_base 17: mod_base = cm
  modified_base 18: mod_base = OTHER; note = 2-fluororibose uracil
  modified_base 19: mod_base = gm
  modified_base 20: mod_base = OTHER; note = 2-fluororibose uracil
  modified_base 21: mod_base = um
  modified_base 21..22: mod_base = OTHER; note = S-phosphorothioate
  modified_base 22: mod_base = um
  modified_base 22..23: mod_base = OTHER; note = S-phosphorothioate
  modified_base 23: mod_base = um
  source 1..23: mol_type = other RNA
ttatagagcaagaacactgtttt

SEQ ID NO: 553 - RNA, 23 nt, synthetic construct
  misc_feature 1..23: note = Synthetic: WV-38114
  misc_feature 1..23: note = Synthetic: SSR-0103439
  modified_base 1: mod_base = um
  modified_base 2: mod_base = OTHER; note = 2-fluororibose uracil
  modified_base 3: mod_base = OTHER; note = 2-O-methylribose adenine
  modified_base 4: mod_base = OTHER; note = 2-fluororibose uracil
  modified_base 5: mod_base = OTHER; note = 2-O-methylribose adenine
  modified_base 6: mod_base = OTHER; note = 2-fluororibose guanine
  modified_base 7: mod_base = OTHER; note = 2-O-methylribose adenine
  modified_base 8: mod_base = OTHER; note = 2-fluororibose guanine
  modified_base 8..9: mod_base = OTHER; note = S-phosphorothioate
  modified_base 9: mod_base = cm
  modified_base 10: mod_base = OTHER; note = 2-fluororibose adenine
  modified_base 11: mod_base = OTHER; note = 2-O-methylribose adenine
  modified_base 12: mod_base = gm
  modified_base 13: mod_base = OTHER; note = 2-O-methylribose adenine
  modified_base 14: mod_base = OTHER; note = 2-fluororibose adenine
  modified_base 15: mod_base = cm
  modified_base 16: mod_base = OTHER; note = 2-fluororibose adenine
  modified_base 17: mod_base = cm
  modified_base 18: mod_base = OTHER; note = 2-fluororibose uracil
  modified_base 19: mod_base = gm
  modified_base 20: mod_base = OTHER; note = 2-fluororibose uracil
  modified_base 21: mod_base = um
  modified_base 21..22: mod_base = OTHER; note = S-phosphorothioate
  modified_base 22: mod_base = um
  modified_base 22..23: mod_base = OTHER; note = S-phosphorothioate
  modified_base 23: mod_base = um
  source 1..23: mol_type = other RNA
ttatagagcaagaacactgtttt

SEQ ID NO: 554 - RNA, 23 nt, synthetic construct
  misc_feature 1..23: note = Synthetic: WV-38115
  misc_feature 1..23: note = Synthetic: SSR-0103442
  modified_base 1: mod_base = um
  modified_base 2: mod_base = OTHER; note = 2-fluororibose uracil
  modified_base 3: mod_base = OTHER; note = 2-O-methylribose adenine
  modified_base 4: mod_base = OTHER; note = 2-fluororibose uracil
  modified_base 5: mod_base = OTHER; note = 2-O-methylribose adenine
  modified_base 6: mod_base = OTHER; note = 2-fluororibose guanine
  modified_base 7: mod_base = OTHER; note = 2-O-methylribose adenine
  modified_base 8: mod_base = OTHER; note = 2-fluororibose guanine
  modified_base 9: mod_base = cm
  modified_base 9..10: mod_base = OTHER; note = S-phosphorothioate
  modified_base 10: mod_base = OTHER; note = 2-fluororibose adenine
  modified_base 11: mod_base = OTHER; note = 2-O-methylribose adenine
  modified_base 12: mod_base = gm
  modified_base 13: mod_base = OTHER; note = 2-O-methylribose adenine
  modified_base 14: mod_base = OTHER; note = 2-fluororibose adenine
  modified_base 15: mod_base = cm
  modified_base 16: mod_base = OTHER; note = 2-fluororibose adenine
  modified_base 17: mod_base = cm
  modified_base 18: mod_base = OTHER; note = 2-fluororibose uracil
  modified_base 19: mod_base = gm
  modified_base 20: mod_base = OTHER; note = 2-fluororibose uracil
  modified_base 21: mod_base = um
  modified_base 21..22: mod_base = OTHER; note = S-phosphorothioate
  modified_base 22: mod_base = um
  modified_base 22..23: mod_base = OTHER; note = S-phosphorothioate
  modified_base 23: mod_base = um
  source 1..23: mol_type = other RNA
ttatagagcaagaacactgtttt

SEQ ID NO: 555 - RNA, 23 nt, synthetic construct
  misc_feature 1..23: note = Synthetic: WV-38116
  misc_feature 1..23: note = Synthetic: SSR-0103445
  modified_base 1: mod_base = um
  modified_base 2: mod_base = OTHER; note = 2-fluororibose uracil
  modified_base 3: mod_base = OTHER; note = 2-O-methylribose adenine
  modified_base 4: mod_base = OTHER; note = 2-fluororibose uracil
  modified_base 5: mod_base = OTHER; note = 2-O-methylribose adenine
  modified_base 6: mod_base = OTHER; note = 2-fluororibose guanine
  modified_base 7: mod_base = OTHER; note = 2-O-methylribose adenine
  modified_base 8: mod_base = OTHER; note = 2-fluororibose guanine
  modified_base 9: mod_base = cm
  modified_base 10: mod_base = OTHER; note = 2-fluororibose adenine
  modified_base 10..11: mod_base = OTHER; note = S-phosphorothioate
  modified_base 11: mod_base = OTHER; note = 2-O-methylribose adenine
  modified_base 12: mod_base = gm
  modified_base 13: mod_base = OTHER; note = 2-O-methylribose adenine
  modified_base 14: mod_base = OTHER; note = 2-fluororibose adenine
  modified_base 15: mod_base = cm
  modified_base 16: mod_base = OTHER; note = 2-fluororibose adenine
  modified_base 17: mod_base = cm
  modified_base 18: mod_base = OTHER; note = 2-fluororibose uracil
  modified_base 19: mod_base = gm
  modified_base 20: mod_base = OTHER; note = 2-fluororibose uracil
  modified_base 21: mod_base = um
  modified_base 21..22: mod_base = OTHER; note = S-phosphorothioate
  modified_base 22: mod_base = um
  modified_base 22..23: mod_base = OTHER; note = S-phosphorothioate
  modified_base 23: mod_base = um
  source 1..23: mol_type = other RNA
ttatagagcaagaacactgtttt

SEQ ID NO: 556 - RNA, 23 nt, synthetic construct
  misc_feature 1..23: note = Synthetic: WV-38117
  misc_feature 1..23: note = Synthetic: SSR-0103448
  modified_base 1: mod_base = um
  modified_base 2: mod_base = OTHER; note = 2-fluororibose uracil
  modified_base 3: mod_base = OTHER; note = 2-O-methylribose adenine
  modified_base 4: mod_base = OTHER; note = 2-fluororibose uracil
  modified_base 5: mod_base = OTHER; note = 2-O-methylribose adenine
  modified_base 6: mod_base = OTHER; note = 2-fluororibose guanine
  modified_base 7: mod_base = OTHER; note = 2-O-methylribose adenine
  modified_base 8: mod_base = OTHER; note = 2-fluororibose guanine
  modified_base 9: mod_base = cm
  modified_base 10: mod_base = OTHER; note = 2-fluororibose adenine
  modified_base 11: mod_base = OTHER; note = 2-O-methylribose adenine
  modified_base 11..12: mod_base = OTHER; note = S-phosphorothioate
  modified_base 12: mod_base = gm
  modified_base 13: mod_base = OTHER; note = 2-O-methylribose adenine
  modified_base 14: mod_base = OTHER; note = 2-fluororibose adenine
  modified_base 15: mod_base = cm
  modified_base 16: mod_base = OTHER; note = 2-fluororibose adenine
  modified_base 17: mod_base = cm
  modified_base 18: mod_base = OTHER; note = 2-fluororibose uracil
  modified_base 19: mod_base = gm
  modified_base 20: mod_base = OTHER; note = 2-fluororibose uracil
  modified_base 21: mod_base = um
  modified_base 21..22: mod_base = OTHER; note = S-phosphorothioate
  modified_base 22: mod_base = um
  modified_base 22..23: mod_base = OTHER; note = S-phosphorothioate
  modified_base 23: mod_base = um
  source 1..23: mol_type = other RNA
ttatagagcaagaacactgtttt

SEQ ID NO: 557 - RNA, 23 nt, synthetic construct
  misc_feature 1..23: note = Synthetic: WV-38118
  misc_feature 1..23: note = Synthetic: SSR-0103451
  modified_base 1: mod_base = um
  modified_base 2: mod_base = OTHER; note = 2-fluororibose uracil
  modified_base 3: mod_base = OTHER; note = 2-O-methylribose adenine
  modified_base 4: mod_base = OTHER; note = 2-fluororibose uracil
  modified_base 5: mod_base = OTHER; note = 2-O-methylribose adenine
  modified_base 6: mod_base = OTHER; note = 2-fluororibose guanine
  modified_base 7: mod_base = OTHER; note = 2-O-methylribose adenine
  modified_base 8: mod_base = OTHER; note = 2-fluororibose guanine
  modified_base 9: mod_base = cm
  modified_base 10: mod_base = OTHER; note = 2-fluororibose adenine
  modified_base 11: mod_base = OTHER; note = 2-O-methylribose adenine
  modified_base 12: mod_base = gm
  modified_base 12..13: mod_base = OTHER; note = S-phosphorothioate
  modified_base 13: mod_base = OTHER; note = 2-O-methylribose adenine
  modified_base 14: mod_base = OTHER; note = 2-fluororibose adenine
  modified_base 15: mod_base = cm
  modified_base 16: mod_base = OTHER; note = 2-fluororibose adenine
  modified_base 17: mod_base = cm
  modified_base 18: mod_base = OTHER; note = 2-fluororibose uracil
  modified_base 19: mod_base = gm
  modified_base 20: mod_base = OTHER; note = 2-fluororibose uracil
  modified_base 21: mod_base = um
  modified_base 21..22: mod_base = OTHER; note = S-phosphorothioate
  modified_base 22: mod_base = um
  modified_base 22..23: mod_base = OTHER; note = S-phosphorothioate
  modified_base 23: mod_base = um
  source 1..23: mol_type = other RNA
ttatagagcaagaacactgtttt

SEQ ID NO: 558 - RNA, 23 nt, synthetic construct
  misc_feature 1..23: note = Synthetic: WV-38119
  misc_feature 1..23: note = Synthetic: SSR-0103454
  modified_base 1: mod_base = um
  modified_base 2: mod_base = OTHER; note = 2-fluororibose uracil
  modified_base 3: mod_base = OTHER; note = 2-O-methylribose adenine
  modified_base 4: mod_base = OTHER; note = 2-fluororibose uracil
  modified_base 5: mod_base = OTHER; note = 2-O-methylribose adenine
  modified_base 6: mod_base = OTHER; note = 2-fluororibose guanine
  modified_base 7: mod_base = OTHER; note = 2-O-methylribose adenine
  modified_base 8: mod_base = OTHER; note = 2-fluororibose guanine
  modified_base 9: mod_base = cm
  modified_base 10: mod_base = OTHER; note = 2-fluororibose adenine
  modified_base 11: mod_base = OTHER; note = 2-O-methylribose adenine
  modified_base 12: mod_base = gm
  modified_base 13: mod_base = OTHER; note = 2-O-methylribose adenine
  modified_base 13..14: mod_base = OTHER; note = S-phosphorothioate
  modified_base 14: mod_base = OTHER; note = 2-fluororibose adenine
  modified_base 15: mod_base = cm
  modified_base 16: mod_base = OTHER; note = 2-fluororibose adenine
  modified_base 17: mod_base = cm
  modified_base 18: mod_base = OTHER; note = 2-fluororibose uracil
  modified_base 19: mod_base = gm
  modified_base 20: mod_base = OTHER; note = 2-fluororibose uracil
  modified_base 21: mod_base = um
  modified_base 21..22: mod_base = OTHER; note = S-phosphorothioate
  modified_base 22: mod_base = um
  modified_base 22..23: mod_base = OTHER; note = S-phosphorothioate
  modified_base 23: mod_base = um
  source 1..23: mol_type = other RNA
ttatagagcaagaacactgtttt

SEQ ID NO: 559 - RNA, 23 nt, synthetic construct
  misc_feature 1..23: note = Synthetic: WV-38120
  misc_feature 1..23: note = Synthetic: SSR-0103457
  modified_base 1: mod_base = um
  modified_base 2: mod_base = OTHER; note = 2-fluororibose uracil
  modified_base 3: mod_base = OTHER; note = 2-O-methylribose adenine
  modified_base 4: mod_base = OTHER; note = 2-fluororibose uracil
  modified_base 5: mod_base = OTHER; note = 2-O-methylribose adenine
  modified_base 6: mod_base = OTHER; note = 2-fluororibose guanine
  modified_base 7: mod_base = OTHER; note = 2-O-methylribose adenine
  modified_base 8: mod_base = OTHER; note = 2-fluororibose guanine
  modified_base 9: mod_base = cm
  modified_base 10: mod_base = OTHER; note = 2-fluororibose adenine
  modified_base 11: mod_base = OTHER; note = 2-O-methylribose adenine
  modified_base 12: mod_base = gm
  modified_base 13: mod_base = OTHER; note = 2-O-methylribose adenine
  modified_base 14: mod_base = OTHER; note = 2-fluororibose adenine
  modified_base 14..15: mod_base = OTHER; note = S-phosphorothioate
  modified_base 15: mod_base = cm
  modified_base 16: mod_base = OTHER; note = 2-fluororibose adenine
  modified_base 17: mod_base = cm
  modified_base 18: mod_base = OTHER; note = 2-fluororibose uracil
  modified_base 19: mod_base = gm
  modified_base 20: mod_base = OTHER; note = 2-fluororibose uracil
  modified_base 21: mod_base = um
  modified_base 21..22: mod_base = OTHER; note = S-phosphorothioate
  modified_base 22: mod_base = um
  modified_base 22..23: mod_base = OTHER; note = S-phosphorothioate
  modified_base 23: mod_base = um
  source 1..23: mol_type = other RNA
ttatagagcaagaacactgtttt

SEQ ID NO: 560 - RNA, 23 nt, synthetic construct
  misc_feature 1..23: note = Synthetic: WV-38121
  misc_feature 1..23: note = Synthetic: SSR-0103460
  modified_base 1: mod_base = um
  modified_base 2: mod_base = OTHER; note = 2-fluororibose uracil
  modified_base 3: mod_base = OTHER; note = 2-O-methylribose adenine
  modified_base 4: mod_base = OTHER; note = 2-fluororibose uracil
  modified_base 5: mod_base = OTHER; note = 2-O-methylribose adenine
  modified_base 6: mod_base = OTHER; note = 2-fluororibose guanine
  modified_base 7: mod_base = OTHER; note = 2-O-methylribose adenine
  modified_base 8: mod_base = OTHER; note = 2-fluororibose guanine
  modified_base 9: mod_base = cm
  modified_base 10: mod_base = OTHER; note = 2-fluororibose adenine
  modified_base 11: mod_base = OTHER; note = 2-O-methylribose adenine
  modified_base 12: mod_base = gm
  modified_base 13: mod_base = OTHER; note = 2-O-methylribose adenine
  modified_base 14: mod_base = OTHER; note = 2-fluororibose adenine
  modified_base 15: mod_base = cm
  modified_base 15..16: mod_base = OTHER; note = S-phosphorothioate
  modified_base 16: mod_base = OTHER; note = 2-fluororibose adenine
  modified_base 17: mod_base = cm
  modified_base 18: mod_base = OTHER; note = 2-fluororibose uracil
  modified_base 19: mod_base = gm
  modified_base 20: mod_base = OTHER; note = 2-fluororibose uracil
  modified_base 21: mod_base = um
  modified_base 21..22: mod_base = OTHER; note = S-phosphorothioate
  modified_base 22: mod_base = um
  modified_base 22..23: mod_base = OTHER; note = S-phosphorothioate
  modified_base 23: mod_base = um
  source 1..23: mol_type = other RNA
ttatagagcaagaacactgtttt

SEQ ID NO: 561 - RNA, 23 nt, synthetic construct
  misc_feature 1..23: note = Synthetic: WV-38122
  misc_feature 1..23: note = Synthetic: SSR-0103463
  modified_base 1: mod_base = um
  modified_base 2: mod_base = OTHER; note = 2-fluororibose uracil
  modified_base 3: mod_base = OTHER; note = 2-O-methylribose adenine
  modified_base 4: mod_base = OTHER; note = 2-fluororibose uracil
  modified_base 5: mod_base = OTHER; note = 2-O-methylribose adenine
  modified_base 6: mod_base = OTHER; note = 2-fluororibose guanine
  modified_base 7: mod_base = OTHER; note = 2-O-methylribose adenine
  modified_base 8: mod_base = OTHER; note = 2-fluororibose guanine
  modified_base 9: mod_base = cm
  modified_base 10: mod_base = OTHER; note = 2-fluororibose adenine
  modified_base 11: mod_base = OTHER; note = 2-O-methylribose adenine
  modified_base 12: mod_base = gm
  modified_base 13: mod_base = OTHER; note = 2-O-methylribose adenine
  modified_base 14: mod_base = OTHER; note = 2-fluororibose adenine
  modified_base 15: mod_base = cm
  modified_base 16: mod_base = OTHER; note = 2-fluororibose adenine
  modified_base 16..17: mod_base = OTHER; note = S-phosphorothioate
  modified_base 17: mod_base = cm
  modified_base 18: mod_base = OTHER; note = 2-fluororibose uracil
  modified_base 19: mod_base = gm
  modified_base 20: mod_base = OTHER; note = 2-fluororibose uracil
  modified_base 21: mod_base = um
  modified_base 21..22: mod_base = OTHER; note = S-phosphorothioate
  modified_base 22: mod_base = um
  modified_base 22..23: mod_base = OTHER; note = S-phosphorothioate
  modified_base 23: mod_base = um
  source 1..23: mol_type = other RNA
ttatagagcaagaacactgtttt

SEQ ID NO: 562 - RNA, 23 nt, synthetic construct
  misc_feature 1..23: note = Synthetic: WV-38123
  misc_feature 1..23: note = Synthetic: SSR-0103466
  modified_base 1: mod_base = um
  modified_base 2: mod_base = OTHER; note = 2-fluororibose uracil
  modified_base 3: mod_base = OTHER; note = 2-O-methylribose adenine
  modified_base 4: mod_base = OTHER; note = 2-fluororibose uracil
  modified_base 5: mod_base = OTHER; note = 2-O-methylribose adenine
  modified_base 6: mod_base = OTHER; note = 2-fluororibose guanine
  modified_base 7: mod_base = OTHER; note = 2-O-methylribose adenine
  modified_base 8: mod_base = OTHER; note = 2-fluororibose guanine
  modified_base 9: mod_base = cm
  modified_base 10: mod_base = OTHER; note = 2-fluororibose adenine
  modified_base 11: mod_base = OTHER; note = 2-O-methylribose adenine
  modified_base 12: mod_base = gm
  modified_base 13: mod_base = OTHER; note = 2-O-methylribose adenine
  modified_base 14: mod_base = OTHER; note = 2-fluororibose adenine
  modified_base 15: mod_base = cm
  modified_base 16: mod_base = OTHER; note = 2-fluororibose adenine
  modified_base 17: mod_base = cm
  modified_base 17..18: mod_base = OTHER; note = S-phosphorothioate
  modified_base 18: mod_base = OTHER; note = 2-fluororibose uracil
  modified_base 19: mod_base = gm
  modified_base 20: mod_base = OTHER; note = 2-fluororibose uracil
  modified_base 21: mod_base = um
  modified_base 21..22: mod_base = OTHER; note = S-phosphorothioate
  modified_base 22: mod_base = um
  modified_base 22..23: mod_base = OTHER; note = S-phosphorothioate
  modified_base 23: mod_base = um
  source 1..23: mol_type = other RNA
ttatagagcaagaacactgtttt

SEQ ID NO: 563 - RNA, 23 nt, synthetic construct
  misc_feature 1..23: note = Synthetic: WV-38124
  misc_feature 1..23: note = Synthetic: SSR-0103469
  modified_base 1: mod_base = um
  modified_base 2: mod_base = OTHER; note = 2-fluororibose uracil
  modified_base 3: mod_base = OTHER; note = 2-O-methylribose adenine
  modified_base 4: mod_base = OTHER; note = 2-fluororibose uracil
  modified_base 5: mod_base = OTHER; note = 2-O-methylribose adenine
  modified_base 6: mod_base = OTHER; note = 2-fluororibose guanine
  modified_base 7: mod_base = OTHER; note = 2-O-methylribose adenine
  modified_base 8: mod_base = OTHER; note = 2-fluororibose guanine
  modified_base 9: mod_base = cm
  modified_base 10: mod_base = OTHER; note = 2-fluororibose adenine
  modified_base 11: mod_base = OTHER; note = 2-O-methylribose adenine
  modified_base 12: mod_base = gm
  modified_base 13: mod_base = OTHER; note = 2-O-methylribose adenine
  modified_base 14: mod_base = OTHER; note = 2-fluororibose adenine
  modified_base 15: mod_base = cm
  modified_base 16: mod_base = OTHER; note = 2-fluororibose adenine
  modified_base 17: mod_base = cm
  modified_base 18: mod_base = OTHER; note = 2-fluororibose uracil
  modified_base 18..19: mod_base = OTHER; note = S-phosphorothioate
  modified_base 19: mod_base = gm
  modified_base 20: mod_base = OTHER; note = 2-fluororibose uracil
  modified_base 21: mod_base = um
  modified_base 21..22: mod_base = OTHER; note = S-phosphorothioate
  modified_base 22: mod_base = um
  modified_base 22..23: mod_base = OTHER; note = S-phosphorothioate
  modified_base 23: mod_base = um
  source 1..23: mol_type = other RNA
ttatagagcaagaacactgtttt

SEQ ID NO: 564 - RNA, 23 nt, synthetic construct
  misc_feature 1..23: note = Synthetic: WV-38125
  misc_feature 1..23: note = Synthetic: SSR-0103472
  modified_base 1: mod_base = um
  modified_base 2: mod_base = OTHER; note = 2-fluororibose uracil
  modified_base 3: mod_base = OTHER; note = 2-O-methylribose adenine
  modified_base 4: mod_base = OTHER; note = 2-fluororibose uracil
  modified_base 5: mod_base = OTHER; note = 2-O-methylribose adenine
  modified_base 6: mod_base = OTHER; note = 2-fluororibose guanine
  modified_base 7: mod_base = OTHER; note = 2-O-methylribose adenine
  modified_base 8: mod_base = OTHER; note = 2-fluororibose guanine
  modified_base 9: mod_base = cm
  modified_base 10: mod_base = OTHER; note = 2-fluororibose adenine
  modified_base 11: mod_base = OTHER; note = 2-O-methylribose adenine
  modified_base 12: mod_base = gm
  modified_base 13: mod_base = OTHER; note = 2-O-methylribose adenine
  modified_base 14: mod_base = OTHER; note = 2-fluororibose adenine
  modified_base 15: mod_base = cm
  modified_base 16: mod_base = OTHER; note = 2-fluororibose adenine
  modified_base 17: mod_base = cm
  modified_base 18: mod_base = OTHER; note = 2-fluororibose uracil
  modified_base 19: mod_base = gm
  modified_base 19..20: mod_base = OTHER; note = S-phosphorothioate
  modified_base 20: mod_base = OTHER; note = 2-fluororibose uracil
  modified_base 21: mod_base = um
  modified_base 21..22: mod_base = OTHER; note = S-phosphorothioate
  modified_base 22: mod_base = um
  modified_base 22..23: mod_base = OTHER; note = S-phosphorothioate
  modified_base 23: mod_base = um
  source 1..23: mol_type = other RNA
ttatagagcaagaacactgtttt

SEQ ID NO: 565 - RNA, 23 nt, synthetic construct
  misc_feature 1..23: note = Synthetic: WV-38126
  misc_feature 1..23: note = Synthetic: SSR-0103475
  modified_base 1: mod_base = um
  modified_base 2: mod_base = OTHER; note = 2-fluororibose uracil
  modified_base 3: mod_base = OTHER; note = 2-O-methylribose adenine
  modified_base 4: mod_base = OTHER; note = 2-fluororibose uracil
  modified_base 5: mod_base = OTHER; note = 2-O-methylribose adenine
  modified_base 6: mod_base = OTHER; note = 2-fluororibose guanine
  modified_base 7: mod_base = OTHER; note = 2-O-methylribose adenine
  modified_base 8: mod_base = OTHER; note = 2-fluororibose guanine
  modified_base 9: mod_base = cm
  modified_base 10: mod_base = OTHER; note = 2-fluororibose adenine
  modified_base 11: mod_base = OTHER; note = 2-O-methylribose adenine
  modified_base 12: mod_base = gm
  modified_base 13: mod_base = OTHER; note = 2-O-methylribose adenine
  modified_base 14: mod_base = OTHER; note = 2-fluororibose adenine
  modified_base 15: mod_base = cm
  modified_base 16: mod_base = OTHER; note = 2-fluororibose adenine
  modified_base 17: mod_base = cm
  modified_base 18: mod_base = OTHER; note = 2-fluororibose uracil
  modified_base 19: mod_base = gm
  modified_base 20: mod_base = OTHER; note = 2-fluororibose uracil
  modified_base 20..21: mod_base = OTHER; note = S-phosphorothioate
  modified_base 21: mod_base = um
  modified_base 21..22: mod_base = OTHER; note = S-phosphorothioate
  modified_base 22: mod_base = um
  modified_base 22..23: mod_base = OTHER; note = S-phosphorothioate
  modified_base 23: mod_base = um
  source 1..23: mol_type = other RNA
ttatagagcaagaacactgtttt

SEQ ID NO: 566 - RNA, 23 nt, synthetic construct
  misc_feature 1..23: note = Synthetic: WV-38127
  misc_feature 1..23: note = Synthetic: SSR-0103419
  modified_base 1: mod_base = um
  modified_base 1..2: mod_base = OTHER; note = phosphorothioate
  modified_base 2: mod_base = OTHER; note = 2-fluororibose uracil
  modified_base 3: mod_base = OTHER; note = 2-O-methylribose adenine
  modified_base 4: mod_base = OTHER; note = 2-fluororibose uracil
  modified_base 5: mod_base = OTHER; note = 2-O-methylribose adenine
  modified_base 6: mod_base = OTHER; note = 2-fluororibose guanine
  modified_base 7: mod_base = OTHER; note = 2-O-methylribose adenine
  modified_base 8: mod_base = OTHER; note = 2-fluororibose guanine
  modified_base 9: mod_base = cm
  modified_base 10: mod_base = OTHER; note = 2-fluororibose adenine
  modified_base 11: mod_base = OTHER; note = 2-O-methylribose adenine
  modified_base 12: mod_base = gm
  modified_base 13: mod_base = OTHER; note = 2-O-methylribose adenine
  modified_base 14: mod_base = OTHER; note = 2-fluororibose adenine
  modified_base 15: mod_base = cm
  modified_base 16: mod_base = OTHER; note = 2-fluororibose adenine
  modified_base 17: mod_base = cm
  modified_base 18: mod_base = OTHER; note = 2-fluororibose uracil
  modified_base 19: mod_base = gm
  modified_base 20: mod_base = OTHER; note = 2-fluororibose uracil
  modified_base 21: mod_base = um
  modified_base 21..22: mod_base = OTHER; note = S-phosphorothioate
  modified_base 22: mod_base = um
  modified_base 22..23: mod_base = OTHER; note = S-phosphorothioate
  modified_base 23: mod_base = um
  source 1..23: mol_type = other RNA
ttatagagcaagaacactgtttt

SEQ ID NO: 567 - RNA, 23 nt, synthetic construct
  misc_feature 1..23: note = Synthetic: WV-38128
  misc_feature 1..23: note = Synthetic: SSR-0103422
  modified_base 1: mod_base = um
  modified_base 2: mod_base = OTHER; note = 2-fluororibose uracil
  modified_base 2..3: mod_base = OTHER; note = phosphorothioate
  modified_base 3: mod_base = OTHER; note = 2-O-methylribose adenine
  modified_base 4: mod_base = OTHER; note = 2-fluororibose uracil
  modified_base 5: mod_base = OTHER; note = 2-O-methylribose adenine
  modified_base 6: mod_base = OTHER; note = 2-fluororibose guanine
  modified_base 7: mod_base = OTHER; note = 2-O-methylribose adenine
  modified_base 8: mod_base = OTHER; note = 2-fluororibose guanine
  modified_base 9: mod_base = cm
  modified_base 10: mod_base = OTHER; note = 2-fluororibose adenine
  modified_base 11: mod_base = OTHER; note = 2-O-methylribose adenine
  modified_base 12: mod_base = gm
  modified_base 13: mod_base = OTHER; note = 2-O-methylribose adenine
  modified_base 14: mod_base = OTHER; note = 2-fluororibose adenine
  modified_base 15: mod_base = cm
  modified_base 16: mod_base = OTHER; note = 2-fluororibose adenine
  modified_base 17: mod_base = cm
  modified_base 18: mod_base = OTHER; note = 2-fluororibose uracil
  modified_base 19: mod_base = gm
  modified_base 20: mod_base = OTHER; note = 2-fluororibose uracil
  modified_base 21: mod_base = um
  modified_base 21..22: mod_base = OTHER; note = S-phosphorothioate
  modified_base 22: mod_base = um
  modified_base 22..23: mod_base = OTHER; note = S-phosphorothioate
  modified_base 23: mod_base = um
  source 1..23: mol_type = other RNA
ttatagagcaagaacactgtttt

SEQ ID NO: 568 - RNA, 23 nt, synthetic construct
  misc_feature 1..23: note = Synthetic: WV-38129
  misc_feature 1..23: note = Synthetic: SSR-0103425
  modified_base 1: mod_base = um
  modified_base 2: mod_base = OTHER; note = 2-fluororibose uracil
  modified_base 3: mod_base = OTHER; note = 2-O-methylribose adenine
  modified_base 3..4: mod_base = OTHER; note = phosphorothioate
  modified_base 4: mod_base = OTHER; note = 2-fluororibose uracil
  modified_base 5: mod_base = OTHER; note = 2-O-methylribose adenine
  modified_base 6: mod_base = OTHER; note = 2-fluororibose guanine
  modified_base 7: mod_base = OTHER; note = 2-O-methylribose adenine
  modified_base 8: mod_base = OTHER; note = 2-fluororibose guanine
  modified_base 9: mod_base = cm
  modified_base 10: mod_base = OTHER; note = 2-fluororibose adenine
  modified_base 11: mod_base = OTHER; note = 2-O-methylribose adenine
  modified_base 12: mod_base = gm
  modified_base 13: mod_base = OTHER; note = 2-O-methylribose adenine
  modified_base 14: mod_base = OTHER; note = 2-fluororibose adenine
  modified_base 15: mod_base = cm
  modified_base 16: mod_base = OTHER; note = 2-fluororibose adenine
  modified_base 17: mod_base = cm
  modified_base 18: mod_base = OTHER; note = 2-fluororibose uracil
  modified_base 19: mod_base = gm
  modified_base 20: mod_base = OTHER; note = 2-fluororibose uracil
  modified_base 21: mod_base = um
  modified_base 21..22: mod_base = OTHER; note = S-phosphorothioate
  modified_base 22: mod_base = um
  modified_base 22..23: mod_base = OTHER; note = S-phosphorothioate
  modified_base 23: mod_base = um
  source 1..23: mol_type = other RNA
ttatagagcaagaacactgtttt

SEQ ID NO: 569 - RNA, 23 nt, synthetic construct
  misc_feature 1..23: note = Synthetic: WV-38130
  misc_feature 1..23: note = Synthetic: SSR-0103428
  modified_base 1: mod_base = um
  modified_base 2: mod_base = OTHER; note = 2-fluororibose uracil
  modified_base 3: mod_base = OTHER; note = 2-O-methylribose adenine
  modified_base 4: mod_base = OTHER; note = 2-fluororibose uracil
  modified_base 4..5: mod_base = OTHER; note = phosphorothioate
  modified_base 5: mod_base = OTHER; note = 2-O-methylribose adenine
  modified_base 6: mod_base = OTHER; note = 2-fluororibose guanine
  modified_base 7: mod_base = OTHER; note = 2-O-methylribose adenine
  modified_base 8: mod_base = OTHER; note = 2-fluororibose guanine
  modified_base 9: mod_base = cm
  modified_base 10: mod_base = OTHER; note = 2-fluororibose adenine
  modified_base 11: mod_base = OTHER; note = 2-O-methylribose adenine
  modified_base 12: mod_base = gm
  modified_base 13: mod_base = OTHER; note = 2-O-methylribose adenine
  modified_base 14: mod_base = OTHER; note = 2-fluororibose adenine
  modified_base 15: mod_base = cm
  modified_base 16: mod_base = OTHER; note = 2-fluororibose adenine
  modified_base 17: mod_base = cm
  modified_base 18: mod_base = OTHER; note = 2-fluororibose uracil
  modified_base 19: mod_base = gm
  modified_base 20: mod_base = OTHER; note = 2-fluororibose uracil
  modified_base 21: mod_base = um
  modified_base 21..22: mod_base = OTHER; note = S-phosphorothioate
  modified_base 22: mod_base = um
  modified_base 22..23: mod_base = OTHER; note = S-phosphorothioate
  modified_base 23: mod_base = um
  source 1..23: mol_type = other RNA
ttatagagcaagaacactgtttt

SEQ ID NO: 570 - RNA, 23 nt, synthetic construct
  misc_feature 1..23: note = Synthetic: WV-38131
  misc_feature 1..23: note = Synthetic: SSR-0103431
  modified_base 1: mod_base = um
  modified_base 2: mod_base = OTHER; note = 2-fluororibose uracil
  modified_base 3: mod_base = OTHER; note = 2-O-methylribose adenine
  modified_base 4: mod_base = OTHER; note = 2-fluororibose uracil
  modified_base 5: mod_base = OTHER; note = 2-O-methylribose adenine
  modified_base 5..6: mod_base = OTHER; note = phosphorothioate
  modified_base 6: mod_base = OTHER; note = 2-fluororibose guanine
  modified_base 7: mod_base = OTHER; note = 2-O-methylribose adenine
  modified_base 8: mod_base = OTHER; note = 2-fluororibose guanine
  modified_base 9: mod_base = cm
  modified_base 10: mod_base = OTHER; note = 2-fluororibose adenine
  modified_base 11: mod_base = OTHER; note = 2-O-methylribose adenine
  modified_base 12: mod_base = gm
  modified_base 13: mod_base = OTHER; note = 2-O-methylribose adenine
  modified_base 14: mod_base = OTHER; note = 2-fluororibose adenine
  modified_base 15: mod_base = cm
  modified_base 16: mod_base = OTHER; note = 2-fluororibose adenine
  modified_base 17: mod_base = cm
  modified_base 18: mod_base = OTHER; note = 2-fluororibose uracil
  modified_base 19: mod_base = gm
  modified_base 20: mod_base = OTHER; note = 2-fluororibose uracil
  modified_base 21: mod_base = um
  modified_base 21..22: mod_base = OTHER; note = S-phosphorothioate
  modified_base 22: mod_base = um
  modified_base 22..23: mod_base = OTHER; note = S-phosphorothioate
  modified_base 23: mod_base = um
  source 1..23: mol_type = other RNA
ttatagagcaagaacactgtttt

SEQ ID NO: 571 - RNA, 23 nt, synthetic construct
  misc_feature 1..23: note = Synthetic: WV-38132
  misc_feature 1..23: note = Synthetic: SSR-0103434
  modified_base 1: mod_base = um
  modified_base 2: mod_base = OTHER; note = 2-fluororibose uracil
  modified_base 3: mod_base = OTHER; note = 2-O-methylribose adenine
  modified_base 4: mod_base = OTHER; note = 2-fluororibose uracil
  modified_base 5: mod_base = OTHER; note = 2-O-methylribose adenine
  modified_base 6: mod_base = OTHER; note = 2-fluororibose guanine
  modified_base 6..7: mod_base = OTHER; note = phosphorothioate
  modified_base 7: mod_base = OTHER; note = 2-O-methylribose adenine
  modified_base 8: mod_base = OTHER; note = 2-fluororibose guanine
  modified_base 9: mod_base = cm
  modified_base 10: mod_base = OTHER; note = 2-fluororibose adenine
  modified_base 11: mod_base = OTHER; note = 2-O-methylribose adenine
  modified_base 12: mod_base = gm
  modified_base 13: mod_base = OTHER; note = 2-O-methylribose adenine
  modified_base 14: mod_base = OTHER; note = 2-fluororibose adenine
  modified_base 15: mod_base = cm
  modified_base 16: mod_base = OTHER; note = 2-fluororibose adenine
  modified_base 17: mod_base = cm
  modified_base 18: mod_base = OTHER; note = 2-fluororibose uracil
  modified_base 19: mod_base = gm
  modified_base 20: mod_base = OTHER; note = 2-fluororibose uracil
  modified_base 21: mod_base = um
  modified_base 21..22: mod_base = OTHER; note = S-phosphorothioate
  modified_base 22: mod_base = um
  modified_base 22..23: mod_base = OTHER; note = S-phosphorothioate
  modified_base 23: mod_base = um
  source 1..23: mol_type = other RNA
ttatagagcaagaacactgtttt

SEQ ID NO: 572 - RNA, 23 nt, synthetic construct
  misc_feature 1..23: note = Synthetic: WV-38133
  misc_feature 1..23: note = Synthetic: SSR-0103437
  modified_base 1: mod_base = um
  modified_base 2: mod_base = OTHER; note = 2-fluororibose uracil
  modified_base 3: mod_base = OTHER; note = 2-O-methylribose adenine
  modified_base 4: mod_base = OTHER; note = 2-fluororibose uracil
  modified_base 5: mod_base = OTHER; note = 2-O-methylribose adenine
  modified_base 6: mod_base = OTHER; note = 2-fluororibose guanine
  modified_base 7: mod_base = OTHER; note = 2-O-methylribose adenine
  modified_base 7..8: mod_base = OTHER; note = phosphorothioate
  modified_base 8: mod_base = OTHER; note = 2-fluororibose guanine
  modified_base 9: mod_base = cm
  modified_base 10: mod_base = OTHER; note = 2-fluororibose adenine
  modified_base 11: mod_base = OTHER; note = 2-O-methylribose adenine
  modified_base 12: mod_base = gm
  modified_base 13: mod_base = OTHER; note = 2-O-methylribose adenine
  modified_base 14: mod_base = OTHER; note = 2-fluororibose adenine
  modified_base 15: mod_base = cm
  modified_base 16: mod_base = OTHER; note = 2-fluororibose adenine
  modified_base 17: mod_base = cm
  modified_base 18: mod_base = OTHER; note = 2-fluororibose uracil
  modified_base 19: mod_base = gm
  modified_base 20: mod_base = OTHER; note = 2-fluororibose uracil
  modified_base 21: mod_base = um
  modified_base 21..22: mod_base = OTHER; note = S-phosphorothioate
  modified_base 22: mod_base = um
  modified_base 22..23: mod_base = OTHER; note = S-phosphorothioate
  modified_base 23: mod_base = um
  source 1..23: mol_type = other RNA
ttatagagcaagaacactgtttt

SEQ ID NO: 573 - RNA, 23 nt, synthetic construct
  misc_feature 1..23: note = Synthetic: WV-38134
  misc_feature 1..23: note = Synthetic: SSR-0103440
  modified_base 1: mod_base = um
  modified_base 2: mod_base = OTHER; note = 2-fluororibose uracil
  modified_base 3: mod_base = OTHER; note = 2-O-methylribose adenine
  modified_base 4: mod_base = OTHER; note = 2-fluororibose uracil
  modified_base 5: mod_base = OTHER; note = 2-O-methylribose adenine
  modified_base 6: mod_base = OTHER; note = 2-fluororibose guanine
  modified_base 7: mod_base = OTHER; note = 2-O-methylribose adenine
  modified_base 8: mod_base = OTHER; note = 2-fluororibose guanine
  modified_base 8..9: mod_base = OTHER; note = phosphorothioate
  modified_base 9: mod_base = cm
  modified_base 10: mod_base = OTHER; note = 2-fluororibose adenine
  modified_base 11: mod_base = OTHER; note = 2-O-methylribose adenine
  modified_base 12: mod_base = gm
  modified_base 13: mod_base = OTHER; note = 2-O-methylribose adenine
  modified_base 14: mod_base = OTHER; note = 2-fluororibose adenine
  modified_base 15: mod_base = cm
  modified_base 16: mod_base = OTHER; note = 2-fluororibose adenine
  modified_base 17: mod_base = cm
  modified_base 18: mod_base = OTHER; note = 2-fluororibose uracil
  modified_base 19: mod_base = gm
  modified_base 20: mod_base = OTHER; note = 2-fluororibose uracil
  modified_base 21: mod_base = um
  modified_base 21..22: mod_base = OTHER; note = S-phosphorothioate
  modified_base 22: mod_base = um
  modified_base 22..23: mod_base = OTHER; note = S-phosphorothioate
  modified_base 23: mod_base = um
  source 1..23: mol_type = other RNA
ttatagagcaagaacactgtttt

SEQ ID NO: 574 - RNA, 23 nt, synthetic construct
  misc_feature 1..23: note = Synthetic: WV-38135
  misc_feature 1..23: note = Synthetic: SSR-0103443
  modified_base 1: mod_base = um
  modified_base 2: mod_base = OTHER; note = 2-fluororibose uracil
  modified_base 3: mod_base = OTHER; note = 2-O-methylribose adenine
  modified_base 4: mod_base = OTHER; note = 2-fluororibose uracil
  modified_base 5: mod_base = OTHER; note = 2-O-methylribose adenine
  modified_base 6: mod_base = OTHER; note = 2-fluororibose guanine
  modified_base 7: mod_base = OTHER; note = 2-O-methylribose adenine
  modified_base 8: mod_base = OTHER; note = 2-fluororibose guanine
  modified_base 9: mod_base = cm
  modified_base 9..10: mod_base = OTHER; note = phosphorothioate
  modified_base 10: mod_base = OTHER; note = 2-fluororibose adenine
  modified_base 11: mod_base = OTHER; note = 2-O-methylribose adenine
  modified_base 12: mod_base = gm
  modified_base 13: mod_base = OTHER; note = 2-O-methylribose adenine
  modified_base 14: mod_base = OTHER; note = 2-fluororibose adenine
  modified_base 15: mod_base = cm
  modified_base 16: mod_base = OTHER; note = 2-fluororibose adenine
  modified_base 17: mod_base = cm
  modified_base 18: mod_base = OTHER; note = 2-fluororibose uracil
  modified_base 19: mod_base = gm
  modified_base 20: mod_base = OTHER; note = 2-fluororibose uracil
  modified_base 21: mod_base = um
  modified_base 21..22: mod_base = OTHER; note = S-phosphorothioate
  modified_base 22: mod_base = um
  modified_base 22..23: mod_base = OTHER; note = S-phosphorothioate
  modified_base 23: mod_base = um
  source 1..23: mol_type = other RNA
ttatagagcaagaacactgtttt

SEQ ID NO: 575 - RNA, 23 nt, synthetic construct
  misc_feature 1..23: note = Synthetic: WV-38136
  misc_feature 1..23: note = Synthetic: SSR-0103446
  modified_base 1: mod_base = um
  modified_base 2: mod_base = OTHER; note = 2-fluororibose uracil
  modified_base 3: mod_base = OTHER; note = 2-O-methylribose adenine
  modified_base 4: mod_base = OTHER; note = 2-fluororibose uracil
  modified_base 5: mod_base = OTHER; note = 2-O-methylribose adenine
  modified_base 6: mod_base = OTHER; note = 2-fluororibose guanine
  modified_base 7: mod_base = OTHER; note = 2-O-methylribose adenine
  modified_base 8: mod_base = OTHER; note = 2-fluororibose guanine
  modified_base 9: mod_base = cm
  modified_base 10: mod_base = OTHER; note = 2-fluororibose adenine
  modified_base 10..11: mod_base = OTHER; note = phosphorothioate
  modified_base 11: mod_base = OTHER; note = 2-O-methylribose adenine
  modified_base 12: mod_base = gm
  modified_base 13: mod_base = OTHER; note = 2-O-methylribose adenine
  modified_base 14: mod_base = OTHER; note = 2-fluororibose adenine
  modified_base 15: mod_base = cm
  modified_base 16: mod_base = OTHER; note = 2-fluororibose adenine
  modified_base 17: mod_base = cm
  modified_base 18: mod_base = OTHER; note = 2-fluororibose uracil
  modified_base 19: mod_base = gm
  modified_base 20: mod_base = OTHER; note = 2-fluororibose uracil
  modified_base 21: mod_base = um
  modified_base 21..22: mod_base = OTHER; note = S-phosphorothioate
  modified_base 22: mod_base = um
  modified_base 22..23: mod_base = OTHER; note = S-phosphorothioate
  modified_base 23: mod_base = um
  source 1..23: mol_type = other RNA
ttatagagcaagaacactgtttt

SEQ ID NO: 576 - RNA, 23 nt, synthetic construct
  misc_feature 1..23: note = Synthetic: WV-38137
  misc_feature 1..23: note = Synthetic: SSR-0103449
  modified_base 1: mod_base = um
  modified_base 2: mod_base = OTHER; note = 2-fluororibose uracil
  modified_base 3: mod_base = OTHER; note = 2-O-methylribose adenine
  modified_base 4: mod_base = OTHER; note = 2-fluororibose uracil
  modified_base 5: mod_base = OTHER; note = 2-O-methylribose adenine
  modified_base 6: mod_base = OTHER; note = 2-fluororibose guanine
  modified_base 7: mod_base = OTHER; note = 2-O-methylribose adenine
  modified_base 8: mod_base = OTHER; note = 2-fluororibose guanine
  modified_base 9: mod_base = cm
  modified_base 10: mod_base = OTHER; note = 2-fluororibose adenine
  modified_base 11: mod_base = OTHER; note = 2-O-methylribose adenine
  modified_base 11..12: mod_base = OTHER; note = phosphorothioate
  modified_base 12: mod_base = gm
  modified_base 13: mod_base = OTHER; note = 2-O-methylribose adenine
  modified_base 14: mod_base = OTHER; note = 2-fluororibose adenine
  modified_base 15: mod_base = cm
  modified_base 16: mod_base = OTHER; note = 2-fluororibose adenine
  modified_base 17: mod_base = cm
  modified_base 18: mod_base = OTHER; note = 2-fluororibose uracil
  modified_base 19: mod_base = gm
  modified_base 20: mod_base = OTHER; note = 2-fluororibose uracil
  modified_base 21: mod_base = um
  modified_base 21..22: mod_base = OTHER; note = S-phosphorothioate
  modified_base 22: mod_base = um
  modified_base 22..23: mod_base = OTHER; note = S-phosphorothioate
  modified_base 23: mod_base = um
  source 1..23: mol_type = other RNA
ttatagagcaagaacactgtttt

SEQ ID NO: 577 - RNA, 23 nt, synthetic construct
  misc_feature 1..23: note = Synthetic: WV-38138
  misc_feature 1..23: note = Synthetic: SSR-0103452
  modified_base 1: mod_base = um
  modified_base 2: mod_base = OTHER; note = 2-fluororibose uracil
  modified_base 3: mod_base = OTHER; note = 2-O-methylribose adenine
  modified_base 4: mod_base = OTHER; note = 2-fluororibose uracil
  modified_base 5: mod_base = OTHER; note = 2-O-methylribose adenine
  modified_base 6: mod_base = OTHER; note = 2-fluororibose guanine
  modified_base 7: mod_base = OTHER; note = 2-O-methylribose adenine
  modified_base 8: mod_base = OTHER; note = 2-fluororibose guanine
  modified_base 9: mod_base = cm
  modified_base 10: mod_base = OTHER; note = 2-fluororibose adenine
  modified_base 11: mod_base = OTHER; note = 2-O-methylribose adenine
  modified_base 12: mod_base = gm
  modified_base 12..13: mod_base = OTHER; note = phosphorothioate
  modified_base 13: mod_base = OTHER; note = 2-O-methylribose adenine
  modified_base 14: mod_base = OTHER; note = 2-fluororibose adenine
  modified_base 15: mod_base = cm
  modified_base 16: mod_base = OTHER; note = 2-fluororibose adenine
  modified_base 17: mod_base = cm
  modified_base 18: mod_base = OTHER; note = 2-fluororibose uracil
  modified_base 19: mod_base = gm
  modified_base 20: mod_base = OTHER; note = 2-fluororibose uracil
  modified_base 21: mod_base = um
  modified_base 21..22: mod_base = OTHER; note = S-phosphorothioate
  modified_base 22: mod_base = um
  modified_base 22..23: mod_base = OTHER; note = S-phosphorothioate
  modified_base 23: mod_base = um
  source 1..23: mol_type = other RNA
ttatagagcaagaacactgtttt

SEQ ID NO: 578 - RNA, 23 nt, synthetic construct
  misc_feature 1..23: note = Synthetic: WV-38139
  misc_feature 1..23: note = Synthetic: SSR-0103455
  modified_base 1: mod_base = um
  modified_base 2: mod_base = OTHER; note = 2-fluororibose uracil
  modified_base 3: mod_base = OTHER; note = 2-O-methylribose adenine
  modified_base 4: mod_base = OTHER; note = 2-fluororibose uracil
  modified_base 5: mod_base = OTHER; note = 2-O-methylribose adenine
  modified_base 6: mod_base = OTHER; note = 2-fluororibose guanine
  modified_base 7: mod_base = OTHER; note = 2-O-methylribose adenine
  modified_base 8: mod_base = OTHER; note = 2-fluororibose guanine
  modified_base 9: mod_base = cm
  modified_base 10: mod_base = OTHER; note = 2-fluororibose adenine
  modified_base 11: mod_base = OTHER; note = 2-O-methylribose adenine
  modified_base 12: mod_base = gm
  modified_base 13: mod_base = OTHER; note = 2-O-methylribose adenine
  modified_base 13..14: mod_base = OTHER; note = phosphorothioate
  modified_base 14: mod_base = OTHER; note = 2-fluororibose adenine
  modified_base 15: mod_base = cm
  modified_base 16: mod_base = OTHER; note = 2-fluororibose adenine
  modified_base 17: mod_base = cm
  modified_base 18: mod_base = OTHER; note = 2-fluororibose uracil
  modified_base 19: mod_base = gm
  modified_base 20: mod_base = OTHER; note = 2-fluororibose uracil
  modified_base 21: mod_base = um
  modified_base 21..22: mod_base = OTHER; note = S-phosphorothioate
  modified_base 22: mod_base = um
  modified_base 22..23: mod_base = OTHER; note = S-phosphorothioate
  modified_base 23: mod_base = um
  source 1..23: mol_type = other RNA
ttatagagcaagaacactgtttt

SEQ ID NO: 579 - RNA, 23 nt, synthetic construct
  misc_feature 1..23: note = Synthetic: WV-38140
  misc_feature 1..23: note = Synthetic: SSR-0103458
  modified_base 1: mod_base = um
  modified_base 2: mod_base = OTHER; note = 2-fluororibose uracil
  modified_base 3: mod_base = OTHER; note = 2-O-methylribose adenine
  modified_base 4: mod_base = OTHER; note = 2-fluororibose uracil
  modified_base 5: mod_base = OTHER; note = 2-O-methylribose adenine
  modified_base 6: mod_base = OTHER; note = 2-fluororibose guanine
  modified_base 7: mod_base = OTHER; note = 2-O-methylribose adenine
  modified_base 8: mod_base = OTHER; note = 2-fluororibose guanine
  modified_base 9: mod_base = cm
  modified_base 10: mod_base = OTHER; note = 2-fluororibose adenine
  modified_base 11: mod_base = OTHER; note = 2-O-methylribose adenine
  modified_base 12: mod_base = gm
  modified_base 13: mod_base = OTHER; note = 2-O-methylribose adenine
  modified_base 14: mod_base = OTHER; note = 2-fluororibose adenine
  modified_base 14..15: mod_base = OTHER; note = phosphorothioate
  modified_base 15: mod_base = cm
  modified_base 16: mod_base = OTHER; note = 2-fluororibose adenine
  modified_base 17: mod_base = cm
  modified_base 18: mod_base = OTHER; note = 2-fluororibose uracil
  modified_base 19: mod_base = gm
  modified_base 20: mod_base = OTHER; note = 2-fluororibose uracil
  modified_base 21: mod_base = um
  modified_base 21..22: mod_base = OTHER; note = S-phosphorothioate
  modified_base 22: mod_base = um
  modified_base 22..23: mod_base = OTHER; note = S-phosphorothioate
  modified_base 23: mod_base = um
  source 1..23: mol_type = other RNA
ttatagagcaagaacactgtttt

SEQ ID NO: 580 - RNA, 23 nt, synthetic construct
  misc_feature 1..23: note = Synthetic: WV-38141
  misc_feature 1..23: note = Synthetic: SSR-0103461
  modified_base 1: mod_base = um
  modified_base 2: mod_base = OTHER; note = 2-fluororibose uracil
  modified_base 3: mod_base = OTHER; note = 2-O-methylribose adenine
  modified_base 4: mod_base = OTHER; note = 2-fluororibose uracil
  modified_base 5: mod_base = OTHER; note = 2-O-methylribose adenine
  modified_base 6: mod_base = OTHER; note = 2-fluororibose guanine
  modified_base 7: mod_base = OTHER; note = 2-O-methylribose adenine
  modified_base 8: mod_base = OTHER; note = 2-fluororibose guanine
  modified_base 9: mod_base = cm
  modified_base 10: mod_base = OTHER; note = 2-fluororibose adenine
  modified_base 11: mod_base = OTHER; note = 2-O-methylribose adenine
  modified_base 12: mod_base = gm
  modified_base 13: mod_base = OTHER; note = 2-O-methylribose adenine
  modified_base 14: mod_base = OTHER; note = 2-fluororibose adenine
  modified_base 15: mod_base = cm
  modified_base 15..16: mod_base = OTHER; note = phosphorothioate
  modified_base 16: mod_base = OTHER; note = 2-fluororibose adenine
  modified_base 17: mod_base = cm
  modified_base 18: mod_base = OTHER; note = 2-fluororibose uracil
  modified_base 19: mod_base = gm
  modified_base 20: mod_base = OTHER; note = 2-fluororibose uracil
  modified_base 21: mod_base = um
  modified_base 21..22: mod_base = OTHER; note = S-phosphorothioate
  modified_base 22: mod_base = um
  modified_base 22..23: mod_base = OTHER; note = S-phosphorothioate
  modified_base 23: mod_base = um
  source 1..23: mol_type = other RNA
ttatagagcaagaacactgtttt

SEQ ID NO: 581 - RNA, 23 nt, synthetic construct
  misc_feature 1..23: note = Synthetic: WV-38142
  misc_feature 1..23: note = Synthetic: SSR-0103464
  modified_base 1: mod_base = um
  modified_base 2: mod_base = OTHER; note = 2-fluororibose uracil
  modified_base 3: mod_base = OTHER; note = 2-O-methylribose adenine
  modified_base 4: mod_base = OTHER; note = 2-fluororibose uracil
  modified_base 5: mod_base = OTHER; note = 2-O-methylribose adenine
  modified_base 6: mod_base = OTHER; note = 2-fluororibose guanine
  modified_base 7: mod_base = OTHER; note = 2-O-methylribose adenine
  modified_base 8: mod_base = OTHER; note = 2-fluororibose guanine
  modified_base 9: mod_base = cm
  modified_base 10: mod_base = OTHER; note = 2-fluororibose adenine
  modified_base 11: mod_base = OTHER; note = 2-O-methylribose adenine
  modified_base 12: mod_base = gm
  modified_base 13: mod_base = OTHER; note = 2-O-methylribose adenine
  modified_base 14: mod_base = OTHER; note = 2-fluororibose adenine
  modified_base 15: mod_base = cm
  modified_base 16: mod_base = OTHER; note = 2-fluororibose adenine
  modified_base 16..17: mod_base = OTHER; note = phosphorothioate
  modified_base 17: mod_base = cm
  modified_base 18: mod_base = OTHER; note = 2-fluororibose uracil
  modified_base 19: mod_base = gm
  modified_base 20: mod_base = OTHER; note = 2-fluororibose uracil
  modified_base 21: mod_base = um
  modified_base 21..22: mod_base = OTHER; note = S-phosphorothioate
  modified_base 22: mod_base = um
  modified_base 22..23: mod_base = OTHER; note = S-phosphorothioate
  modified_base 23: mod_base = um
  source 1..23: mol_type = other RNA
ttatagagcaagaacactgtttt

SEQ ID NO: 582 - RNA, 23 nt, synthetic construct
  misc_feature 1..23: note = Synthetic: WV-38143
  misc_feature 1..23: note = Synthetic: SSR-0103467
  modified_base 1: mod_base = um
  modified_base 2: mod_base = OTHER; note = 2-fluororibose uracil
  modified_base 3: mod_base = OTHER; note = 2-O-methylribose adenine
  modified_base 4: mod_base = OTHER; note = 2-fluororibose uracil
  modified_base 5: mod_base = OTHER; note = 2-O-methylribose adenine
  modified_base 6: mod_base = OTHER; note = 2-fluororibose guanine
  modified_base 7: mod_base = OTHER; note = 2-O-methylribose adenine
  modified_base 8: mod_base = OTHER; note = 2-fluororibose guanine
  modified_base 9: mod_base = cm
  modified_base 10: mod_base = OTHER; note = 2-fluororibose adenine
  modified_base 11: mod_base = OTHER; note = 2-O-methylribose adenine
  modified_base 12: mod_base = gm
  modified_base 13: mod_base = OTHER; note = 2-O-methylribose adenine
  modified_base 14: mod_base = OTHER; note = 2-fluororibose adenine
  modified_base 15: mod_base = cm
  modified_base 16: mod_base = OTHER; note = 2-fluororibose adenine
  modified_base 17: mod_base = cm
  modified_base 17..18: mod_base = OTHER; note = phosphorothioate
  modified_base 18: mod_base = OTHER; note = 2-fluororibose uracil
  modified_base 19: mod_base = gm
  modified_base 20: mod_base = OTHER; note = 2-fluororibose uracil
  modified_base 21: mod_base = um
  modified_base 21..22: mod_base = OTHER; note = S-phosphorothioate
  modified_base 22: mod_base = um
  modified_base 22..23: mod_base = OTHER; note = S-phosphorothioate
  modified_base 23: mod_base = um
  source 1..23: mol_type = other RNA
ttatagagcaagaacactgtttt

SEQ ID NO: 583 - RNA, 23 nt, synthetic construct
  misc_feature 1..23: note = Synthetic: WV-38144
  misc_feature 1..23: note = Synthetic: SSR-0103470
  modified_base 1: mod_base = um
  modified_base 2: mod_base = OTHER; note = 2-fluororibose uracil
  modified_base 3: mod_base = OTHER; note = 2-O-methylribose adenine
  modified_base 4: mod_base = OTHER; note = 2-fluororibose uracil
  modified_base 5: mod_base = OTHER; note = 2-O-methylribose adenine
  modified_base 6: mod_base = OTHER; note = 2-fluororibose guanine
  modified_base 7: mod_base = OTHER; note = 2-O-methylribose adenine
  modified_base 8: mod_base = OTHER; note = 2-fluororibose guanine
  modified_base 9: mod_base = cm
  modified_base 10: mod_base = OTHER; note = 2-fluororibose adenine
  modified_base 11: mod_base = OTHER; note = 2-O-methylribose adenine
  modified_base 12: mod_base = gm
  modified_base 13: mod_base = OTHER; note = 2-O-methylribose adenine
  modified_base 14: mod_base = OTHER; note = 2-fluororibose adenine
  modified_base 15: mod_base = cm
  modified_base 16: mod_base = OTHER; note = 2-fluororibose adenine
  modified_base 17: mod_base = cm
  modified_base 18: mod_base = OTHER; note = 2-fluororibose uracil
  modified_base 18..19: mod_base = OTHER; note = phosphorothioate
  modified_base 19: mod_base = gm
  modified_base 20: mod_base = OTHER; note = 2-fluororibose uracil
  modified_base 21: mod_base = um
  modified_base 21..22: mod_base = OTHER; note = S-phosphorothioate
  modified_base 22: mod_base = um
  modified_base 22..23: mod_base = OTHER; note = S-phosphorothioate
  modified_base 23: mod_base = um
  source 1..23: mol_type = other RNA
ttatagagcaagaacactgtttt

SEQ ID NO: 584 - RNA, 23 nt, synthetic construct
  misc_feature 1..23: note = Synthetic: WV-38145
  misc_feature 1..23: note = Synthetic: SSR-0103473
  modified_base 1: mod_base = um
  modified_base 2: mod_base = OTHER; note = 2-fluororibose uracil
  modified_base 3: mod_base = OTHER; note = 2-O-methylribose adenine
  modified_base 4: mod_base = OTHER; note = 2-fluororibose uracil
  modified_base 5: mod_base = OTHER; note = 2-O-methylribose adenine
  modified_base 6: mod_base = OTHER; note = 2-fluororibose guanine
  modified_base 7: mod_base = OTHER; note = 2-O-methylribose adenine
  modified_base 8: mod_base = OTHER; note = 2-fluororibose guanine
  modified_base 9: mod_base = cm
  modified_base 10: mod_base = OTHER; note = 2-fluororibose adenine
  modified_base 11: mod_base = OTHER; note = 2-O-methylribose adenine
  modified_base 12: mod_base = gm
  modified_base 13: mod_base = OTHER; note = 2-O-methylribose adenine
  modified_base 14: mod_base = OTHER; note = 2-fluororibose adenine
  modified_base 15: mod_base = cm
  modified_base 16: mod_base = OTHER; note = 2-fluororibose adenine
  modified_base 17: mod_base = cm
  modified_base 18: mod_base = OTHER; note = 2-fluororibose uracil
  modified_base 19: mod_base = gm
  modified_base 19..20: mod_base = OTHER; note = phosphorothioate
  modified_base 20: mod_base = OTHER; note = 2-fluororibose uracil
  modified_base 21: mod_base = um
  modified_base 21..22: mod_base = OTHER; note = S-phosphorothioate
  modified_base 22: mod_base = um
  modified_base 22..23: mod_base = OTHER; note = S-phosphorothioate
  modified_base 23: mod_base = um
  source 1..23: mol_type = other RNA
ttatagagcaagaacactgtttt

SEQ ID NO: 585 - RNA, 23 nt, synthetic construct
  misc_feature 1..23: note = Synthetic: WV-38146
  misc_feature 1..23: note = Synthetic: SSR-0103476
  modified_base 1: mod_base = um
  modified_base 2: mod_base = OTHER; note = 2-fluororibose uracil
  modified_base 3: mod_base = OTHER; note = 2-O-methylribose adenine
  modified_base 4: mod_base = OTHER; note = 2-fluororibose uracil
  modified_base 5: mod_base = OTHER; note = 2-O-methylribose adenine
  modified_base 6: mod_base = OTHER; note = 2-fluororibose guanine
  modified_base 7: mod_base = OTHER; note = 2-O-methylribose adenine
  modified_base 8: mod_base = OTHER; note = 2-fluororibose guanine
  modified_base 9: mod_base = cm
  modified_base 10: mod_base = OTHER; note = 2-fluororibose adenine
  modified_base 11: mod_base = OTHER; note = 2-O-methylribose adenine
  modified_base 12: mod_base = gm
  modified_base 13: mod_base = OTHER; note = 2-O-methylribose adenine
  modified_base 14: mod_base = OTHER; note = 2-fluororibose adenine
  modified_base 15: mod_base = cm
  modified_base 16: mod_base = OTHER; note = 2-fluororibose adenine
  modified_base 17: mod_base = cm
  modified_base 18: mod_base = OTHER; note = 2-fluororibose uracil
  modified_base 19: mod_base = gm
  modified_base 20: mod_base = OTHER; note = 2-fluororibose uracil
  modified_base 20..21: mod_base = OTHER; note = phosphorothioate
  modified_base 21: mod_base = um
  modified_base 21..22: mod_base = OTHER; note = S-phosphorothioate
  modified_base 22: mod_base = um
  modified_base 22..23: mod_base = OTHER; note = S-phosphorothioate
  modified_base 23: mod_base = um
  source 1..23: mol_type = other RNA
ttatagagcaagaacactgtttt

SEQ ID NO: 586 - RNA, 23 nt, synthetic construct
  misc_feature 1..23: note = Synthetic: WV-38678
  misc_feature 1..23: note = Synthetic: SSR-0103383
  modified_base 1: mod_base = um
  modified_base 1..2: mod_base = OTHER; note = phosphorothioate
  modified_base 2: mod_base = OTHER; note = 2-fluororibose uracil
  modified_base 2..3: mod_base = OTHER; note = phosphorothioate
  modified_base 3: mod_base = OTHER; note = 2-O-methylribose adenine
  modified_base 3..4: mod_base = OTHER; note = N-(1,3-dimethylimidazolidin-2-ylidene)phosphoramidate
  modified_base 4: mod_base = OTHER; note = 2-fluororibose uracil
  modified_base 5: mod_base = OTHER; note = 2-O-methylribose adenine
  modified_base 6: mod_base = OTHER; note = 2-fluororibose guanine
  modified_base 7: mod_base = OTHER; note = 2-O-methylribose adenine
  modified_base 8: mod_base = OTHER; note = 2-fluororibose guanine
  modified_base 9: mod_base = cm
  modified_base 10: mod_base = OTHER; note = 2-fluororibose adenine
  modified_base 10..11: mod_base = OTHER; note = N-(1,3-dimethylimidazolidin-2-ylidene)phosphoramidate
  modified_base 11: mod_base = OTHER; note = 2-O-methylribose adenine
  modified_base 12: mod_base = gm
  modified_base 13: mod_base = OTHER; note = 2-O-methylribose adenine
  modified_base 14: mod_base = OTHER; note = 2-fluororibose adenine
  modified_base 15: mod_base = cm
  modified_base 16: mod_base = OTHER; note = 2-fluororibose adenine
  modified_base 17: mod_base = cm
  modified_base 18: mod_base = OTHER; note = 2-fluororibose uracil
  modified_base 19: mod_base = gm
  modified_base 20: mod_base = OTHER; note = 2-fluororibose uracil
  modified_base 21: mod_base = um
  modified_base 21..22: mod_base = OTHER; note = phosphorothioate
  modified_base 22: mod_base = um
  modified_base 22..23: mod_base = OTHER; note = phosphorothioate
  modified_base 23: mod_base = um
  source 1..23: mol_type = other RNA
ttatagagcaagaacactgtttt

SEQ ID NO: 587 - RNA, 23 nt, synthetic construct
  misc_feature 1..23: note = Synthetic: WV-38687
  misc_feature 1..23: note = Synthetic: SSR-0103392
  modified_base 1: mod_base = um
  modified_base 1..2: mod_base = OTHER; note = phosphorothioate
  modified_base 2: mod_base = OTHER; note = 2-fluororibose uracil
  modified_base 2..3: mod_base = OTHER; note = phosphorothioate
  modified_base 3: mod_base = OTHER; note = 2-O-methylribose adenine
  modified_base 3..4: mod_base = OTHER; note = N-(1,3-dimethylimidazolidin-2-ylidene)phosphoramidate
  modified_base 4: mod_base = OTHER; note = 2-fluororibose uracil
  modified_base 5: mod_base = OTHER; note = 2-O-methylribose adenine
  modified_base 6: mod_base = OTHER; note = 2-fluororibose guanine
  modified_base 7: mod_base = OTHER; note = 2-O-methylribose adenine
  modified_base 8: mod_base = OTHER; note = 2-fluororibose guanine
  modified_base 9: mod_base = cm
  modified_base 10: mod_base = OTHER; note = 2-fluororibose adenine
  modified_base 11: mod_base = OTHER; note = 2-O-methylribose adenine
  modified_base 12: mod_base = gm
  modified_base 13: mod_base = OTHER; note = 2-O-methylribose adenine
  modified_base 14: mod_base = OTHER; note = 2-fluororibose adenine
  modified_base 15: mod_base = cm
  modified_base 16: mod_base = OTHER; note = 2-fluororibose adenine
  modified_base 17: mod_base = cm
  modified_base 18: mod_base = OTHER; note = 2-fluororibose uracil
  modified_base 19: mod_base = gm
  modified_base 19..20: mod_base = OTHER; note = N-(1,3-dimethylimidazolidin-2-ylidene)phosphoramidate
  modified_base 20: mod_base = OTHER; note = 2-fluororibose uracil
  modified_base 21: mod_base = um
  modified_base 21..22: mod_base = OTHER; note = phosphorothioate
  modified_base 22: mod_base = um
  modified_base 22..23: mod_base = OTHER; note = phosphorothioate
  modified_base 23: mod_base = um
  source 1..23: mol_type = other RNA
ttatagagcaagaacactgtttt

SEQ ID NO: 588 - RNA, 23 nt, synthetic construct
  misc_feature 1..23: note = Synthetic: WV-38703
  misc_feature 1..23: note = Synthetic: SSR-0103191
  modified_base 1: mod_base = um
  modified_base 1..2: mod_base = OTHER; note = R-phosphorothioate
  modified_base 2: mod_base = OTHER; note = 2-fluororibose uracil
  modified_base 2..3: mod_base = OTHER; note = S-phosphorothioate
  modified_base 3: mod_base = OTHER; note = 2-O-methylribose adenine
  modified_base 3..4: mod_base = OTHER; note = N-(1,3-dimethylimidazolidin-2-ylidene)phosphoramidate
  modified_base 4: mod_base = OTHER; note = 2-fluororibose uracil
  modified_base 5: mod_base = OTHER; note = 2-O-methylribose adenine
  modified_base 6: mod_base = OTHER; note = 2-fluororibose guanine
  modified_base 7: mod_base = OTHER; note = 2-O-methylribose adenine
  modified_base 8: mod_base = OTHER; note = 2-fluororibose guanine
  modified_base 9: mod_base = cm
  modified_base 10: mod_base = OTHER; note = 2-fluororibose adenine
  modified_base 10..11: mod_base = OTHER; note = N-(1,3-dimethylimidazolidin-2-ylidene)phosphoramidate
  modified_base 11: mod_base = OTHER; note = 2-O-methylribose adenine
  modified_base 12: mod_base = gm
  modified_base 13: mod_base = OTHER; note = 2-O-methylribose adenine
  modified_base 14: mod_base = OTHER; note = 2-fluororibose adenine
  modified_base 15: mod_base = cm
  modified_base 16: mod_base = OTHER; note = 2-fluororibose adenine
  modified_base 17: mod_base = cm
  modified_base 18: mod_base = OTHER; note = 2-fluororibose uracil
  modified_base 19: mod_base = gm
  modified_base 20: mod_base = OTHER; note = 2-fluororibose uracil
  modified_base 21: mod_base = um
  modified_base 21..22: mod_base = OTHER; note = S-phosphorothioate
  modified_base 22: mod_base = um
  modified_base 22..23: mod_base = OTHER; note = S-phosphorothioate
  modified_base 23: mod_base = um
  source 1..23: mol_type = other RNA
ttatagagcaagaacactgtttt

SEQ ID NO: 589 - RNA, 23 nt, synthetic construct
  misc_feature 1..23: note = Synthetic: WV-38704
  misc_feature 1..23: note = Synthetic: SSR-0103190
  modified_base 1: mod_base = um
  modified_base 1..2: mod_base = OTHER; note = R-phosphorothioate
  modified_base 2: mod_base = OTHER; note = 2-fluororibose uracil
  modified_base 2..3: mod_base = OTHER; note = S-phosphorothioate
  modified_base 3: mod_base = OTHER; note = 2-O-methylribose adenine
  modified_base 3..4: mod_base = OTHER; note = N-(1,3-dimethylimidazolidin-2-ylidene)phosphoramidate
  modified_base 4: mod_base = OTHER; note = 2-fluororibose uracil
  modified_base 5: mod_base = OTHER; note = 2-O-methylribose adenine
  modified_base 6: mod_base = OTHER; note = 2-fluororibose guanine
  modified_base 7: mod_base = OTHER; note = 2-O-methylribose adenine
  modified_base 8: mod_base = OTHER; note = 2-fluororibose guanine
  modified_base 9: mod_base = cm
  modified_base 10: mod_base = OTHER; note = 2-fluororibose adenine
  modified_base 10..11: mod_base = OTHER; note = N-(1,3-dimethylimidazolidin-2-ylidene)phosphoramidate
  modified_base 11: mod_base = OTHER; note = 2-O-methylribose adenine
  modified_base 12: mod_base = gm
  modified_base 13: mod_base = OTHER; note = 2-O-methylribose adenine
  modified_base 14: mod_base = OTHER; note = 2-fluororibose adenine
  modified_base 15: mod_base = cm
  modified_base 16: mod_base = OTHER; note = 2-fluororibose adenine
  modified_base 17: mod_base = cm
  modified_base 18: mod_base = OTHER; note = 2-fluororibose uracil
  modified_base 19: mod_base = gm
  modified_base 19..20: mod_base = OTHER; note = N-(1,3-dimethylimidazolidin-2-ylidene)phosphoramidate
  modified_base 20: mod_base = OTHER; note = 2-fluororibose uracil
  modified_base 21: mod_base = um
  modified_base 21..22: mod_base = OTHER; note = S-phosphorothioate
  modified_base 22: mod_base = um
  modified_base 22..23: mod_base = OTHER; note = S-phosphorothioate
  modified_base 23: mod_base = um
  source 1..23: mol_type = other RNA
ttatagagcaagaacactgtttt

SEQ ID NO: 590 - RNA, 23 nt, synthetic construct
  misc_feature 1..23: note = Synthetic: WV-38705
  misc_feature 1..23: note = Synthetic: SSR-0103140
  modified_base 1: mod_base = um
  modified_base 1..2: mod_base = OTHER; note = R-phosphorothioate
  modified_base 2: mod_base = OTHER; note = 2-fluororibose uracil
  modified_base 2..3: mod_base = OTHER; note = S-phosphorothioate
  modified_base 3: mod_base = OTHER; note = 2-O-methylribose adenine
  modified_base 3..4: mod_base = OTHER; note R-N-(1,3-dimethylimidazolidin-2-ylidene)phosphoramidate
  modified_base 4: mod_base = OTHER; note = 2-fluororibose uracil
  modified_base 5: mod_base = OTHER; note = 2-O-methylribose adenine
  modified_base 6: mod_base = OTHER; note = 2-fluororibose guanine
  modified_base 7: mod_base = OTHER; note = 2-O-methylribose adenine
  modified_base 8: mod_base = OTHER; note = 2-fluororibose guanine
  modified_base 9: mod_base = cm
  modified_base 10: mod_base = OTHER; note = 2-fluororibose adenine
  modified_base 10..11: mod_base = OTHER; note R-N-(1,3-dimethylimidazolidin-2-ylidene)phosphoramidate
  modified_base 11: mod_base = OTHER; note = 2-O-methylribose adenine
  modified_base 12: mod_base = gm
  modified_base 13: mod_base = OTHER; note = 2-O-methylribose adenine
  modified_base 14: mod_base = OTHER; note = 2-fluororibose adenine
  modified_base 15: mod_base = cm
  modified_base 16: mod_base = OTHER; note = 2-fluororibose adenine
  modified_base 17: mod_base = cm
  modified_base 18: mod_base = OTHER; note = 2-fluororibose uracil
  modified_base 19: mod_base = gm
  modified_base 20: mod_base = OTHER; note = 2-fluororibose uracil
  modified_base 21: mod_base = um
  modified_base 21..22: mod_base = OTHER; note = S-phosphorothioate
  modified_base 22: mod_base = um
  modified_base 22..23: mod_base = OTHER; note = S-phosphorothioate
  modified_base 23: mod_base = um
  source 1..23: mol_type = other RNA
ttatagagcaagaacactgtttt

SEQ ID NO: 591 - RNA, 23 nt, synthetic construct
  misc_feature 1..23: note = Synthetic: WV-38706
  misc_feature 1..23: note = Synthetic: SSR-0103138
  modified_base 1: mod_base = um
  modified_base 1..2: mod_base = OTHER; note = R-phosphorothioate
  modified_base 2: mod_base = OTHER; note = 2-fluororibose uracil
  modified_base 2..3: mod_base = OTHER; note = S-phosphorothioate
  modified_base 3: mod_base = OTHER; note = 2-O-methylribose adenine
  modified_base 3..4: mod_base = OTHER; note R-N-(1,3-dimethylimidazolidin-2-ylidene)phosphoramidate
  modified_base 4: mod_base = OTHER; note = 2-fluororibose uracil
  modified_base 5: mod_base = OTHER; note = 2-O-methylribose adenine
  modified_base 6: mod_base = OTHER; note = 2-fluororibose guanine
  modified_base 7: mod_base = OTHER; note = 2-O-methylribose adenine
  modified_base 8: mod_base = OTHER; note = 2-fluororibose guanine
  modified_base 9: mod_base = cm
  modified_base 10: mod_base = OTHER; note = 2-fluororibose adenine
  modified_base 10..11: mod_base = OTHER; note R-N-(1,3-dimethylimidazolidin-2-ylidene)phosphoramidate
  modified_base 11: mod_base = OTHER; note = 2-O-methylribose adenine
  modified_base 12: mod_base = gm
  modified_base 13: mod_base = OTHER; note = 2-O-methylribose adenine
  modified_base 14: mod_base = OTHER; note = 2-fluororibose adenine
  modified_base 15: mod_base = cm
  modified_base 16: mod_base = OTHER; note = 2-fluororibose adenine
  modified_base 17: mod_base = cm
  modified_base 18: mod_base = OTHER; note = 2-fluororibose uracil
  modified_base 19: mod_base = gm
  modified_base 19..20: mod_base = OTHER; note R-N-(1,3-dimethylimidazolidin-2-ylidene)phosphoramidate
  modified_base 20: mod_base = OTHER; note = 2-fluororibose uracil
  modified_base 21: mod_base = um
  modified_base 21..22: mod_base = OTHER; note = S-phosphorothioate
  modified_base 22: mod_base = um
  modified_base 22..23: mod_base = OTHER; note = S-phosphorothioate
  modified_base 23: mod_base = um
  source 1..23: mol_type = other RNA
ttatagagcaagaacactgtttt

SEQ ID NO: 592 - RNA, 23 nt, synthetic construct
  misc_feature 1..23: note = Synthetic: WV-38707
  misc_feature 1..23: note = Synthetic: SSR-0103176
  modified_base 1: mod_base = um
  modified_base 1..2: mod_base = OTHER; note = R-phosphorothioate
  modified_base 2: mod_base = OTHER; note = 2-fluororibose uracil
  modified_base 2..3: mod_base = OTHER; note = S-phosphorothioate
  modified_base 3: mod_base = OTHER; note = 2-O-methylribose adenine
  modified_base 3..4: mod_base = OTHER; note S-N-(1,3-dimethylimidazolidin-2-ylidene)phosphoramidate
  modified_base 4: mod_base = OTHER; note = 2-fluororibose uracil
  modified_base 5: mod_base = OTHER; note = 2-O-methylribose adenine
  modified_base 6: mod_base = OTHER; note = 2-fluororibose guanine
  modified_base 7: mod_base = OTHER; note = 2-O-methylribose adenine
  modified_base 8: mod_base = OTHER; note = 2-fluororibose guanine
  modified_base 9: mod_base = cm
  modified_base 10: mod_base = OTHER; note = 2-fluororibose adenine
  modified_base 10..11: mod_base = OTHER; note S-N-(1,3-dimethylimidazolidin-2-ylidene)phosphoramidate
  modified_base 11: mod_base = OTHER; note = 2-O-methylribose adenine
  modified_base 12: mod_base = gm
  modified_base 13: mod_base = OTHER; note = 2-O-methylribose adenine
  modified_base 14: mod_base = OTHER; note = 2-fluororibose adenine
  modified_base 15: mod_base = cm
  modified_base 16: mod_base = OTHER; note = 2-fluororibose adenine
  modified_base 17: mod_base = cm
  modified_base 18: mod_base = OTHER; note = 2-fluororibose uracil
  modified_base 19: mod_base = gm
  modified_base 20: mod_base = OTHER; note = 2-fluororibose uracil
  modified_base 21: mod_base = um
  modified_base 21..22: mod_base = OTHER; note = S-phosphorothioate
  modified_base 22: mod_base = um
  modified_base 22..23: mod_base = OTHER; note = S-phosphorothioate
  modified_base 23: mod_base = um
  source 1..23: mol_type = other RNA
ttatagagcaagaacactgtttt

SEQ ID NO: 593 - RNA, 21 nt, synthetic construct
  misc_feature 1..21: note = Synthetic: WV-40362
  misc_feature 1..21: note = Synthetic: SSR-0101473
  modified_base 1: mod_base = OTHER; note = triantennary GalNAc with C12 linker linked to 6-aminohexanol linked by phosphate to the 5' end of 2-O-methylribose adenine
  modified_base 1..2: mod_base = OTHER; note = phosphorothioate
  modified_base 2: mod_base = OTHER; note = 2-O-methylribose adenine
  modified_base 3: mod_base = OTHER; note = 2-fluororibose cytosine
  modified_base 4: mod_base = OTHER; note = 2-O-methylribose adenine
  modified_base 5: mod_base = OTHER; note = 2-fluororibose guanine
  modified_base 6: mod_base = um
  modified_base 7: mod_base = OTHER; note = 2-fluororibose guanine
  modified_base 8: mod_base = um
  modified_base 9: mod_base = OTHER; note = 2-fluororibose uracil
  modified_base 10: mod_base = OTHER; note = 2-fluororibose cytosine
  modified_base 11: mod_base = OTHER; note = 2-fluororibose uracil
  modified_base 12: mod_base = um
  modified_base 13: mod_base = OTHER; note = 2-fluororibose guanine
  modified_base 14: mod_base = cm
  modified_base 15: mod_base = OTHER; note = 2-fluororibose uracil
  modified_base 16: mod_base = cm
  modified_base 17: mod_base = OTHER; note = 2-fluororibose uracil
  modified_base 18: mod_base = OTHER; note = 2-O-methylribose adenine
  modified_base 19: mod_base = OTHER; note = 2-fluororibose uracil
  modified_base 20: mod_base = OTHER; note = 2-O-methylribose adenine
  modified_base 20..21: mod_base = OTHER; note = phosphorothioate
  modified_base 21: mod_base = OTHER; note = 2-fluororibose adenine
  source 1..21: mol_type = other RNA
aacagtgttcttgctctataa

SEQ ID NO: 594 - RNA, 21 nt, synthetic construct
  misc_feature 1..21: note = Synthetic: WV-40363
  misc_feature 1..21: note = Synthetic: SSR-0101474
  modified_base 1: mod_base = OTHER; note = triantennary GalNAc with C12 linker linked to 6-aminohexanol linked by phosphate to the 5' end of 2-O-methylribose adenine
  modified_base 1..2: mod_base = OTHER; note = S-phosphorothioate
  modified_base 2: mod_base = OTHER; note = 2-O-methylribose adenine
  modified_base 3: mod_base = OTHER; note = 2-fluororibose cytosine
  modified_base 4: mod_base = OTHER; note = 2-O-methylribose adenine
  modified_base 5: mod_base = OTHER; note = 2-fluororibose guanine
  modified_base 6: mod_base = um
  modified_base 7: mod_base = OTHER; note = 2-fluororibose guanine
  modified_base 8: mod_base = um
  modified_base 9: mod_base = OTHER; note = 2-fluororibose uracil
  modified_base 10: mod_base = OTHER; note = 2-fluororibose cytosine
  modified_base 11: mod_base = OTHER; note = 2-fluororibose uracil
  modified_base 12: mod_base = um
  modified_base 13: mod_base = OTHER; note = 2-fluororibose guanine
  modified_base 14: mod_base = cm
  modified_base 15: mod_base = OTHER; note = 2-fluororibose uracil
  modified_base 16: mod_base = cm
  modified_base 17: mod_base = OTHER; note = 2-fluororibose uracil
  modified_base 18: mod_base = OTHER; note = 2-O-methylribose adenine
  modified_base 19: mod_base = OTHER; note = 2-fluororibose uracil
  modified_base 20: mod_base = OTHER; note = 2-O-methylribose adenine
  modified_base 20..21: mod_base = OTHER; note = S-phosphorothioate
  modified_base 21: mod_base = OTHER; note = 2-fluororibose adenine
  source 1..21: mol_type = other RNA
aacagtgttcttgctctataa

SEQ ID NO: 595 - RNA, 23 nt, synthetic construct
  misc_feature 1..23: note = Synthetic: WV-40552
  misc_feature 1..23: note = Synthetic: SSR-0103172
  modified_base 1: mod_base = um
  modified_base 1..2: mod_base = OTHER; note = R-phosphorothioate
  modified_base 2: mod_base = OTHER; note = 2-fluororibose uracil
  modified_base 2..3: mod_base = OTHER; note = S-phosphorothioate
  modified_base 3: mod_base = OTHER; note = 2-O-methylribose adenine
  modified_base 3..4: mod_base = OTHER; note S-N-(1,3-dimethylimidazolidin-2-ylidene)phosphoramidate
  modified_base 4: mod_base = OTHER; note = 2-fluororibose uracil
  modified_base 5: mod_base = OTHER; note = 2-O-methylribose adenine
  modified_base 6: mod_base = OTHER; note = 2-fluororibose guanine
  modified_base 7: mod_base = OTHER; note = 2-O-methylribose adenine
  modified_base 8: mod_base = OTHER; note = 2-fluororibose guanine
  modified_base 9: mod_base = cm
  modified_base 10: mod_base = OTHER; note = 2-fluororibose adenine
  modified_base 10..11: mod_base = OTHER; note R-N-(1,3-dimethylimidazolidin-2-ylidene)phosphoramidate
  modified_base 11: mod_base = OTHER; note = 2-O-methylribose adenine
  modified_base 12: mod_base = gm
  modified_base 13: mod_base = OTHER; note = 2-O-methylribose adenine
  modified_base 14: mod_base = OTHER; note = 2-fluororibose adenine
  modified_base 15: mod_base = cm
  modified_base 16: mod_base = OTHER; note = 2-fluororibose adenine
  modified_base 17: mod_base = cm
  modified_base 18: mod_base = OTHER; note = 2-fluororibose uracil
  modified_base 19: mod_base = gm
  modified_base 19..20: mod_base = OTHER; note R-N-(1,3-dimethylimidazolidin-2-ylidene)phosphoramidate
  modified_base 20: mod_base = OTHER; note = 2-fluororibose uracil
  modified_base 21: mod_base = um
  modified_base 21..22: mod_base = OTHER; note = S-phosphorothioate
  modified_base 22: mod_base = um
  modified_base 22..23: mod_base = OTHER; note = S-phosphorothioate
  modified_base 23: mod_base = um
  source 1..23: mol_type = other RNA
ttatagagcaagaacactgtttt

SEQ ID NO: 596 - RNA, 23 nt, synthetic construct
  misc_feature 1..23: note = Synthetic: WV-40553
  misc_feature 1..23: note = Synthetic: SSR-0103139
  modified_base 1: mod_base = um
  modified_base 1..2: mod_base = OTHER; note = R-phosphorothioate
  modified_base 2: mod_base = OTHER; note = 2-fluororibose uracil
  modified_base 2..3: mod_base = OTHER; note = S-phosphorothioate
  modified_base 3: mod_base = OTHER; note = 2-O-methylribose adenine
  modified_base 3..4: mod_base = OTHER; note R-N-(1,3-dimethylimidazolidin-2-ylidene)phosphoramidate
  modified_base 4: mod_base = OTHER; note = 2-fluororibose uracil
  modified_base 5: mod_base = OTHER; note = 2-O-methylribose adenine
  modified_base 6: mod_base = OTHER; note = 2-fluororibose guanine
  modified_base 7: mod_base = OTHER; note = 2-O-methylribose adenine
  modified_base 8: mod_base = OTHER; note = 2-fluororibose guanine
  modified_base 9: mod_base = cm
  modified_base 10: mod_base = OTHER; note = 2-fluororibose adenine
  modified_base 10..11: mod_base = OTHER; note R-N-(1,3-dimethylimidazolidin-2-ylidene)phosphoramidate
  modified_base 11: mod_base = OTHER; note = 2-O-methylribose adenine
  modified_base 12: mod_base = gm
  modified_base 13: mod_base = OTHER; note = 2-O-methylribose adenine
  modified_base 14: mod_base = OTHER; note = 2-fluororibose adenine
  modified_base 15: mod_base = cm
  modified_base 16: mod_base = OTHER; note = 2-fluororibose adenine
  modified_base 17: mod_base = cm
  modified_base 18: mod_base = OTHER; note = 2-fluororibose uracil
  modified_base 19: mod_base = gm
  modified_base 19..20: mod_base = OTHER; note S-N-(1,3-dimethylimidazolidin-2-ylidene)phosphoramidate
  modified_base 20: mod_base = OTHER; note = 2-fluororibose uracil
  modified_base 21: mod_base = um
  modified_base 21..22: mod_base = OTHER; note = S-phosphorothioate
  modified_base 22: mod_base = um
  modified_base 22..23: mod_base = OTHER; note = S-phosphorothioate
  modified_base 23: mod_base = um
  source 1..23: mol_type = other RNA
ttatagagcaagaacactgtttt

SEQ ID NO: 597 - RNA, 23 nt, synthetic construct
  misc_feature 1..23: note = Synthetic: WV-40555
  misc_feature 1..23: note = Synthetic: SSR-0103142
  modified_base 1: mod_base = um
  modified_base 1..2: mod_base = OTHER; note = R-phosphorothioate
  modified_base 2: mod_base = OTHER; note = 2-fluororibose uracil
  modified_base 2..3: mod_base = OTHER; note = S-phosphorothioate
  modified_base 3: mod_base = OTHER; note = 2-O-methylribose adenine
  modified_base 3..4: mod_base = OTHER; note R-N-(1,3-dimethylimidazolidin-2-ylidene)phosphoramidate
  modified_base 4: mod_base = OTHER; note = 2-fluororibose uracil
  modified_base 5: mod_base = OTHER; note = 2-O-methylribose adenine
  modified_base 6: mod_base = OTHER; note = 2-fluororibose guanine
  modified_base 7: mod_base = OTHER; note = 2-O-methylribose adenine
  modified_base 8: mod_base = OTHER; note = 2-fluororibose guanine
  modified_base 9: mod_base = cm
  modified_base 10: mod_base = OTHER; note = 2-fluororibose adenine
  modified_base 10..11: mod_base = OTHER; note S-N-(1,3-dimethylimidazolidin-2-ylidene)phosphoramidate
  modified_base 11: mod_base = OTHER; note = 2-O-methylribose adenine
  modified_base 12: mod_base = gm
  modified_base 13: mod_base = OTHER; note = 2-O-methylribose adenine
  modified_base 14: mod_base = OTHER; note = 2-fluororibose adenine
  modified_base 15: mod_base = cm
  modified_base 16: mod_base = OTHER; note = 2-fluororibose adenine
  modified_base 17: mod_base = cm
  modified_base 18: mod_base = OTHER; note = 2-fluororibose uracil
  modified_base 19: mod_base = gm
  modified_base 19..20: mod_base = OTHER; note S-N-(1,3-dimethylimidazolidin-2-ylidene)phosphoramidate
  modified_base 20: mod_base = OTHER; note = 2-fluororibose uracil
  modified_base 21: mod_base = um
  modified_base 21..22: mod_base = OTHER; note = S-phosphorothioate
  modified_base 22: mod_base = um
  modified_base 22..23: mod_base = OTHER; note = S-phosphorothioate
  modified_base 23: mod_base = um
  source 1..23: mol_type = other RNA
ttatagagcaagaacactgtttt

SEQ ID NO: 598 - RNA, 23 nt, synthetic construct
  misc_feature 1..23: note = Synthetic: WV-40556
  misc_feature 1..23: note = Synthetic: SSR-0103173
  modified_base 1: mod_base = um
  modified_base 1..2: mod_base = OTHER; note = R-phosphorothioate
  modified_base 2: mod_base = OTHER; note = 2-fluororibose uracil
  modified_base 2..3: mod_base = OTHER; note = S-phosphorothioate
  modified_base 3: mod_base = OTHER; note = 2-O-methylribose adenine
  modified_base 3..4: mod_base = OTHER; note S-N-(1,3-dimethylimidazolidin-2-ylidene)phosphoramidate
  modified_base 4: mod_base = OTHER; note = 2-fluororibose uracil
  modified_base 5: mod_base = OTHER; note = 2-O-methylribose adenine
  modified_base 6: mod_base = OTHER; note = 2-fluororibose guanine
  modified_base 7: mod_base = OTHER; note = 2-O-methylribose adenine
  modified_base 8: mod_base = OTHER; note = 2-fluororibose guanine
  modified_base 9: mod_base = cm
  modified_base 10: mod_base = OTHER; note = 2-fluororibose adenine
  modified_base 10..11: mod_base = OTHER; note R-N-(1,3-dimethylimidazolidin-2-ylidene)phosphoramidate
  modified_base 11: mod_base = OTHER; note = 2-O-methylribose adenine
  modified_base 12: mod_base = gm
  modified_base 13: mod_base = OTHER; note = 2-O-methylribose adenine
  modified_base 14: mod_base = OTHER; note = 2-fluororibose adenine
  modified_base 15: mod_base = cm
  modified_base 16: mod_base = OTHER; note = 2-fluororibose adenine
  modified_base 17: mod_base = cm
  modified_base 18: mod_base = OTHER; note = 2-fluororibose uracil
  modified_base 19: mod_base = gm
  modified_base 19..20: mod_base = OTHER; note S-N-(1,3-dimethylimidazolidin-2-ylidene)phosphoramidate
  modified_base 20: mod_base = OTHER; note = 2-fluororibose uracil
  modified_base 21: mod_base = um
  modified_base 21..22: mod_base = OTHER; note = S-phosphorothioate
  modified_base 22: mod_base = um
  modified_base 22..23: mod_base = OTHER; note = S-phosphorothioate
  modified_base 23: mod_base = um
  source 1..23: mol_type = other RNA
ttatagagcaagaacactgtttt

SEQ ID NO: 599 - RNA, 23 nt, synthetic construct
  misc_feature 1..23: note = Synthetic: WV-40796
  misc_feature 1..23: note = Synthetic: SSR-0103141
  modified_base 1: mod_base = um
  modified_base 1..2: mod_base = OTHER; note = R-phosphorothioate
  modified_base 2: mod_base = OTHER; note = 2-fluororibose uracil
  modified_base 2..3: mod_base = OTHER; note = S-phosphorothioate
  modified_base 3: mod_base = OTHER; note = 2-O-methylribose adenine
  modified_base 3..4: mod_base = OTHER; note R-N-(1,3-dimethylimidazolidin-2-ylidene)phosphoramidate
  modified_base 4: mod_base = OTHER; note = 2-fluororibose uracil
  modified_base 5: mod_base = OTHER; note = 2-O-methylribose adenine
  modified_base 6: mod_base = OTHER; note = 2-fluororibose guanine
  modified_base 7: mod_base = OTHER; note = 2-O-methylribose adenine
  modified_base 8: mod_base = OTHER; note = 2-fluororibose guanine
  modified_base 9: mod_base = cm
  modified_base 10: mod_base = OTHER; note = 2-fluororibose adenine
  modified_base 10..11: mod_base = OTHER; note S-N-(1,3-dimethylimidazolidin-2-ylidene)phosphoramidate
  modified_base 11: mod_base = OTHER; note = 2-O-methylribose adenine
  modified_base 12: mod_base = gm
  modified_base 13: mod_base = OTHER; note = 2-O-methylribose adenine
  modified_base 14: mod_base = OTHER; note = 2-fluororibose adenine
  modified_base 15: mod_base = cm
  modified_base 16: mod_base = OTHER; note = 2-fluororibose adenine
  modified_base 17: mod_base = cm
  modified_base 18: mod_base = OTHER; note = 2-fluororibose uracil
  modified_base 19: mod_base = gm
  modified_base 19..20: mod_base = OTHER; note R-N-(1,3-dimethylimidazolidin-2-ylidene)phosphoramidate
  modified_base 20: mod_base = OTHER; note = 2-fluororibose uracil
  modified_base 21: mod_base = um
  modified_base 21..22: mod_base = OTHER; note = S-phosphorothioate
  modified_base 22: mod_base = um
  modified_base 22..23: mod_base = OTHER; note = S-phosphorothioate
  modified_base 23: mod_base = um
  source 1..23: mol_type = other RNA
ttatagagcaagaacactgtttt

SEQ ID NO: 600 - RNA, 23 nt, synthetic construct
  misc_feature 1..23: note = Synthetic: WV-40797
  misc_feature 1..23: note = Synthetic: SSR-0103174
  modified_base 1: mod_base = um
  modified_base 1..2: mod_base = OTHER; note = R-phosphorothioate
  modified_base 2: mod_base = OTHER; note = 2-fluororibose uracil
  modified_base 2..3: mod_base = OTHER; note = S-phosphorothioate
  modified_base 3: mod_base = OTHER; note = 2-O-methylribose adenine
  modified_base 3..4: mod_base = OTHER; note S-N-(1,3-dimethylimidazolidin-2-ylidene)phosphoramidate
  modified_base 4: mod_base = OTHER; note = 2-fluororibose uracil
  modified_base 5: mod_base = OTHER; note = 2-O-methylribose adenine
  modified_base 6: mod_base = OTHER; note = 2-fluororibose guanine
  modified_base 7: mod_base = OTHER; note = 2-O-methylribose adenine
  modified_base 8: mod_base = OTHER; note = 2-fluororibose guanine
  modified_base 9: mod_base = cm
  modified_base 10: mod_base = OTHER; note = 2-fluororibose adenine
  modified_base 10..11: mod_base = OTHER; note S-N-(1,3-dimethylimidazolidin-2-ylidene)phosphoramidate
  modified_base 11: mod_base = OTHER; note = 2-O-methylribose adenine
  modified_base 12: mod_base = gm
  modified_base 13: mod_base = OTHER; note = 2-O-methylribose adenine
  modified_base 14: mod_base = OTHER; note = 2-fluororibose adenine
  modified_base 15: mod_base = cm
  modified_base 16: mod_base = OTHER; note = 2-fluororibose adenine
  modified_base 17: mod_base = cm
  modified_base 18: mod_base = OTHER; note = 2-fluororibose uracil
  modified_base 19: mod_base = gm
  modified_base 19..20: mod_base = OTHER; note R-N-(1,3-dimethylimidazolidin-2-ylidene)phosphoramidate
  modified_base 20: mod_base = OTHER; note = 2-fluororibose uracil
  modified_base 21: mod_base = um
  modified_base 21..22: mod_base = OTHER; note = S-phosphorothioate
  modified_base 22: mod_base = um
  modified_base 22..23: mod_base = OTHER; note = S-phosphorothioate
  modified_base 23: mod_base = um
  source 1..23: mol_type = other RNA
ttatagagcaagaacactgtttt

SEQ ID NO: 601 - RNA, 23 nt, synthetic construct
  misc_feature 1..23: note = Synthetic: WV-40838
  misc_feature 1..23: note = Synthetic: SSR-0103152
  modified_base 1: mod_base = um
  modified_base 1..2: mod_base = OTHER; note = R-phosphorothioate
  modified_base 2: mod_base = OTHER; note = 2-fluororibose uracil
  modified_base 2..3: mod_base = OTHER; note = S-phosphorothioate
  modified_base 3: mod_base = OTHER; note = 2-O-methylribose adenine
  modified_base 3..4: mod_base = OTHER; note S-N-(1,3-dimethylimidazolidin-2-ylidene)phosphoramidate
  modified_base 4: mod_base = OTHER; note = 2-fluororibose uracil
  modified_base 5: mod_base = OTHER; note = 2-O-methylribose adenine
  modified_base 6: mod_base = OTHER; note = 2-fluororibose guanine
  modified_base 7: mod_base = OTHER; note = 2-O-methylribose adenine
  modified_base 7..8: mod_base = OTHER; note S-N-(1,3-dimethylimidazolidin-2-ylidene)phosphoramidate
  modified_base 8: mod_base = OTHER; note = 2-fluororibose guanine
  modified_base 9: mod_base = cm
  modified_base 10: mod_base = OTHER; note = 2-fluororibose adenine
  modified_base 10..11: mod_base = OTHER; note S-N-(1,3-dimethylimidazolidin-2-ylidene)phosphoramidate
  modified_base 11: mod_base = OTHER; note = 2-O-methylribose adenine
  modified_base 12: mod_base = gm
  modified_base 13: mod_base = OTHER; note = 2-O-methylribose adenine
  modified_base 14: mod_base = OTHER; note = 2-fluororibose adenine
  modified_base 15: mod_base = cm
  modified_base 16: mod_base = OTHER; note = 2-fluororibose adenine
  modified_base 17: mod_base = cm
  modified_base 18: mod_base = OTHER; note = 2-fluororibose uracil
  modified_base 19: mod_base = gm
  modified_base 19..20: mod_base = OTHER; note S-N-(1,3-dimethylimidazolidin-2-ylidene)phosphoramidate
  modified_base 20: mod_base = OTHER; note = 2-fluororibose uracil
  modified_base 21: mod_base = um
  modified_base 21..22: mod_base = OTHER; note = S-phosphorothioate
  modified_base 22: mod_base = um
  modified_base 22..23: mod_base = OTHER; note = S-phosphorothioate
  modified_base 23: mod_base = um
  source 1..23: mol_type = other RNA
ttatagagcaagaacactgtttt

SEQ ID NO: 602 - RNA, 23 nt, synthetic construct
  misc_feature 1..23: note = Synthetic: WV-40839
  misc_feature 1..23: note = Synthetic: SSR-0103165
  modified_base 1: mod_base = um
  modified_base 1..2: mod_base = OTHER; note = R-phosphorothioate
  modified_base 2: mod_base = OTHER; note = 2-fluororibose uracil
  modified_base 2..3: mod_base = OTHER; note = S-phosphorothioate
  modified_base 3: mod_base = OTHER; note = 2-O-methylribose adenine
  modified_base 3..4: mod_base = OTHER; note S-N-(1,3-dimethylimidazolidin-2-ylidene)phosphoramidate
  modified_base 4: mod_base = OTHER; note = 2-fluororibose uracil
  modified_base 5: mod_base = OTHER; note = 2-O-methylribose adenine
  modified_base 6: mod_base = OTHER; note = 2-fluororibose guanine
  modified_base 7: mod_base = OTHER; note = 2-O-methylribose adenine
  modified_base 8: mod_base = OTHER; note = 2-fluororibose guanine
  modified_base 8..9: mod_base = OTHER; note S-N-(1,3-dimethylimidazolidin-2-ylidene)phosphoramidate
  modified_base 9: mod_base = cm
  modified_base 10: mod_base = OTHER; note = 2-fluororibose adenine
  modified_base 10..11: mod_base = OTHER; note S-N-(1,3-dimethylimidazolidin-2-ylidene)phosphoramidate
  modified_base 11: mod_base = OTHER; note = 2-O-methylribose adenine
  modified_base 12: mod_base = gm
  modified_base 13: mod_base = OTHER; note = 2-O-methylribose adenine
  modified_base 14: mod_base = OTHER; note = 2-fluororibose adenine
  modified_base 15: mod_base = cm
  modified_base 16: mod_base = OTHER; note = 2-fluororibose adenine
  modified_base 17: mod_base = cm
  modified_base 18: mod_base = OTHER; note = 2-fluororibose uracil
  modified_base 19: mod_base = gm
  modified_base 19..20: mod_base = OTHER; note S-N-(1,3-dimethylimidazolidin-2-ylidene)phosphoramidate
  modified_base 20: mod_base = OTHER; note = 2-fluororibose uracil
  modified_base 21: mod_base = um
  modified_base 21..22: mod_base = OTHER; note = S-phosphorothioate
  modified_base 22: mod_base = um
  modified_base 22..23: mod_base = OTHER; note = S-phosphorothioate
  modified_base 23: mod_base = um
  source 1..23: mol_type = other RNA
ttatagagcaagaacactgtttt

SEQ ID NO: 603 - RNA, 23 nt, synthetic construct
  misc_feature 1..23: note = Synthetic: WV-40842
  misc_feature 1..23: note = Synthetic: SSR-0103149
  modified_base 1: mod_base = um
  modified_base 1..2: mod_base = OTHER; note = R-phosphorothioate
  modified_base 2: mod_base = OTHER; note = 2-fluororibose uracil
  modified_base 2..3: mod_base = OTHER; note = S-phosphorothioate
  modified_base 3: mod_base = OTHER; note = 2-O-methylribose adenine
  modified_base 3..4: mod_base = OTHER; note S-N-(1,3-dimethylimidazolidin-2-ylidene)phosphoramidate
  modified_base 4: mod_base = OTHER; note = 2-fluororibose uracil
  modified_base 5: mod_base = OTHER; note = 2-O-methylribose adenine
  modified_base 6: mod_base = OTHER; note = 2-fluororibose guanine
  modified_base 7: mod_base = OTHER; note = 2-O-methylribose adenine
  modified_base 7..8: mod_base = OTHER; note S-N-(1,3-dimethylimidazolidin-2-ylidene)phosphoramidate
  modified_base 8: mod_base = OTHER; note = 2-fluororibose guanine
  modified_base 9: mod_base = cm
  modified_base 10: mod_base = OTHER; note = 2-fluororibose adenine
  modified_base 10..11: mod_base = OTHER; note S-N-(1,3-dimethylimidazolidin-2-ylidene)phosphoramidate
  modified_base 11: mod_base = OTHER; note = 2-O-methylribose adenine
  modified_base 12: mod_base = gm
  modified_base 13: mod_base = OTHER; note = 2-O-methylribose adenine
  modified_base 14: mod_base = OTHER; note = 2-fluororibose adenine
  modified_base 15: mod_base = cm
  modified_base 16: mod_base = OTHER; note = 2-fluororibose adenine
  modified_base 16..17: mod_base = OTHER; note S-N-(1,3-dimethylimidazolidin-2-ylidene)phosphoramidate
  modified_base 17: mod_base = cm
  modified_base 18: mod_base = OTHER; note = 2-fluororibose uracil
  modified_base 19: mod_base = gm
  modified_base 19..20: mod_base = OTHER; note S-N-(1,3-dimethylimidazolidin-2-ylidene)phosphoramidate
  modified_base 20: mod_base = OTHER; note = 2-fluororibose uracil
  modified_base 21: mod_base = um
  modified_base 21..22: mod_base = OTHER; note = S-phosphorothioate
  modified_base 22: mod_base = um
  modified_base 22..23: mod_base = OTHER; note = S-phosphorothioate
  modified_base 23: mod_base = um
  source 1..23: mol_type = other RNA
ttatagagcaagaacactgtttt

SEQ ID NO: 604 - RNA, 23 nt, synthetic construct
  misc_feature 1..23: note = Synthetic: WV-40843
  misc_feature 1..23: note = Synthetic: SSR-0103162
  modified_base 1: mod_base = um
  modified_base 1..2: mod_base = OTHER; note = R-phosphorothioate
  modified_base 2: mod_base = OTHER; note = 2-fluororibose uracil
  modified_base 2..3: mod_base = OTHER; note = S-phosphorothioate
  modified_base 3: mod_base = OTHER; note = 2-O-methylribose adenine
  modified_base 3..4: mod_base = OTHER; note S-N-(1,3-dimethylimidazolidin-2-ylidene)phosphoramidate
  modified_base 4: mod_base = OTHER; note = 2-fluororibose uracil
  modified_base 5: mod_base = OTHER; note = 2-O-methylribose adenine
  modified_base 6: mod_base = OTHER; note = 2-fluororibose guanine
  modified_base 7: mod_base = OTHER; note = 2-O-methylribose adenine
  modified_base 8: mod_base = OTHER; note = 2-fluororibose guanine
  modified_base 8..9: mod_base = OTHER; note S-N-(1,3-dimethylimidazolidin-2-ylidene)phosphoramidate
  modified_base 9: mod_base = cm
  modified_base 10: mod_base = OTHER; note = 2-fluororibose adenine
  modified_base 10..11: mod_base = OTHER; note S-N-(1,3-dimethylimidazolidin-2-ylidene)phosphoramidate
  modified_base 11: mod_base = OTHER; note = 2-O-methylribose adenine
  modified_base 12: mod_base = gm
  modified_base 13: mod_base = OTHER; note = 2-O-methylribose adenine
  modified_base 14: mod_base = OTHER; note = 2-fluororibose adenine
  modified_base 15: mod_base = cm
  modified_base 16: mod_base = OTHER; note = 2-fluororibose adenine
  modified_base 16..17: mod_base = OTHER; note S-N-(1,3-dimethylimidazolidin-2-ylidene)phosphoramidate
  modified_base 17: mod_base = cm
  modified_base 18: mod_base = OTHER; note = 2-fluororibose uracil
  modified_base 19: mod_base = gm
  modified_base 19..20: mod_base = OTHER; note S-N-(1,3-dimethylimidazolidin-2-ylidene)phosphoramidate
  modified_base 20: mod_base = OTHER; note = 2-fluororibose uracil
  modified_base 21: mod_base = um
  modified_base 21..22: mod_base = OTHER; note = S-phosphorothioate
  modified_base 22: mod_base = um
  modified_base 22..23: mod_base = OTHER; note = S-phosphorothioate
  modified_base 23: mod_base = um
  source 1..23: mol_type = other RNA
ttatagagcaagaacactgtttt

SEQ ID NO: 605 - RNA, 23 nt, synthetic construct
  misc_feature 1..23: note = Synthetic: WV-41896
  misc_feature 1..23: note = Synthetic: SSR-0104267
  modified_base 1: mod_base = um
  modified_base 1..2: mod_base = OTHER; note = R-phosphorothioate
  modified_base 2: mod_base = OTHER; note = 2-fluororibose uracil
  modified_base 2..3: mod_base = OTHER; note = S-phosphorothioate
  modified_base 3: mod_base = OTHER; note = 2-O-methylribose adenine
  modified_base 3..4: mod_base = OTHER; note R-N-(1,3-dimethylimidazolidin-2-ylidene)phosphoramidate
  modified_base 4: mod_base = OTHER; note = 2-fluororibose uracil
  modified_base 5: mod_base = OTHER; note = 2-O-methylribose adenine
  modified_base 6: mod_base = OTHER; note = 2-fluororibose guanine
  modified_base 7: mod_base = OTHER; note = 2-O-methylribose adenine
  modified_base 8: mod_base = OTHER; note = 2-fluororibose guanine
  modified_base 9: mod_base = cm
  modified_base 10: mod_base = OTHER; note = 2-fluororibose adenine
  modified_base 11: mod_base = OTHER; note = 2-O-methylribose adenine
  modified_base 12: mod_base = gm
  modified_base 13: mod_base = OTHER; note = 2-O-methylribose adenine
  modified_base 14: mod_base = OTHER; note = 2-fluororibose adenine
  modified_base 15: mod_base = cm
  modified_base 16: mod_base = OTHER; note = 2-fluororibose adenine
  modified_base 17: mod_base = cm
  modified_base 18: mod_base = OTHER; note = 2-fluororibose uracil
  modified_base 19: mod_base = gm
  modified_base 20: mod_base = OTHER; note = 2-fluororibose uracil
  modified_base 21: mod_base = um
  modified_base 21..22: mod_base = OTHER; note = S-phosphorothioate
  modified_base 22: mod_base = um
  modified_base 22..23: mod_base = OTHER; note = S-phosphorothioate
  modified_base 23: mod_base = um
  source 1..23: mol_type = other RNA
ttatagagcaagaacactgtttt

SEQ ID NO: 606 - RNA, 23 nt, synthetic construct
  misc_feature 1..23: note = Synthetic: WV-41898
  misc_feature 1..23: note = Synthetic: SSR-0104301
  modified_base 1: mod_base = um
  modified_base 1..2: mod_base = OTHER; note = R-phosphorothioate
  modified_base 2: mod_base = OTHER; note = 2-fluororibose uracil
  modified_base 2..3: mod_base = OTHER; note = S-phosphorothioate
  modified_base 3: mod_base = OTHER; note = 2-O-methylribose adenine
  modified_base 4: mod_base = OTHER; note = 2-fluororibose uracil
  modified_base 5: mod_base = OTHER; note = 2-O-methylribose adenine
  modified_base 5..6: mod_base = OTHER; note R-N-(1,3-dimethylimidazolidin-2-ylidene)phosphoramidate
  modified_base 6: mod_base = OTHER; note = 2-fluororibose guanine
  modified_base 7: mod_base = OTHER; note = 2-O-methylribose adenine
  modified_base 8: mod_base = OTHER; note = 2-fluororibose guanine
  modified_base 9: mod_base = cm
  modified_base 10: mod_base = OTHER; note = 2-fluororibose adenine
  modified_base 11: mod_base = OTHER; note = 2-O-methylribose adenine
  modified_base 12: mod_base = gm
  modified_base 13: mod_base = OTHER; note = 2-O-methylribose adenine
  modified_base 14: mod_base = OTHER; note = 2-fluororibose adenine
  modified_base 15: mod_base = cm
  modified_base 16: mod_base = OTHER; note = 2-fluororibose adenine
  modified_base 17: mod_base = cm
  modified_base 18: mod_base = OTHER; note = 2-fluororibose uracil
  modified_base 19: mod_base = gm
  modified_base 20: mod_base = OTHER; note = 2-fluororibose uracil
  modified_base 21: mod_base = um
  modified_base 21..22: mod_base = OTHER; note = S-phosphorothioate
  modified_base 22: mod_base = um
  modified_base 22..23: mod_base = OTHER; note = S-phosphorothioate
  modified_base 23: mod_base = um
  source 1..23: mol_type = other RNA
ttatagagcaagaacactgtttt

SEQ ID NO: 607 - RNA, 23 nt, synthetic construct
  misc_feature 1..23: note = Synthetic: WV-41903
  misc_feature 1..23: note = Synthetic: SSR-0104313
  modified_base 1: mod_base = um
  modified_base 1..2: mod_base = OTHER; note = R-phosphorothioate
  modified_base 2: mod_base = OTHER; note = 2-fluororibose uracil
  modified_base 2..3: mod_base = OTHER; note = S-phosphorothioate
  modified_base 3: mod_base = OTHER; note = 2-O-methylribose adenine
  modified_base 4: mod_base = OTHER; note = 2-fluororibose uracil
  modified_base 5: mod_base = OTHER; note = 2-O-methylribose adenine
  modified_base 6: mod_base = OTHER; note = 2-fluororibose guanine
  modified_base 7: mod_base = OTHER; note = 2-O-methylribose adenine
  modified_base 8: mod_base = OTHER; note = 2-fluororibose guanine
  modified_base 9: mod_base = cm
  modified_base 10: mod_base = OTHER; note = 2-fluororibose adenine
  modified_base 10..11: mod_base = OTHER; note R-N-(1,3-dimethylimidazolidin-2-ylidene)phosphoramidate
  modified_base 11: mod_base = OTHER; note = 2-O-methylribose adenine
  modified_base 12: mod_base = gm
  modified_base 13: mod_base = OTHER; note = 2-O-methylribose adenine
  modified_base 14: mod_base = OTHER; note = 2-fluororibose adenine
  modified_base 15: mod_base = cm
  modified_base 16: mod_base = OTHER; note = 2-fluororibose adenine
  modified_base 17: mod_base = cm
  modified_base 18: mod_base = OTHER; note = 2-fluororibose uracil
  modified_base 19: mod_base = gm
  modified_base 20: mod_base = OTHER; note = 2-fluororibose uracil
  modified_base 21: mod_base = um
  modified_base 21..22: mod_base = OTHER; note = S-phosphorothioate
  modified_base 22: mod_base = um
  modified_base 22..23: mod_base = OTHER; note = S-phosphorothioate
  modified_base 23: mod_base = um
  source 1..23: mol_type = other RNA
ttatagagcaagaacactgtttt

SEQ ID NO: 608 - RNA, 23 nt, synthetic construct
  misc_feature 1..23: note = Synthetic: WV-41912
  misc_feature 1..23: note = Synthetic: SSR-0104331
  modified_base 1: mod_base = um
  modified_base 1..2: mod_base = OTHER; note = R-phosphorothioate
  modified_base 2: mod_base = OTHER; note = 2-fluororibose uracil
  modified_base 2..3: mod_base = OTHER; note = S-phosphorothioate
  modified_base 3: mod_base = OTHER; note = 2-O-methylribose adenine
  modified_base 4: mod_base = OTHER; note = 2-fluororibose uracil
  modified_base 5: mod_base = OTHER; note = 2-O-methylribose adenine
  modified_base 6: mod_base = OTHER; note = 2-fluororibose guanine
  modified_base 7: mod_base = OTHER; note = 2-O-methylribose adenine
  modified_base 8: mod_base = OTHER; note = 2-fluororibose guanine
  modified_base 9: mod_base = cm
  modified_base 10: mod_base = OTHER; note = 2-fluororibose adenine
  modified_base 11: mod_base = OTHER; note = 2-O-methylribose adenine
  modified_base 12: mod_base = gm
  modified_base 13: mod_base = OTHER; note = 2-O-methylribose adenine
  modified_base 14: mod_base = OTHER; note = 2-fluororibose adenine
  modified_base 15: mod_base = cm
  modified_base 16: mod_base = OTHER; note = 2-fluororibose adenine
  modified_base 17: mod_base = cm
  modified_base 18: mod_base = OTHER; note = 2-fluororibose uracil
  modified_base 19: mod_base = gm
  modified_base 19..20: mod_base = OTHER; note R-N-(1,3-dimethylimidazolidin-2-ylidene)phosphoramidate
  modified_base 20: mod_base = OTHER; note = 2-fluororibose uracil
  modified_base 21: mod_base = um
  modified_base 21..22: mod_base = OTHER; note = S-phosphorothioate
  modified_base 22: mod_base = um
  modified_base 22..23: mod_base = OTHER; note = S-phosphorothioate
  modified_base 23: mod_base = um
  source 1..23: mol_type = other RNA
ttatagagcaagaacactgtttt

SEQ ID NO: 609 - RNA, 23 nt, synthetic construct
  misc_feature 1..23: note = Synthetic: WV-41918
  misc_feature 1..23: note = Synthetic: SSR-0104275
  modified_base 1: mod_base = um
  modified_base 1..2: mod_base = OTHER; note = R-phosphorothioate
  modified_base 2: mod_base = OTHER; note = 2-fluororibose uracil
  modified_base 2..3: mod_base = OTHER; note = S-phosphorothioate
  modified_base 3: mod_base = OTHER; note = 2-O-methylribose adenine
  modified_base 3..4: mod_base = OTHER; note S-N-(1,3-dimethylimidazolidin-2-ylidene)phosphoramidate
  modified_base 4: mod_base = OTHER; note = 2-fluororibose uracil
  modified_base 5: mod_base = OTHER; note = 2-O-methylribose adenine
  modified_base 6: mod_base = OTHER; note = 2-fluororibose guanine
  modified_base 7: mod_base = OTHER; note = 2-O-methylribose adenine
  modified_base 8: mod_base = OTHER; note = 2-fluororibose guanine
  modified_base 9: mod_base = cm
  modified_base 10: mod_base = OTHER; note = 2-fluororibose adenine
  modified_base 11: mod_base = OTHER; note = 2-O-methylribose adenine
  modified_base 12: mod_base = gm
  modified_base 13: mod_base = OTHER; note = 2-O-methylribose adenine
  modified_base 14: mod_base = OTHER; note = 2-fluororibose adenine
  modified_base 15: mod_base = cm
  modified_base 16: mod_base = OTHER; note = 2-fluororibose adenine
  modified_base 17: mod_base = cm
  modified_base 18: mod_base = OTHER; note = 2-fluororibose uracil
  modified_base 19: mod_base = gm
  modified_base 20: mod_base = OTHER; note = 2-fluororibose uracil
  modified_base 21: mod_base = um
  modified_base 21..22: mod_base = OTHER; note = S-phosphorothioate
  modified_base 22: mod_base = um
  modified_base 22..23: mod_base = OTHER; note = S-phosphorothioate
  modified_base 23: mod_base = um
  source 1..23: mol_type = other RNA
ttatagagcaagaacactgtttt

SEQ ID NO: 610 - RNA, 23 nt, synthetic construct
  misc_feature 1..23: note = Synthetic: WV-41920
  misc_feature 1..23: note = Synthetic: SSR-0104302
  modified_base 1: mod_base = um
  modified_base 1..2: mod_base = OTHER; note = R-phosphorothioate
  modified_base 2: mod_base = OTHER; note = 2-fluororibose uracil
  modified_base 2..3: mod_base = OTHER; note = S-phosphorothioate
  modified_base 3: mod_base = OTHER; note = 2-O-methylribose adenine
  modified_base 4: mod_base = OTHER; note = 2-fluororibose uracil
  modified_base 5: mod_base = OTHER; note = 2-O-methylribose adenine
  modified_base 5..6: mod_base = OTHER; note S-N-(1,3-dimethylimidazolidin-2-ylidene)phosphoramidate
  modified_base 6: mod_base = OTHER; note = 2-fluororibose guanine
  modified_base 7: mod_base = OTHER; note = 2-O-methylribose adenine
  modified_base 8: mod_base = OTHER; note = 2-fluororibose guanine
  modified_base 9: mod_base = cm
  modified_base 10: mod_base = OTHER; note = 2-fluororibose adenine
  modified_base 11: mod_base = OTHER; note = 2-O-methylribose adenine
  modified_base 12: mod_base = gm
  modified_base 13: mod_base = OTHER; note = 2-O-methylribose adenine
  modified_base 14: mod_base = OTHER; note = 2-fluororibose adenine
  modified_base 15: mod_base = cm
  modified_base 16: mod_base = OTHER; note = 2-fluororibose adenine
  modified_base 17: mod_base = cm
  modified_base 18: mod_base = OTHER; note = 2-fluororibose uracil
  modified_base 19: mod_base = gm
  modified_base 20: mod_base = OTHER; note = 2-fluororibose uracil
  modified_base 21: mod_base = um
  modified_base 21..22: mod_base = OTHER; note = S-phosphorothioate
  modified_base 22: mod_base = um
  modified_base 22..23: mod_base = OTHER; note = S-phosphorothioate
  modified_base 23: mod_base = um
  source 1..23: mol_type = other RNA
ttatagagcaagaacactgtttt

SEQ ID NO: 611 - RNA, 23 nt, synthetic construct
  misc_feature 1..23: note = Synthetic: WV-41925
  misc_feature 1..23: note = Synthetic: SSR-0104314
  modified_base 1: mod_base = um
  modified_base 1..2: mod_base = OTHER; note = R-phosphorothioate
  modified_base 2: mod_base = OTHER; note = 2-fluororibose uracil
  modified_base 2..3: mod_base = OTHER; note = S-phosphorothioate
  modified_base 3: mod_base = OTHER; note = 2-O-methylribose adenine
  modified_base 4: mod_base = OTHER; note = 2-fluororibose uracil
  modified_base 5: mod_base = OTHER; note = 2-O-methylribose adenine
  modified_base 6: mod_base = OTHER; note = 2-fluororibose guanine
  modified_base 7: mod_base = OTHER; note = 2-O-methylribose adenine
  modified_base 8: mod_base = OTHER; note = 2-fluororibose guanine
  modified_base 9: mod_base = cm
  modified_base 10: mod_base = OTHER; note = 2-fluororibose adenine
  modified_base 10..11: mod_base = OTHER; note S-N-(1,3-dimethylimidazolidin-2-ylidene)phosphoramidate
  modified_base 11: mod_base = OTHER; note = 2-O-methylribose adenine
  modified_base 12: mod_base = gm
  modified_base 13: mod_base = OTHER; note = 2-O-methylribose adenine
  modified_base 14: mod_base = OTHER; note = 2-fluororibose adenine
  modified_base 15: mod_base = cm
  modified_base 16: mod_base = OTHER; note = 2-fluororibose adenine
  modified_base 17: mod_base = cm
  modified_base 18: mod_base = OTHER; note = 2-fluororibose uracil
  modified_base 19: mod_base = gm
  modified_base 20: mod_base = OTHER; note = 2-fluororibose uracil
  modified_base 21: mod_base = um
  modified_base 21..22: mod_base = OTHER; note = S-phosphorothioate
  modified_base 22: mod_base = um
  modified_base 22..23: mod_base = OTHER; note = S-phosphorothioate
  modified_base 23: mod_base = um
  source 1..23: mol_type = other RNA
ttatagagcaagaacactgtttt

SEQ ID NO: 612 - RNA, 23 nt, synthetic construct
  misc_feature 1..23: note = Synthetic: WV-41934
  misc_feature 1..23: note = Synthetic: SSR-0104332
  modified_base 1: mod_base = um
  modified_base 1..2: mod_base = OTHER; note = R-phosphorothioate
  modified_base 2: mod_base = OTHER; note = 2-fluororibose uracil
  modified_base 2..3: mod_base = OTHER; note = S-phosphorothioate
  modified_base 3: mod_base = OTHER; note = 2-O-methylribose adenine
  modified_base 4: mod_base = OTHER; note = 2-fluororibose uracil
  modified_base 5: mod_base = OTHER; note = 2-O-methylribose adenine
  modified_base 6: mod_base = OTHER; note = 2-fluororibose guanine
  modified_base 7: mod_base = OTHER; note = 2-O-methylribose adenine
  modified_base 8: mod_base = OTHER; note = 2-fluororibose guanine
  modified_base 9: mod_base = cm
  modified_base 10: mod_base = OTHER; note = 2-fluororibose adenine
  modified_base 11: mod_base = OTHER; note = 2-O-methylribose adenine
  modified_base 12: mod_base = gm
  modified_base 13: mod_base = OTHER; note = 2-O-methylribose adenine
  modified_base 14: mod_base = OTHER; note = 2-fluororibose adenine
  modified_base 15: mod_base = cm
  modified_base 16: mod_base = OTHER; note = 2-fluororibose adenine
  modified_base 17: mod_base = cm
  modified_base 18: mod_base = OTHER; note = 2-fluororibose uracil
  modified_base 19: mod_base = gm
  modified_base 19..20: mod_base = OTHER; note S-N-(1,3-dimethylimidazolidin-2-ylidene)phosphoramidate
  modified_base 20: mod_base = OTHER; note = 2-fluororibose uracil
  modified_base 21: mod_base = um
  modified_base 21..22: mod_base = OTHER; note = S-phosphorothioate
  modified_base 22: mod_base = um
  modified_base 22..23: mod_base = OTHER; note = S-phosphorothioate
  modified_base 23: mod_base = um
  source 1..23: mol_type = other RNA
ttatagagcaagaacactgtttt

SEQ ID NO: 613 - RNA, 23 nt, synthetic construct
  misc_feature 1..23: note = Synthetic: WV-41940
  misc_feature 1..23: note = Synthetic: SSR-0104450
  modified_base 1: mod_base = um
  modified_base 1..2: mod_base = OTHER; note = S-phosphorothioate
  modified_base 2: mod_base = OTHER; note = 2-fluororibose uracil
  modified_base 2..3: mod_base = OTHER; note = R-phosphorothioate
  modified_base 3: mod_base = OTHER; note = 2-O-methylribose adenine
  modified_base 3..4: mod_base = OTHER; note R-N-(1,3-dimethylimidazolidin-2-ylidene)phosphoramidate
  modified_base 4: mod_base = OTHER; note = 2-fluororibose uracil
  modified_base 5: mod_base = OTHER; note = 2-O-methylribose adenine
  modified_base 6: mod_base = OTHER; note = 2-fluororibose guanine
  modified_base 7: mod_base = OTHER; note = 2-O-methylribose adenine
  modified_base 8: mod_base = OTHER; note = 2-fluororibose guanine
  modified_base 9: mod_base = cm
  modified_base 10: mod_base = OTHER; note = 2-fluororibose adenine
  modified_base 11: mod_base = OTHER; note = 2-O-methylribose adenine
  modified_base 12: mod_base = gm
  modified_base 13: mod_base = OTHER; note = 2-O-methylribose adenine
  modified_base 14: mod_base = OTHER; note = 2-fluororibose adenine
  modified_base 15: mod_base = cm
  modified_base 16: mod_base = OTHER; note = 2-fluororibose adenine
  modified_base 17: mod_base = cm
  modified_base 18: mod_base = OTHER; note = 2-fluororibose uracil
  modified_base 19: mod_base = gm
  modified_base 20: mod_base = OTHER; note = 2-fluororibose uracil
  modified_base 21: mod_base = um
  modified_base 21..22: mod_base = OTHER; note = S-phosphorothioate
  modified_base 22: mod_base = um
  modified_base 22..23: mod_base = OTHER; note = S-phosphorothioate
  modified_base 23: mod_base = um
  source 1..23: mol_type = other RNA
ttatagagcaagaacactgtttt

SEQ ID NO: 614 - RNA, 23 nt, synthetic construct
  misc_feature 1..23: note = Synthetic: WV-41942
  misc_feature 1..23: note = Synthetic: SSR-0104517
  modified_base 1: mod_base = um
  modified_base 1..2: mod_base = OTHER; note = S-phosphorothioate
  modified_base 2: mod_base = OTHER; note = 2-fluororibose uracil
  modified_base 2..3: mod_base = OTHER; note = R-phosphorothioate
  modified_base 3: mod_base = OTHER; note = 2-O-methylribose adenine
  modified_base 4: mod_base = OTHER; note = 2-fluororibose uracil
  modified_base 5: mod_base = OTHER; note = 2-O-methylribose adenine
  modified_base 5..6: mod_base = OTHER; note R-N-(1,3-dimethylimidazolidin-2-ylidene)phosphoramidate
  modified_base 6: mod_base = OTHER; note = 2-fluororibose guanine
  modified_base 7: mod_base = OTHER; note = 2-O-methylribose adenine
  modified_base 8: mod_base = OTHER; note = 2-fluororibose guanine
  modified_base 9: mod_base = cm
  modified_base 10: mod_base = OTHER; note = 2-fluororibose adenine
  modified_base 11: mod_base = OTHER; note = 2-O-methylribose adenine
  modified_base 12: mod_base = gm
  modified_base 13: mod_base = OTHER; note = 2-O-methylribose adenine
  modified_base 14: mod_base = OTHER; note = 2-fluororibose adenine
  modified_base 15: mod_base = cm
  modified_base 16: mod_base = OTHER; note = 2-fluororibose adenine
  modified_base 17: mod_base = cm
  modified_base 18: mod_base = OTHER; note = 2-fluororibose uracil
  modified_base 19: mod_base = gm
  modified_base 20: mod_base = OTHER; note = 2-fluororibose uracil
  modified_base 21: mod_base = um
  modified_base 21..22: mod_base = OTHER; note = S-phosphorothioate
  modified_base 22: mod_base = um
  modified_base 22..23: mod_base = OTHER; note = S-phosphorothioate
  modified_base 23: mod_base = um
  source 1..23: mol_type = other RNA
ttatagagcaagaacactgtttt

SEQ ID NO: 615 - RNA, 23 nt, synthetic construct
  misc_feature 1..23: note = Synthetic: WV-41947
  misc_feature 1..23: note = Synthetic: SSR-0104528
  modified_base 1: mod_base = um
  modified_base 1..2: mod_base = OTHER; note = S-phosphorothioate
  modified_base 2: mod_base = OTHER; note = 2-fluororibose uracil
  modified_base 2..3: mod_base = OTHER; note = R-phosphorothioate
  modified_base 3: mod_base = OTHER; note = 2-O-methylribose adenine
  modified_base 4: mod_base = OTHER; note = 2-fluororibose uracil
  modified_base 5: mod_base = OTHER; note = 2-O-methylribose adenine
  modified_base 6: mod_base = OTHER; note = 2-fluororibose guanine
  modified_base 7: mod_base = OTHER; note = 2-O-methylribose adenine
  modified_base 8: mod_base = OTHER; note = 2-fluororibose guanine
  modified_base 9: mod_base = cm
  modified_base 10: mod_base = OTHER; note = 2-fluororibose adenine
  modified_base 10..11: mod_base = OTHER; note R-N-(1,3-dimethylimidazolidin-2-ylidene)phosphoramidate
  modified_base 11: mod_base = OTHER; note = 2-O-methylribose adenine
  modified_base 12: mod_base = gm
  modified_base 13: mod_base = OTHER; note = 2-O-methylribose adenine
  modified_base 14: mod_base = OTHER; note = 2-fluororibose adenine
  modified_base 15: mod_base = cm
  modified_base 16: mod_base = OTHER; note = 2-fluororibose adenine
  modified_base 17: mod_base = cm
  modified_base 18: mod_base = OTHER; note = 2-fluororibose uracil
  modified_base 19: mod_base = gm
  modified_base 20: mod_base = OTHER; note = 2-fluororibose uracil
  modified_base 21: mod_base = um
  modified_base 21..22: mod_base = OTHER; note = S-phosphorothioate
  modified_base 22: mod_base = um
  modified_base 22..23: mod_base = OTHER; note = S-phosphorothioate
  modified_base 23: mod_base = um
  source 1..23: mol_type = other RNA
ttatagagcaagaacactgtttt

SEQ ID NO: 616 - RNA, 23 nt, synthetic construct
  misc_feature 1..23: note = Synthetic: WV-41956
  misc_feature 1..23: note = Synthetic: SSR-0104546
  modified_base 1: mod_base = um
  modified_base 1..2: mod_base = OTHER; note = S-phosphorothioate
  modified_base 2: mod_base = OTHER; note = 2-fluororibose uracil
  modified_base 2..3: mod_base = OTHER; note = R-phosphorothioate
  modified_base 3: mod_base = OTHER; note = 2-O-methylribose adenine
  modified_base 4: mod_base = OTHER; note = 2-fluororibose uracil
  modified_base 5: mod_base = OTHER; note = 2-O-methylribose adenine
  modified_base 6: mod_base = OTHER; note = 2-fluororibose guanine
  modified_base 7: mod_base = OTHER; note = 2-O-methylribose adenine
  modified_base 8: mod_base = OTHER; note = 2-fluororibose guanine
  modified_base 9: mod_base = cm
  modified_base 10: mod_base = OTHER; note = 2-fluororibose adenine
  modified_base 11: mod_base = OTHER; note = 2-O-methylribose adenine
  modified_base 12: mod_base = gm
  modified_base 13: mod_base = OTHER; note = 2-O-methylribose adenine
  modified_base 14: mod_base = OTHER; note = 2-fluororibose adenine
  modified_base 15: mod_base = cm
  modified_base 16: mod_base = OTHER; note = 2-fluororibose adenine
  modified_base 17: mod_base = cm
  modified_base 18: mod_base = OTHER; note = 2-fluororibose uracil
  modified_base 19: mod_base = gm
  modified_base 19..20: mod_base = OTHER; note R-N-(1,3-dimethylimidazolidin-2-ylidene)phosphoramidate
  modified_base 20: mod_base = OTHER; note = 2-fluororibose uracil
  modified_base 21: mod_base = um
  modified_base 21..22: mod_base = OTHER; note = S-phosphorothioate
  modified_base 22: mod_base = um
  modified_base 22..23: mod_base = OTHER; note = S-phosphorothioate
  modified_base 23: mod_base = um
  source 1..23: mol_type = other RNA
ttatagagcaagaacactgtttt

SEQ ID NO: 617 - RNA, 23 nt, synthetic construct
  misc_feature 1..23: note = Synthetic: WV-41962
  misc_feature 1..23: note = Synthetic: SSR-0104469
  modified_base 1: mod_base = um
  modified_base 1..2: mod_base = OTHER; note = S-phosphorothioate
  modified_base 2: mod_base = OTHER; note = 2-fluororibose uracil
  modified_base 2..3: mod_base = OTHER; note = R-phosphorothioate
  modified_base 3: mod_base = OTHER; note = 2-O-methylribose adenine
  modified_base 3..4: mod_base = OTHER; note S-N-(1,3-dimethylimidazolidin-2-ylidene)phosphoramidate
  modified_base 4: mod_base = OTHER; note = 2-fluororibose uracil
  modified_base 5: mod_base = OTHER; note = 2-O-methylribose adenine
  modified_base 6: mod_base = OTHER; note = 2-fluororibose guanine
  modified_base 7: mod_base = OTHER; note = 2-O-methylribose adenine
  modified_base 8: mod_base = OTHER; note = 2-fluororibose guanine
  modified_base 9: mod_base = cm
  modified_base 10: mod_base = OTHER; note = 2-fluororibose adenine
  modified_base 11: mod_base = OTHER; note = 2-O-methylribose adenine
  modified_base 12: mod_base = gm
  modified_base 13: mod_base = OTHER; note = 2-O-methylribose adenine
  modified_base 14: mod_base = OTHER; note = 2-fluororibose adenine
  modified_base 15: mod_base = cm
  modified_base 16: mod_base = OTHER; note = 2-fluororibose adenine
  modified_base 17: mod_base = cm
  modified_base 18: mod_base = OTHER; note = 2-fluororibose uracil
  modified_base 19: mod_base = gm
  modified_base 20: mod_base = OTHER; note = 2-fluororibose uracil
  modified_base 21: mod_base = um
  modified_base 21..22: mod_base = OTHER; note = S-phosphorothioate
  modified_base 22: mod_base = um
  modified_base 22..23: mod_base = OTHER; note = S-phosphorothioate
  modified_base 23: mod_base = um
  source 1..23: mol_type = other RNA
ttatagagcaagaacactgtttt

SEQ ID NO: 618 - RNA, 23 nt, synthetic construct
  misc_feature 1..23: note = Synthetic: WV-41964
  misc_feature 1..23: note = Synthetic: SSR-0104518
  modified_base 1: mod_base = um
  modified_base 1..2: mod_base = OTHER; note = S-phosphorothioate
  modified_base 2: mod_base = OTHER; note = 2-fluororibose uracil
  modified_base 2..3: mod_base = OTHER; note = R-phosphorothioate
  modified_base 3: mod_base = OTHER; note = 2-O-methylribose adenine
  modified_base 4: mod_base = OTHER; note = 2-fluororibose uracil
  modified_base 5: mod_base = OTHER; note = 2-O-methylribose adenine
  modified_base 5..6: mod_base = OTHER; note S-N-(1,3-dimethylimidazolidin-2-ylidene)phosphoramidate
  modified_base 6: mod_base = OTHER; note = 2-fluororibose guanine
  modified_base 7: mod_base = OTHER; note = 2-O-methylribose adenine
  modified_base 8: mod_base = OTHER; note = 2-fluororibose guanine
  modified_base 9: mod_base = cm
  modified_base 10: mod_base = OTHER; note = 2-fluororibose adenine
  modified_base 11: mod_base = OTHER; note = 2-O-methylribose adenine
  modified_base 12: mod_base = gm
  modified_base 13: mod_base = OTHER; note = 2-O-methylribose adenine
  modified_base 14: mod_base = OTHER; note = 2-fluororibose adenine
  modified_base 15: mod_base = cm
  modified_base 16: mod_base = OTHER; note = 2-fluororibose adenine
  modified_base 17: mod_base = cm
  modified_base 18: mod_base = OTHER; note = 2-fluororibose uracil
  modified_base 19: mod_base = gm
  modified_base 20: mod_base = OTHER; note = 2-fluororibose uracil
  modified_base 21: mod_base = um
  modified_base 21..22: mod_base = OTHER; note = S-phosphorothioate
  modified_base 22: mod_base = um
  modified_base 22..23: mod_base = OTHER; note = S-phosphorothioate
  modified_base 23: mod_base = um
  source 1..23: mol_type = other RNA
ttatagagcaagaacactgtttt

SEQ ID NO: 619 - RNA, 23 nt, synthetic construct
  misc_feature 1..23: note = Synthetic: WV-41969
  misc_feature 1..23: note = Synthetic: SSR-0104529
  modified_base 1: mod_base = um
  modified_base 1..2: mod_base = OTHER; note = S-phosphorothioate
  modified_base 2: mod_base = OTHER; note = 2-fluororibose uracil
  modified_base 2..3: mod_base = OTHER; note = R-phosphorothioate
  modified_base 3: mod_base = OTHER; note = 2-O-methylribose adenine
  modified_base 4: mod_base = OTHER; note = 2-fluororibose uracil
  modified_base 5: mod_base = OTHER; note = 2-O-methylribose adenine
  modified_base 6: mod_base = OTHER; note = 2-fluororibose guanine
  modified_base 7: mod_base = OTHER; note = 2-O-methylribose adenine
  modified_base 8: mod_base = OTHER; note = 2-fluororibose guanine
  modified_base 9: mod_base = cm
  modified_base 10: mod_base = OTHER; note = 2-fluororibose adenine
  modified_base 10..11: mod_base = OTHER; note S-N-(1,3-dimethylimidazolidin-2-ylidene)phosphoramidate
  modified_base 11: mod_base = OTHER; note = 2-O-methylribose adenine
  modified_base 12: mod_base = gm
  modified_base 13: mod_base = OTHER; note = 2-O-methylribose adenine
  modified_base 14: mod_base = OTHER; note = 2-fluororibose adenine
  modified_base 15: mod_base = cm
  modified_base 16: mod_base = OTHER; note = 2-fluororibose adenine
  modified_base 17: mod_base = cm
  modified_base 18: mod_base = OTHER; note = 2-fluororibose uracil
  modified_base 19: mod_base = gm
  modified_base 20: mod_base = OTHER; note = 2-fluororibose uracil
  modified_base 21: mod_base = um
  modified_base 21..22: mod_base = OTHER; note = S-phosphorothioate
  modified_base 22: mod_base = um
  modified_base 22..23: mod_base = OTHER; note = S-phosphorothioate
  modified_base 23: mod_base = um
  source 1..23: mol_type = other RNA
ttatagagcaagaacactgtttt

SEQ ID NO: 620 - RNA, 23 nt, synthetic construct
  misc_feature 1..23: note = Synthetic: WV-41978
  misc_feature 1..23: note = Synthetic: SSR-0104547
  modified_base 1: mod_base = um
  modified_base 1..2: mod_base = OTHER; note = S-phosphorothioate
  modified_base 2: mod_base = OTHER; note = 2-fluororibose uracil
  modified_base 2..3: mod_base = OTHER; note = R-phosphorothioate
  modified_base 3: mod_base = OTHER; note = 2-O-methylribose adenine
  modified_base 4: mod_base = OTHER; note = 2-fluororibose uracil
  modified_base 5: mod_base = OTHER; note = 2-O-methylribose adenine
  modified_base 6: mod_base = OTHER; note = 2-fluororibose guanine
  modified_base 7: mod_base = OTHER; note = 2-O-methylribose adenine
  modified_base 8: mod_base = OTHER; note = 2-fluororibose guanine
  modified_base 9: mod_base = cm
  modified_base 10: mod_base = OTHER; note = 2-fluororibose adenine
  modified_base 11: mod_base = OTHER; note = 2-O-methylribose adenine
  modified_base 12: mod_base = gm
  modified_base 13: mod_base = OTHER; note = 2-O-methylribose adenine
  modified_base 14: mod_base = OTHER; note = 2-fluororibose adenine
  modified_base 15: mod_base = cm
  modified_base 16: mod_base = OTHER; note = 2-fluororibose adenine
  modified_base 17: mod_base = cm
  modified_base 18: mod_base = OTHER; note = 2-fluororibose uracil
  modified_base 19: mod_base = gm
  modified_base 19..20: mod_base = OTHER; note S-N-(1,3-dimethylimidazolidin-2-ylidene)phosphoramidate
  modified_base 20: mod_base = OTHER; note = 2-fluororibose uracil
  modified_base 21: mod_base = um
  modified_base 21..22: mod_base = OTHER; note = S-phosphorothioate
  modified_base 22: mod_base = um
  modified_base 22..23: mod_base = OTHER; note = S-phosphorothioate
  modified_base 23: mod_base = um
  source 1..23: mol_type = other RNA
ttatagagcaagaacactgtttt

SEQ ID NO: 621 - RNA, 23 nt, synthetic construct
  misc_feature 1..23: note = Synthetic: WV-43987
  misc_feature 1..23: note = Synthetic: SSR-0104442
  modified_base 1: mod_base = um
  modified_base 1..2: mod_base = OTHER; note = S-phosphorothioate
  modified_base 2: mod_base = OTHER; note = 2-fluororibose uracil
  modified_base 2..3: mod_base = OTHER; note = R-phosphorothioate
  modified_base 3: mod_base = OTHER; note = 2-fluororibose adenine
  modified_base 3..4: mod_base = OTHER; note S-N-(1,3-dimethylimidazolidin-2-ylidene)phosphoramidate
  modified_base 4: mod_base = um
  modified_base 5: mod_base = OTHER; note = 2-O-methylribose adenine
  modified_base 6: mod_base = OTHER; note = 2-fluororibose guanine
  modified_base 7: mod_base = OTHER; note = 2-O-methylribose adenine
  modified_base 8: mod_base = gm
  modified_base 9: mod_base = cm
  modified_base 10: mod_base = OTHER; note = 2-fluororibose adenine
  modified_base 10..11: mod_base = OTHER; note S-N-(1,3-dimethylimidazolidin-2-ylidene)phosphoramidate
  modified_base 11: mod_base = OTHER; note = 2-O-methylribose adenine
  modified_base 12: mod_base = gm
  modified_base 13: mod_base = OTHER; note = 2-O-methylribose adenine
  modified_base 14: mod_base = OTHER; note = 2-fluororibose adenine
  modified_base 15: mod_base = cm
  modified_base 16: mod_base = OTHER; note = 2-fluororibose adenine
  modified_base 17: mod_base = cm
  modified_base 18: mod_base = um
  modified_base 19: mod_base = OTHER; note = 2-fluororibose guanine
  modified_base 19..20: mod_base = OTHER; note S-N-(1,3-dimethylimidazolidin-2-ylidene)phosphoramidate
  modified_base 20: mod_base = um
  modified_base 21: mod_base = um
  modified_base 21..22: mod_base = OTHER; note = S-phosphorothioate
  modified_base 22: mod_base = um
  modified_base 22..23: mod_base = OTHER; note = S-phosphorothioate
  modified_base 23: mod_base = um
  source 1..23: mol_type = other RNA
ttatagagcaagaacactgtttt

SEQ ID NO: 622 - RNA, 23 nt, synthetic construct
  misc_feature 1..23: note = Synthetic: WV-43990
  misc_feature 1..23: note = Synthetic: SSR-0104439
  modified_base 1: mod_base = um
  modified_base 1..2: mod_base = OTHER; note = S-phosphorothioate
  modified_base 2: mod_base = OTHER; note = 2-fluororibose uracil
  modified_base 2..3: mod_base = OTHER; note = R-phosphorothioate
  modified_base 3: mod_base = OTHER; note = 2-fluororibose adenine
  modified_base 3..4: mod_base = OTHER; note S-N-(1,3-dimethylimidazolidin-2-ylidene)phosphoramidate
  modified_base 4: mod_base = OTHER; note = 2-fluororibose uracil
  modified_base 5: mod_base = OTHER; note = 2-O-methylribose adenine
  modified_base 6: mod_base = OTHER; note = 2-fluororibose guanine
  modified_base 7: mod_base = OTHER; note = 2-O-methylribose adenine
  modified_base 8: mod_base = gm
  modified_base 9: mod_base = cm
  modified_base 10: mod_base = OTHER; note = 2-fluororibose adenine
  modified_base 10..11: mod_base = OTHER; note S-N-(1,3-dimethylimidazolidin-2-ylidene)phosphoramidate
  modified_base 11: mod_base = OTHER; note = 2-fluororibose adenine
  modified_base 12: mod_base = gm
  modified_base 13: mod_base = OTHER; note = 2-O-methylribose adenine
  modified_base 14: mod_base = OTHER; note = 2-fluororibose adenine
  modified_base 15: mod_base = cm
  modified_base 16: mod_base = OTHER; note = 2-fluororibose adenine
  modified_base 17: mod_base = cm
  modified_base 18: mod_base = um
  modified_base 19: mod_base = OTHER; note = 2-fluororibose guanine
  modified_base 19..20: mod_base = OTHER; note S-N-(1,3-dimethylimidazolidin-2-ylidene)phosphoramidate
  modified_base 20: mod_base = OTHER; note = 2-fluororibose uracil
  modified_base 21: mod_base = um
  modified_base 21..22: mod_base = OTHER; note = S-phosphorothioate
  modified_base 22: mod_base = um
  modified_base 22..23: mod_base = OTHER; note = S-phosphorothioate
  modified_base 23: mod_base = um
  source 1..23: mol_type = other RNA
ttatagagcaagaacactgtttt

SEQ ID NO: 623 - RNA, 23 nt, synthetic construct
  misc_feature 1..23: note = Synthetic: WV-43991
  misc_feature 1..23: note = Synthetic: SSR-0104482
  modified_base 1: mod_base = um
  modified_base 1..2: mod_base = OTHER; note = S-phosphorothioate
  modified_base 2: mod_base = OTHER; note = 2-fluororibose uracil
  modified_base 2..3: mod_base = OTHER; note = R-phosphorothioate
  modified_base 3: mod_base = OTHER; note = 2-O-methylribose adenine
  modified_base 3..4: mod_base = OTHER; note S-N-(1,3-dimethylimidazolidin-2-ylidene)phosphoramidate
  modified_base 4: mod_base = um
  modified_base 5: mod_base = OTHER; note = 2-O-methylribose adenine
  modified_base 6: mod_base = OTHER; note = 2-fluororibose guanine
  modified_base 7: mod_base = OTHER; note = 2-O-methylribose adenine
  modified_base 8: mod_base = OTHER; note = 2-fluororibose guanine
  modified_base 9: mod_base = cm
  modified_base 10: mod_base = OTHER; note = 2-O-methylribose adenine
  modified_base 10..11: mod_base = OTHER; note S-N-(1,3-dimethylimidazolidin-2-ylidene)phosphoramidate
  modified_base 11: mod_base = OTHER; note = 2-O-methylribose adenine
  modified_base 12: mod_base = gm
  modified_base 13: mod_base = OTHER; note = 2-O-methylribose adenine
  modified_base 14: mod_base = OTHER; note = 2-fluororibose adenine
  modified_base 15: mod_base = cm
  modified_base 16: mod_base = OTHER; note = 2-fluororibose adenine
  modified_base 17: mod_base = cm
  modified_base 18: mod_base = OTHER; note = 2-fluororibose uracil
  modified_base 19: mod_base = gm
  modified_base 19..20: mod_base = OTHER; note S-N-(1,3-dimethylimidazolidin-2-ylidene)phosphoramidate
  modified_base 20: mod_base = um
  modified_base 21: mod_base = um
  modified_base 21..22: mod_base = OTHER; note = S-phosphorothioate
  modified_base 22: mod_base = um
  modified_base 22..23: mod_base = OTHER; note = S-phosphorothioate
  modified_base 23: mod_base = um
  source 1..23: mol_type = other RNA
ttatagagcaagaacactgtttt

SEQ ID NO: 624 - RNA, 23 nt, synthetic construct
  misc_feature 1..23: note = Synthetic: WV-43992
  misc_feature 1..23: note = Synthetic: SSR-0104441
  modified_base 1: mod_base = um
  modified_base 1..2: mod_base = OTHER; note = S-phosphorothioate
  modified_base 2: mod_base = OTHER; note = 2-fluororibose uracil
  modified_base 2..3: mod_base = OTHER; note = R-phosphorothioate
  modified_base 3: mod_base = OTHER; note = 2-fluororibose adenine
  modified_base 3..4: mod_base = OTHER; note S-N-(1,3-dimethylimidazolidin-2-ylidene)phosphoramidate
  modified_base 4: mod_base = um
  modified_base 5: mod_base = OTHER; note = 2-O-methylribose adenine
  modified_base 6: mod_base = OTHER; note = 2-fluororibose guanine
  modified_base 7: mod_base = OTHER; note = 2-O-methylribose adenine
  modified_base 8: mod_base = OTHER; note = 2-fluororibose guanine
  modified_base 9: mod_base = cm
  modified_base 10: mod_base = OTHER; note = 2-fluororibose adenine
  modified_base 10..11: mod_base = OTHER; note S-N-(1,3-dimethylimidazolidin-2-ylidene)phosphoramidate
  modified_base 11: mod_base = OTHER; note = 2-O-methylribose adenine
  modified_base 12: mod_base = gm
  modified_base 13: mod_base = OTHER; note = 2-O-methylribose adenine
  modified_base 14: mod_base = OTHER; note = 2-fluororibose adenine
  modified_base 15: mod_base = cm
  modified_base 16: mod_base = OTHER; note = 2-fluororibose adenine
  modified_base 17: mod_base = cm
  modified_base 18: mod_base = OTHER; note = 2-fluororibose uracil
  modified_base 19: mod_base = OTHER; note = 2-fluororibose guanine
  modified_base 19..20: mod_base = OTHER; note S-N-(1,3-dimethylimidazolidin-2-ylidene)phosphoramidate
  modified_base 20: mod_base = um
  modified_base 21: mod_base = um
  modified_base 21..22: mod_base = OTHER; note = S-phosphorothioate
  modified_base 22: mod_base = um
  modified_base 22..23: mod_base = OTHER; note = S-phosphorothioate
  modified_base 23: mod_base = um
  source 1..23: mol_type = other RNA
ttatagagcaagaacactgtttt

SEQ ID NO: 625 - RNA, 23 nt, synthetic construct
  misc_feature 1..23: note = Synthetic: WV-43993
  misc_feature 1..23: note = Synthetic: SSR-0104470
  modified_base 1: mod_base = um
  modified_base 1..2: mod_base = OTHER; note = S-phosphorothioate
  modified_base 2: mod_base = OTHER; note = 2-fluororibose uracil
  modified_base 2..3: mod_base = OTHER; note = R-phosphorothioate
  modified_base 3: mod_base = OTHER; note = 2-O-methylribose adenine
  modified_base 3..4: mod_base = OTHER; note S-N-(1,3-dimethylimidazolidin-2-ylidene)phosphoramidate
  modified_base 4: mod_base = OTHER; note = 2-fluororibose uracil
  modified_base 5: mod_base = OTHER; note = 2-O-methylribose adenine
  modified_base 6: mod_base = OTHER; note = 2-fluororibose guanine
  modified_base 7: mod_base = OTHER; note = 2-O-methylribose adenine
  modified_base 8: mod_base = OTHER; note = 2-fluororibose guanine
  modified_base 9: mod_base = cm
  modified_base 10: mod_base = OTHER; note = 2-O-methylribose adenine
  modified_base 10..11: mod_base = OTHER; note S-N-(1,3-dimethylimidazolidin-2-ylidene)phosphoramidate
  modified_base 11: mod_base = OTHER; note = 2-fluororibose adenine
  modified_base 12: mod_base = gm
  modified_base 13: mod_base = OTHER; note = 2-O-methylribose adenine
  modified_base 14: mod_base = OTHER; note = 2-fluororibose adenine
  modified_base 15: mod_base = cm
  modified_base 16: mod_base = OTHER; note = 2-fluororibose adenine
  modified_base 17: mod_base = cm
  modified_base 18: mod_base = OTHER; note = 2-fluororibose uracil
  modified_base 19: mod_base = gm
  modified_base 19..20: mod_base = OTHER; note S-N-(1,3-dimethylimidazolidin-2-ylidene)phosphoramidate
  modified_base 20: mod_base = OTHER; note = 2-fluororibose uracil
  modified_base 21: mod_base = um
  modified_base 21..22: mod_base = OTHER; note = S-phosphorothioate
  modified_base 22: mod_base = um
  modified_base 22..23: mod_base = OTHER; note = S-phosphorothioate
  modified_base 23: mod_base = um
  source 1..23: mol_type = other RNA
ttatagagcaagaacactgtttt

SEQ ID NO: 626 - RNA, 23 nt, synthetic construct
  misc_feature 1..23: note = Synthetic: WV-49611
  misc_feature 1..23: note = Synthetic: SSR-0104717
  modified_base 1: mod_base = um
  modified_base 1..2: mod_base = OTHER; note = phosphorothioate
  modified_base 2: mod_base = OTHER; note = 2-fluororibose uracil
  modified_base 2..3: mod_base = OTHER; note = phosphorothioate
  modified_base 3: mod_base = OTHER; note = 2-O-methylribose adenine
  modified_base 4: mod_base = OTHER; note = 2-fluororibose uracil
  modified_base 5: mod_base = OTHER; note = 2-O-methylribose adenine
  modified_base 6: mod_base = OTHER; note = 2-fluororibose guanine
  modified_base 7: mod_base = OTHER; note = 2-O-methylribose adenine
  modified_base 8: mod_base = gm
  modified_base 9: mod_base = cm
  modified_base 10: mod_base = OTHER; note = 2-O-methylribose adenine
  modified_base 11: mod_base = OTHER; note = 2-fluororibose adenine
  modified_base 12: mod_base = gm
  modified_base 13: mod_base = OTHER; note = 2-O-methylribose adenine
  modified_base 14: mod_base = OTHER; note = 2-fluororibose adenine
  modified_base 15: mod_base = cm
  modified_base 16: mod_base = OTHER; note = 2-fluororibose adenine
  modified_base 17: mod_base = cm
  modified_base 18: mod_base = um
  modified_base 19: mod_base = gm
  modified_base 20: mod_base = um
  modified_base 21: mod_base = um
  modified_base 21..22: mod_base = OTHER; note = phosphorothioate
  modified_base 22: mod_base = um
  modified_base 22..23: mod_base = OTHER; note = phosphorothioate
  modified_base 23: mod_base = um
  source 1..23: mol_type = other RNA
ttatagagcaagaacactgtttt

SEQ ID NO: 627 - RNA, 23 nt, synthetic construct
  misc_feature 1..23: note = Synthetic: WV-49612
  misc_feature 1..23: note = Synthetic: SSR-0104710
  modified_base 1: mod_base = um
  modified_base 1..2: mod_base = OTHER; note = phosphorothioate
  modified_base 2: mod_base = OTHER; note = 2-fluororibose uracil
  modified_base 2..3: mod_base = OTHER; note = phosphorothioate
  modified_base 3: mod_base = OTHER; note = 2-O-methylribose adenine
  modified_base 3..4: mod_base = OTHER; note = N-(1,3-dimethylimidazolidin-2-ylidene)phosphoramidate
  modified_base 4: mod_base = OTHER; note = 2-fluororibose uracil
  modified_base 5: mod_base = OTHER; note = 2-O-methylribose adenine
  modified_base 6: mod_base = OTHER; note = 2-fluororibose guanine
  modified_base 7: mod_base = OTHER; note = 2-O-methylribose adenine
  modified_base 8: mod_base = gm
  modified_base 9: mod_base = cm
  modified_base 10: mod_base = OTHER; note = 2-O-methylribose adenine
  modified_base 10..11: mod_base = OTHER; note = N-(1,3-dimethylimidazolidin-2-ylidene)phosphoramidate
  modified_base 11: mod_base = OTHER; note = 2-fluororibose adenine
  modified_base 12: mod_base = gm
  modified_base 13: mod_base = OTHER; note = 2-O-methylribose adenine
  modified_base 14: mod_base = OTHER; note = 2-fluororibose adenine
  modified_base 15: mod_base = cm
  modified_base 16: mod_base = OTHER; note = 2-fluororibose adenine
  modified_base 17: mod_base = cm
  modified_base 18: mod_base = um
  modified_base 19: mod_base = gm
  modified_base 20: mod_base = um
  modified_base 21: mod_base = um
  modified_base 21..22: mod_base = OTHER; note = phosphorothioate
  modified_base 22: mod_base = um
  modified_base 22..23: mod_base = OTHER; note = phosphorothioate
  modified_base 23: mod_base = um
  source 1..23: mol_type = other RNA
ttatagagcaagaacactgtttt

SEQ ID NO: 628 - RNA, 23 nt, synthetic construct
  misc_feature 1..23: note = Synthetic: WV-49613
  misc_feature 1..23: note = Synthetic: SSR-0105218
  modified_base 1: mod_base = um
  modified_base 1..2: mod_base = OTHER; note = S-phosphorothioate
  modified_base 2: mod_base = OTHER; note = 2-fluororibose cytosine
  modified_base 2..3: mod_base = OTHER; note = R-phosphorothioate
  modified_base 3: mod_base = cm
  modified_base 3..4: mod_base = OTHER; note S-N-(1,3-dimethylimidazolidin-2-ylidene)phosphoramidate
  modified_base 4: mod_base = OTHER; note = 2-fluororibose uracil
  modified_base 5: mod_base = um
  modified_base 6: mod_base = OTHER; note = 2-fluororibose cytosine
  modified_base 7: mod_base = cm
  modified_base 8: mod_base = cm
  modified_base 9: mod_base = um
  modified_base 10: mod_base = gm
  modified_base 10..11: mod_base = OTHER; note S-N-(1,3-dimethylimidazolidin-2-ylidene)phosphoramidate
  modified_base 11: mod_base = OTHER; note = 2-fluororibose adenine
  modified_base 12: mod_base = OTHER; note = 2-O-methylribose adenine
  modified_base 13: mod_base = gm
  modified_base 14: mod_base = OTHER; note = 2-fluororibose guanine
  modified_base 15: mod_base = um
  modified_base 16: mod_base = OTHER; note = 2-fluororibose uracil
  modified_base 17: mod_base = cm
  modified_base 18: mod_base = cm
  modified_base 19: mod_base = um
  modified_base 20: mod_base = cm
  modified_base 21: mod_base = cm
  modified_base 21..22: mod_base = OTHER; note = S-phosphorothioate
  modified_base 22: mod_base = um
  modified_base 22..23: mod_base = OTHER; note = S-phosphorothioate
  modified_base 23: mod_base = um
  source 1..23: mol_type = other RNA
tccttccctgaaggttcctcctt

SEQ ID NO: 629 - RNA, 23 nt, synthetic construct
  source 1..23: mol_type = other RNA
tccttccctgaaggttcctcctt

SEQ ID NO: 630 - RNA, 23 nt, synthetic construct
  misc_feature 1..23: note = Synthetic: WV-49614
  misc_feature 1..23: note = Synthetic: SSR-0105217
  modified_base 1: mod_base = um
  modified_base 1..2: mod_base = OTHER; note = S-phosphorothioate
  modified_base 2: mod_base = OTHER; note = 2-fluororibose cytosine
  modified_base 2..3: mod_base = OTHER; note = R-phosphorothioate
  modified_base 3: mod_base = cm
  modified_base 3..4: mod_base = OTHER; note S-N-(1,3-dimethylimidazolidin-2-ylidene)phosphoramidate
  modified_base 4: mod_base = OTHER; note = 2-fluororibose uracil
  modified_base 5: mod_base = um
  modified_base 6: mod_base = OTHER; note = 2-fluororibose cytosine
  modified_base 7: mod_base = cm
  modified_base 8: mod_base = cm
  modified_base 9: mod_base = um
  modified_base 10: mod_base = gm
  modified_base 10..11: mod_base = OTHER; note R-N-(1,3-dimethylimidazolidin-2-ylidene)phosphoramidate
  modified_base 11: mod_base = OTHER; note = 2-fluororibose adenine
  modified_base 12: mod_base = OTHER; note = 2-O-methylribose adenine
  modified_base 13: mod_base = gm
  modified_base 14: mod_base = OTHER; note = 2-fluororibose guanine
  modified_base 15: mod_base = um
  modified_base 16: mod_base = OTHER; note = 2-fluororibose uracil
  modified_base 17: mod_base = cm
  modified_base 18: mod_base = cm
  modified_base 19: mod_base = um
  modified_base 20: mod_base = cm
  modified_base 21: mod_base = cm
  modified_base 21..22: mod_base = OTHER; note = S-phosphorothioate
  modified_base 22: mod_base = um
  modified_base 22..23: mod_base = OTHER; note = S-phosphorothioate
  modified_base 23: mod_base = um
  source 1..23: mol_type = other RNA
tccttccctgaaggttcctcctt

SEQ ID NO: 631 - RNA, 21 nt, synthetic construct
  misc_feature 1..21: note = Synthetic: WV-49615
  misc_feature 1..21: note = Synthetic: SSR-0105234
  modified_base 1: mod_base = OTHER; note = triantennary GalNAc with C12 linker linked to 6-aminohexanol linked by phosphate to the 5' end of 2-O-methylribose guanine
  modified_base 1..2: mod_base = OTHER; note = S-phosphorothioate
  modified_base 2: mod_base = gm
  modified_base 3: mod_base = OTHER; note = 2-O-methylribose adenine
  modified_base 4: mod_base = gm
  modified_base 5: mod_base = gm
  modified_base 6: mod_base = OTHER; note = 2-O-methylribose adenine
  modified_base 7: mod_base = OTHER; note = 2-fluororibose adenine
  modified_base 8: mod_base = cm
  modified_base 9: mod_base = OTHER; note = 2-fluororibose cytosine
  modified_base 10: mod_base = OTHER; note = 2-fluororibose uracil
  modified_base 11: mod_base = OTHER; note = 2-fluororibose uracil
  modified_base 12: mod_base = cm
  modified_base 13: mod_base = OTHER; note = 2-O-methylribose adenine
  modified_base 14: mod_base = gm
  modified_base 15: mod_base = gm
  modified_base 16: mod_base = gm
  modified_base 17: mod_base = OTHER; note = 2-O-methylribose adenine
  modified_base 18: mod_base = OTHER; note = 2-O-methylribose adenine
  modified_base 19: mod_base = gm
  modified_base 20: mod_base = gm
  modified_base 20..21: mod_base = OTHER; note = S-phosphorothioate
  modified_base 21: mod_base = OTHER; note = 2-O-methylribose adenine
  source 1..21: mol_type = other RNA
ggaggaaccttcagggaagga

SEQ ID NO: 632 - RNA, 21 nt, synthetic construct
  source 1..21: mol_type = other RNA
ggaggaaccttcagggaagga

SEQ ID NO: 633 - RNA, 23 nt, synthetic construct
  misc_feature 1..23: note = Synthetic: WV-49626
  misc_feature 1..23: note = Synthetic: SSR-0104496
  modified_base 1: mod_base = um
  modified_base 1..2: mod_base = OTHER; note = S-phosphorothioate
  modified_base 2: mod_base = OTHER; note = 2-fluororibose uracil
  modified_base 2..3: mod_base = OTHER; note = R-phosphorothioate
  modified_base 3: mod_base = OTHER; note = 2-O-methylribose adenine
  modified_base 3..4: mod_base = OTHER; note = N-(1,3-dimethylimidazolidin-2-ylidene)phosphoramidate
  modified_base 4: mod_base = OTHER; note = 2-fluororibose uracil
  modified_base 5: mod_base = OTHER; note = 2-O-methylribose adenine
  modified_base 6: mod_base = OTHER; note = 2-fluororibose guanine
  modified_base 7: mod_base = OTHER; note = 2-O-methylribose adenine
  modified_base 8: mod_base = gm
  modified_base 9: mod_base = cm
  modified_base 10: mod_base = OTHER; note = 2-O-methylribose adenine
  modified_base 10..11: mod_base = OTHER; note = N-(1,3-dimethylimidazolidin-2-ylidene)phosphoramidate
  modified_base 11: mod_base = OTHER; note = 2-fluororibose adenine
  modified_base 12: mod_base = gm
  modified_base 13: mod_base = OTHER; note = 2-O-methylribose adenine
  modified_base 14: mod_base = OTHER; note = 2-fluororibose adenine
  modified_base 15: mod_base = cm
  modified_base 16: mod_base = OTHER; note = 2-fluororibose adenine
  modified_base 17: mod_base = cm
  modified_base 18: mod_base = um
  modified_base 19: mod_base = gm
  modified_base 20: mod_base = um
  modified_base 21: mod_base = um
  modified_base 21..22: mod_base = OTHER; note = S-phosphorothioate
  modified_base 22: mod_base = um
  modified_base 22..23: mod_base = OTHER; note = S-phosphorothioate
  modified_base 23: mod_base = um
  source 1..23: mol_type = other RNA
ttatagagcaagaacactgtttt

SEQ ID NO: 634 - RNA, 23 nt, synthetic construct
  misc_feature 1..23: note = Synthetic: WV-49900
  misc_feature 1..23: note = Synthetic: SSR-0105219
  modified_base 1: mod_base = um
  modified_base 1..2: mod_base = OTHER; note = phosphorothioate
  modified_base 2: mod_base = OTHER; note = 2-fluororibose cytosine
  modified_base 2..3: mod_base = OTHER; note = phosphorothioate
  modified_base 3: mod_base = cm
  modified_base 4: mod_base = OTHER; note = 2-fluororibose uracil
  modified_base 5: mod_base = um
  modified_base 6: mod_base = OTHER; note = 2-fluororibose cytosine
  modified_base 7: mod_base = cm
  modified_base 8: mod_base = OTHER; note = 2-fluororibose cytosine
  modified_base 9: mod_base = um
  modified_base 10: mod_base = OTHER; note = 2-fluororibose guanine
  modified_base 11: mod_base = OTHER; note = 2-O-methylribose adenine
  modified_base 12: mod_base = OTHER; note = 2-O-methylribose adenine
  modified_base 13: mod_base = gm
  modified_base 14: mod_base = OTHER; note = 2-fluororibose guanine
  modified_base 15: mod_base = um
  modified_base 16: mod_base = OTHER; note = 2-fluororibose uracil
  modified_base 17: mod_base = cm
  modified_base 18: mod_base = OTHER; note = 2-fluororibose cytosine
  modified_base 19: mod_base = um
  modified_base 20: mod_base = OTHER; note = 2-fluororibose cytosine
  modified_base 21: mod_base = cm
  modified_base 21..22: mod_base = OTHER; note = phosphorothioate
  modified_base 22: mod_base = um
  modified_base 22..23: mod_base = OTHER; note = phosphorothioate
  modified_base 23: mod_base = um
  source 1..23: mol_type = other RNA
tccttccctgaaggttcctcctt

SEQ ID NO: 635 - RNA, 21 nt, synthetic construct
  misc_feature 1..21: note = Synthetic: WV-49901
  misc_feature 1..21: note = Synthetic: SSR-0105236
  modified_base 1: mod_base = OTHER; note = triantennary GalNAc with C12 linker linked to 6-aminohexanol linked by phosphate to the 5' end of 2-O-methylribose guanine
  modified_base 1..2: mod_base = OTHER; note = phosphorothioate
  modified_base 2: mod_base = gm
  modified_base 3: mod_base = OTHER; note = 2-fluororibose adenine
  modified_base 4: mod_base = gm
  modified_base 5: mod_base = OTHER; note = 2-fluororibose guanine
  modified_base 6: mod_base = OTHER; note = 2-O-methylribose adenine
  modified_base 7: mod_base = OTHER; note = 2-fluororibose adenine
  modified_base 8: mod_base = cm
  modified_base 9: mod_base = OTHER; note = 2-fluororibose cytosine
  modified_base 10: mod_base = OTHER; note = 2-fluororibose uracil
  modified_base 11: mod_base = OTHER; note = 2-fluororibose uracil
  modified_base 12: mod_base = cm
  modified_base 13: mod_base = OTHER; note = 2-fluororibose adenine
  modified_base 14: mod_base = gm
  modified_base 15: mod_base = OTHER; note = 2-fluororibose guanine
  modified_base 16: mod_base = gm
  modified_base 17: mod_base = OTHER; note = 2-fluororibose adenine
  modified_base 18: mod_base = OTHER; note = 2-O-methylribose adenine
  modified_base 19: mod_base = OTHER; note = 2-fluororibose guanine
  modified_base 20: mod_base = gm
  modified_base 20..21: mod_base = OTHER; note = phosphorothioate
  modified_base 21: mod_base = OTHER; note = 2-fluororibose adenine
  source 1..21: mol_type = other RNA
ggaggaaccttcagggaagga

SEQ ID NO: 636 - RNA, 23 nt, synthetic construct
  misc_feature 1..23: note = Synthetic: WV-50034
  misc_feature 1..23: note = Synthetic: SSR-0104497
  modified_base 1: mod_base = um
  modified_base 1..2: mod_base = OTHER; note = S-phosphorothioate
  modified_base 2: mod_base = OTHER; note = 2-fluororibose uracil
  modified_base 2..3: mod_base = OTHER; note = R-phosphorothioate
  modified_base 3: mod_base = OTHER; note = 2-O-methylribose adenine
  modified_base 3..4: mod_base = OTHER; note = S-N-(bis(dimethylamino)methylene)phosphoramidate
  modified_base 4: mod_base = OTHER; note = 2-fluororibose uracil
  modified_base 5: mod_base = OTHER; note = 2-O-methylribose adenine
  modified_base 6: mod_base = OTHER; note = 2-fluororibose guanine
  modified_base 7: mod_base = OTHER; note = 2-O-methylribose adenine
  modified_base 8: mod_base = gm
  modified_base 9: mod_base = cm
  modified_base 10: mod_base = OTHER; note = 2-O-methylribose adenine
  modified_base 10..11: mod_base = OTHER; note = R-N-(bis(dimethylamino)methylene)phosphoramidate
  modified_base 11: mod_base = OTHER; note = 2-fluororibose adenine
  modified_base 12: mod_base = gm
  modified_base 13: mod_base = OTHER; note = 2-O-methylribose adenine
  modified_base 14: mod_base = OTHER; note = 2-fluororibose adenine
  modified_base 15: mod_base = cm
  modified_base 16: mod_base = OTHER; note = 2-fluororibose adenine
  modified_base 17: mod_base = cm
  modified_base 18: mod_base = um
  modified_base 19: mod_base = gm
  modified_base 20: mod_base = um
  modified_base 21: mod_base = um
  modified_base 21..22: mod_base = OTHER; note = S-phosphorothioate
  modified_base 22: mod_base = um
  modified_base 22..23: mod_base = OTHER; note = S-phosphorothioate
  modified_base 23: mod_base = um
  source 1..23: mol_type = other RNA
ttatagagcaagaacactgtttt

SEQ ID NO: 637 - RNA, 23 nt, synthetic construct
  misc_feature 1..23: note = Synthetic: WV-50035
  misc_feature 1..23: note = Synthetic: SSR-0104498
  modified_base 1: mod_base = um
  modified_base 1..2: mod_base = OTHER; note = S-phosphorothioate
  modified_base 2: mod_base = OTHER; note = 2-fluororibose uracil
  modified_base 2..3: mod_base = OTHER; note = R-phosphorothioate
  modified_base 3: mod_base = OTHER; note = 2-O-methylribose adenine
  modified_base 3..4: mod_base = OTHER; note = S-N-(bis(dimethylamino)methylene)phosphoramidate
  modified_base 4: mod_base = OTHER; note = 2-fluororibose uracil
  modified_base 5: mod_base = OTHER; note = 2-O-methylribose adenine
  modified_base 6: mod_base = OTHER; note = 2-fluororibose guanine
  modified_base 7: mod_base = OTHER; note = 2-O-methylribose adenine
  modified_base 8: mod_base = gm
  modified_base 9: mod_base = cm
  modified_base 10: mod_base = OTHER; note = 2-O-methylribose adenine
  modified_base 10..11: mod_base = OTHER; note = S-N-(bis(dimethylamino)methylene)phosphoramidate
  modified_base 11: mod_base = OTHER; note = 2-fluororibose adenine
  modified_base 12: mod_base = gm
  modified_base 13: mod_base = OTHER; note = 2-O-methylribose adenine
  modified_base 14: mod_base = OTHER; note = 2-fluororibose adenine
  modified_base 15: mod_base = cm
  modified_base 16: mod_base = OTHER; note = 2-fluororibose adenine
  modified_base 17: mod_base = cm
  modified_base 18: mod_base = um
  modified_base 19: mod_base = gm
  modified_base 20: mod_base = um
  modified_base 21: mod_base = um
  modified_base 21..22: mod_base = OTHER; note = S-phosphorothioate
  modified_base 22: mod_base = um
  modified_base 22..23: mod_base = OTHER; note = S-phosphorothioate
  modified_base 23: mod_base = um
  source 1..23: mol_type = other RNA
ttatagagcaagaacactgtttt

SEQ ID NO: 638 - RNA, 23 nt, synthetic construct
  misc_feature 1..23: note = Synthetic: WV-50036
  misc_feature 1..23: note = Synthetic: SSR-0104499
  modified_base 1: mod_base = um
  modified_base 1..2: mod_base = OTHER; note = S-phosphorothioate
  modified_base 2: mod_base = OTHER; note = 2-fluororibose uracil
  modified_base 2..3: mod_base = OTHER; note = R-phosphorothioate
  modified_base 3: mod_base = OTHER; note = 2-O-methylribose adenine
  modified_base 3..4: mod_base = OTHER; note = S-N-(di(pyrrolidin-1-yl)methylene)phosphoramidate
  modified_base 4: mod_base = OTHER; note = 2-fluororibose uracil
  modified_base 5: mod_base = OTHER; note = 2-O-methylribose adenine
  modified_base 6: mod_base = OTHER; note = 2-fluororibose guanine
  modified_base 7: mod_base = OTHER; note = 2-O-methylribose adenine
  modified_base 8: mod_base = gm
  modified_base 9: mod_base = cm
  modified_base 10: mod_base = OTHER; note = 2-O-methylribose adenine
  modified_base 10..11: mod_base = OTHER; note = R-N-(di(pyrrolidin-1-yl)methylene)phosphoramidate
  modified_base 11: mod_base = OTHER; note = 2-fluororibose adenine
  modified_base 12: mod_base = gm
  modified_base 13: mod_base = OTHER; note = 2-O-methylribose adenine
  modified_base 14: mod_base = OTHER; note = 2-fluororibose adenine
  modified_base 15: mod_base = cm
  modified_base 16: mod_base = OTHER; note = 2-fluororibose adenine
  modified_base 17: mod_base = cm
  modified_base 18: mod_base = um
  modified_base 19: mod_base = gm
  modified_base 20: mod_base = um
  modified_base 21: mod_base = um
  modified_base 21..22: mod_base = OTHER; note = S-phosphorothioate
  modified_base 22: mod_base = um
  modified_base 22..23: mod_base = OTHER; note = S-phosphorothioate
  modified_base 23: mod_base = um
  source 1..23: mol_type = other RNA
ttatagagcaagaacactgtttt

SEQ ID NO: 639 - RNA, 23 nt, synthetic construct
  misc_feature 1..23: note = Synthetic: WV-50037
  misc_feature 1..23: note = Synthetic: SSR-0104500
  modified_base 1: mod_base = um
  modified_base 1..2: mod_base = OTHER; note = S-phosphorothioate
  modified_base 2: mod_base = OTHER; note = 2-fluororibose uracil
  modified_base 2..3: mod_base = OTHER; note = R-phosphorothioate
  modified_base 3: mod_base = OTHER; note = 2-O-methylribose adenine
  modified_base 3..4: mod_base = OTHER; note = S-N-(di(pyrrolidin-1-yl)methylene)phosphoramidate
  modified_base 4: mod_base = OTHER; note = 2-fluororibose uracil
  modified_base 5: mod_base = OTHER; note = 2-O-methylribose adenine
  modified_base 6: mod_base = OTHER; note = 2-fluororibose guanine
  modified_base 7: mod_base = OTHER; note = 2-O-methylribose adenine
  modified_base 8: mod_base = gm
  modified_base 9: mod_base = cm
  modified_base 10: mod_base = OTHER; note = 2-O-methylribose adenine
  modified_base 10..11: mod_base = OTHER; note = S-N-(di(pyrrolidin-1-yl)methylene)phosphoramidate
  modified_base 11: mod_base = OTHER; note = 2-fluororibose adenine
  modified_base 12: mod_base = gm
  modified_base 13: mod_base = OTHER; note = 2-O-methylribose adenine
  modified_base 14: mod_base = OTHER; note = 2-fluororibose adenine
  modified_base 15: mod_base = cm
  modified_base 16: mod_base = OTHER; note = 2-fluororibose adenine
  modified_base 17: mod_base = cm
  modified_base 18: mod_base = um
  modified_base 19: mod_base = gm
  modified_base 20: mod_base = um
  modified_base 21: mod_base = um
  modified_base 21..22: mod_base = OTHER; note = S-phosphorothioate
  modified_base 22: mod_base = um
  modified_base 22..23: mod_base = OTHER; note = S-phosphorothioate
  modified_base 23: mod_base = um
  source 1..23: mol_type = other RNA
ttatagagcaagaacactgtttt

SEQ ID NO: 640 - RNA, 23 nt, synthetic construct
  misc_feature 1..23: note = Synthetic: WV-50040
  misc_feature 1..23: note = Synthetic: SSR-0104503
  modified_base 1: mod_base = um
  modified_base 1..2: mod_base = OTHER; note = S-phosphorothioate
  modified_base 2: mod_base = OTHER; note = 2-fluororibose uracil
  modified_base 2..3: mod_base = OTHER; note = R-phosphorothioate
  modified_base 3: mod_base = OTHER; note = 2-O-methylribose adenine
  modified_base 3..4: mod_base = OTHER; note = S-N-(di(morpholin-1-yl)methylene)phosphoramidate
  modified_base 4: mod_base = OTHER; note = 2-fluororibose uracil
  modified_base 5: mod_base = OTHER; note = 2-O-methylribose adenine
  modified_base 6: mod_base = OTHER; note = 2-fluororibose guanine
  modified_base 7: mod_base = OTHER; note = 2-O-methylribose adenine
  modified_base 8: mod_base = gm
  modified_base 9: mod_base = cm
  modified_base 10: mod_base = OTHER; note = 2-O-methylribose adenine
  modified_base 10..11: mod_base = OTHER; note = R-N-(di(morpholin-1-yl)methylene)phosphoramidate
  modified_base 11: mod_base = OTHER; note = 2-fluororibose adenine
  modified_base 12: mod_base = gm
  modified_base 13: mod_base = OTHER; note = 2-O-methylribose adenine
  modified_base 14: mod_base = OTHER; note = 2-fluororibose adenine
  modified_base 15: mod_base = cm
  modified_base 16: mod_base = OTHER; note = 2-fluororibose adenine
  modified_base 17: mod_base = cm
  modified_base 18: mod_base = um
  modified_base 19: mod_base = gm
  modified_base 20: mod_base = um
  modified_base 21: mod_base = um
  modified_base 21..22: mod_base = OTHER; note = S-phosphorothioate
  modified_base 22: mod_base = um
  modified_base 22..23: mod_base = OTHER; note = S-phosphorothioate
  modified_base 23: mod_base = um
  source 1..23: mol_type = other RNA
ttatagagcaagaacactgtttt

SEQ ID NO: 641 - RNA, 23 nt, synthetic construct
  misc_feature 1..23: note = Synthetic: WV-50041
  misc_feature 1..23: note = Synthetic: SSR-0104504
  modified_base 1: mod_base = um
  modified_base 1..2: mod_base = OTHER; note = S-phosphorothioate
  modified_base 2: mod_base = OTHER; note = 2-fluororibose uracil
  modified_base 2..3: mod_base = OTHER; note = R-phosphorothioate
  modified_base 3: mod_base = OTHER; note = 2-O-methylribose adenine
  modified_base 3..4: mod_base = OTHER; note = S-N-(di(morpholin-1-yl)methylene)phosphoramidate
  modified_base 4: mod_base = OTHER; note = 2-fluororibose uracil
  modified_base 5: mod_base = OTHER; note = 2-O-methylribose adenine
  modified_base 6: mod_base = OTHER; note = 2-fluororibose guanine
  modified_base 7: mod_base = OTHER; note = 2-O-methylribose adenine
  modified_base 8: mod_base = gm
  modified_base 9: mod_base = cm
  modified_base 10: mod_base = OTHER; note = 2-O-methylribose adenine
  modified_base 10..11: mod_base = OTHER; note = S-N-(di(morpholin-1-yl)methylene)phosphoramidate
  modified_base 11: mod_base = OTHER; note = 2-fluororibose adenine
  modified_base 12: mod_base = gm
  modified_base 13: mod_base = OTHER; note = 2-O-methylribose adenine
  modified_base 14: mod_base = OTHER; note = 2-fluororibose adenine
  modified_base 15: mod_base = cm
  modified_base 16: mod_base = OTHER; note = 2-fluororibose adenine
  modified_base 17: mod_base = cm
  modified_base 18: mod_base = um
  modified_base 19: mod_base = gm
  modified_base 20: mod_base = um
  modified_base 21: mod_base = um
  modified_base 21..22: mod_base = OTHER; note = S-phosphorothioate
  modified_base 22: mod_base = um
  modified_base 22..23: mod_base = OTHER; note = S-phosphorothioate
  modified_base 23: mod_base = um
  source 1..23: mol_type = other RNA
ttatagagcaagaacactgtttt

SEQ ID NO: 642 - RNA, 23 nt, synthetic construct
  misc_feature 1..23: note = Synthetic: WV-50042
  misc_feature 1..23: note = Synthetic: SSR-0104505
  modified_base 1: mod_base = um
  modified_base 1..2: mod_base = OTHER; note = S-phosphorothioate
  modified_base 2: mod_base = OTHER; note = 2-fluororibose uracil
  modified_base 2..3: mod_base = OTHER; note = R-phosphorothioate
  modified_base 3: mod_base = OTHER; note = 2-O-methylribose adenine
  modified_base 3..4: mod_base = OTHER; note S-N-(1,3-dimethyltetrahydropyrimidin-2(1H)-ylidene)phosphor amidate
  modified_base 4: mod_base = OTHER; note = 2-fluororibose uracil
  modified_base 5: mod_base = OTHER; note = 2-O-methylribose adenine
  modified_base 6: mod_base = OTHER; note = 2-fluororibose guanine
  modified_base 7: mod_base = OTHER; note = 2-O-methylribose adenine
  modified_base 8: mod_base = gm
  modified_base 9: mod_base = cm
  modified_base 10: mod_base = OTHER; note = 2-O-methylribose adenine
  modified_base 10..11: mod_base = OTHER; note R-N-(1,3-dimethyltetrahydropyrimidin-2(1H)-ylidene)phosphor amidate
  modified_base 11: mod_base = OTHER; note = 2-fluororibose adenine
  modified_base 12: mod_base = gm
  modified_base 13: mod_base = OTHER; note = 2-O-methylribose adenine
  modified_base 14: mod_base = OTHER; note = 2-fluororibose adenine
  modified_base 15: mod_base = cm
  modified_base 16: mod_base = OTHER; note = 2-fluororibose adenine
  modified_base 17: mod_base = cm
  modified_base 18: mod_base = um
  modified_base 19: mod_base = gm
  modified_base 20: mod_base = um
  modified_base 21: mod_base = um
  modified_base 21..22: mod_base = OTHER; note = S-phosphorothioate
  modified_base 22: mod_base = um
  modified_base 22..23: mod_base = OTHER; note = S-phosphorothioate
  modified_base 23: mod_base = um
  source 1..23: mol_type = other RNA
ttatagagcaagaacactgtttt

SEQ ID NO: 643 - RNA, 23 nt, synthetic construct
  misc_feature 1..23: note = Synthetic: WV-50043
  misc_feature 1..23: note = Synthetic: SSR-0104506
  modified_base 1: mod_base = um
  modified_base 1..2: mod_base = OTHER; note = S-phosphorothioate
  modified_base 2: mod_base = OTHER; note = 2-fluororibose uracil
  modified_base 2..3: mod_base = OTHER; note = R-phosphorothioate
  modified_base 3: mod_base = OTHER; note = 2-O-methylribose adenine
  modified_base 3..4: mod_base = OTHER; note S-N-(1,3-dimethyltetrahydropyrimidin-2(1H)-ylidene)phosphor amidate
  modified_base 4: mod_base = OTHER; note = 2-fluororibose uracil
  modified_base 5: mod_base = OTHER; note = 2-O-methylribose adenine
  modified_base 6: mod_base = OTHER; note = 2-fluororibose guanine
  modified_base 7: mod_base = OTHER; note = 2-O-methylribose adenine
  modified_base 8: mod_base = gm
  modified_base 9: mod_base = cm
  modified_base 10: mod_base = OTHER; note = 2-O-methylribose adenine
  modified_base 10..11: mod_base = OTHER; note S-N-(1,3-dimethyltetrahydropyrimidin-2(1H)-ylidene)phosphor amidate
  modified_base 11: mod_base = OTHER; note = 2-fluororibose adenine
  modified_base 12: mod_base = gm
  modified_base 13: mod_base = OTHER; note = 2-O-methylribose adenine
  modified_base 14: mod_base = OTHER; note = 2-fluororibose adenine
  modified_base 15: mod_base = cm
  modified_base 16: mod_base = OTHER; note = 2-fluororibose adenine
  modified_base 17: mod_base = cm
  modified_base 18: mod_base = um
  modified_base 19: mod_base = gm
  modified_base 20: mod_base = um
  modified_base 21: mod_base = um
  modified_base 21..22: mod_base = OTHER; note = S-phosphorothioate
  modified_base 22: mod_base = um
  modified_base 22..23: mod_base = OTHER; note = S-phosphorothioate
  modified_base 23: mod_base = um
  source 1..23: mol_type = other RNA
ttatagagcaagaacactgtttt

SEQ ID NO: 644 - RNA, 23 nt, synthetic construct
  misc_feature 1..23: note = Synthetic: WV-50044
  misc_feature 1..23: note = Synthetic: SSR-0104507
  modified_base 1: mod_base = um
  modified_base 1..2: mod_base = OTHER; note = S-phosphorothioate
  modified_base 2: mod_base = OTHER; note = 2-fluororibose uracil
  modified_base 2..3: mod_base = OTHER; note = R-phosphorothioate
  modified_base 3: mod_base = OTHER; note = 2-O-methylribose adenine
  modified_base 3..4: mod_base = OTHER; note S-N-(1,3-dimethyl-1,3-diazepan-2-ylidene)phosphoramidate
  modified_base 4: mod_base = OTHER; note = 2-fluororibose uracil
  modified_base 5: mod_base = OTHER; note = 2-O-methylribose adenine
  modified_base 6: mod_base = OTHER; note = 2-fluororibose guanine
  modified_base 7: mod_base = OTHER; note = 2-O-methylribose adenine
  modified_base 8: mod_base = gm
  modified_base 9: mod_base = cm
  modified_base 10: mod_base = OTHER; note = 2-O-methylribose adenine
  modified_base 10..11: mod_base = OTHER; note R-N-(1,3-dimethyl-1,3-diazepan-2-ylidene)phosphoramidate
  modified_base 11: mod_base = OTHER; note = 2-fluororibose adenine
  modified_base 12: mod_base = gm
  modified_base 13: mod_base = OTHER; note = 2-O-methylribose adenine
  modified_base 14: mod_base = OTHER; note = 2-fluororibose adenine
  modified_base 15: mod_base = cm
  modified_base 16: mod_base = OTHER; note = 2-fluororibose adenine
  modified_base 17: mod_base = cm
  modified_base 18: mod_base = um
  modified_base 19: mod_base = gm
  modified_base 20: mod_base = um
  modified_base 21: mod_base = um
  modified_base 21..22: mod_base = OTHER; note = S-phosphorothioate
  modified_base 22: mod_base = um
  modified_base 22..23: mod_base = OTHER; note = S-phosphorothioate
  modified_base 23: mod_base = um
  source 1..23: mol_type = other RNA
ttatagagcaagaacactgtttt

SEQ ID NO: 645 - RNA, 23 nt, synthetic construct
  misc_feature 1..23: note = Synthetic: WV-50045
  misc_feature 1..23: note = Synthetic: SSR-0104508
  modified_base 1: mod_base = um
  modified_base 1..2: mod_base = OTHER; note = S-phosphorothioate
  modified_base 2: mod_base = OTHER; note = 2-fluororibose uracil
  modified_base 2..3: mod_base = OTHER; note = R-phosphorothioate
  modified_base 3: mod_base = OTHER; note = 2-O-methylribose adenine
  modified_base 3..4: mod_base = OTHER; note S-N-(1,3-dimethyl-1,3-diazepan-2-ylidene)phosphoramidate
  modified_base 4: mod_base = OTHER; note = 2-fluororibose uracil
  modified_base 5: mod_base = OTHER; note = 2-O-methylribose adenine
  modified_base 6: mod_base = OTHER; note = 2-fluororibose guanine
  modified_base 7: mod_base = OTHER; note = 2-O-methylribose adenine
  modified_base 8: mod_base = gm
  modified_base 9: mod_base = cm
  modified_base 10: mod_base = OTHER; note = 2-O-methylribose adenine
  modified_base 10..11: mod_base = OTHER; note S-N-(1,3-dimethyl-1,3-diazepan-2-ylidene)phosphoramidate
  modified_base 11: mod_base = OTHER; note = 2-fluororibose adenine
  modified_base 12: mod_base = gm
  modified_base 13: mod_base = OTHER; note = 2-O-methylribose adenine
  modified_base 14: mod_base = OTHER; note = 2-fluororibose adenine
  modified_base 15: mod_base = cm
  modified_base 16: mod_base = OTHER; note = 2-fluororibose adenine
  modified_base 17: mod_base = cm
  modified_base 18: mod_base = um
  modified_base 19: mod_base = gm
  modified_base 20: mod_base = um
  modified_base 21: mod_base = um
  modified_base 21..22: mod_base = OTHER; note = S-phosphorothioate
  modified_base 22: mod_base = um
  modified_base 22..23: mod_base = OTHER; note = S-phosphorothioate
  modified_base 23: mod_base = um
  source 1..23: mol_type = other RNA
ttatagagcaagaacactgtttt

SEQ ID NO: 646 - RNA, 23 nt, synthetic construct
  misc_feature 1..23: note = Synthetic: WV-50046
  misc_feature 1..23: note = Synthetic: SSR-0104509
  modified_base 1: mod_base = um
  modified_base 1..2: mod_base = OTHER; note = S-phosphorothioate
  modified_base 2: mod_base = OTHER; note = 2-fluororibose uracil
  modified_base 2..3: mod_base = OTHER; note = R-phosphorothioate
  modified_base 3: mod_base = OTHER; note = 2-O-methylribose adenine
  modified_base 3..4: mod_base = OTHER; note S-N-(1,3-di(2-methoxyethyl)imidazolidin-2-ylidene)phosphora midate
  modified_base 4: mod_base = OTHER; note = 2-fluororibose uracil
  modified_base 5: mod_base = OTHER; note = 2-O-methylribose adenine
  modified_base 6: mod_base = OTHER; note = 2-fluororibose guanine
  modified_base 7: mod_base = OTHER; note = 2-O-methylribose adenine
  modified_base 8: mod_base = gm
  modified_base 9: mod_base = cm
  modified_base 10: mod_base = OTHER; note = 2-O-methylribose adenine
  modified_base 10..11: mod_base = OTHER; note R-N-(1,3-di(2-methoxyethyl)imidazolidin-2-ylidene)phosphora midate
  modified_base 11: mod_base = OTHER; note = 2-fluororibose adenine
  modified_base 12: mod_base = gm
  modified_base 13: mod_base = OTHER; note = 2-O-methylribose adenine
  modified_base 14: mod_base = OTHER; note = 2-fluororibose adenine
  modified_base 15: mod_base = cm
  modified_base 16: mod_base = OTHER; note = 2-fluororibose adenine
  modified_base 17: mod_base = cm
  modified_base 18: mod_base = um
  modified_base 19: mod_base = gm
  modified_base 20: mod_base = um
  modified_base 21: mod_base = um
  modified_base 21..22: mod_base = OTHER; note = S-phosphorothioate
  modified_base 22: mod_base = um
  modified_base 22..23: mod_base = OTHER; note = S-phosphorothioate
  modified_base 23: mod_base = um
  source 1..23: mol_type = other RNA
ttatagagcaagaacactgtttt

SEQ ID NO: 647 - RNA, 23 nt, synthetic construct
  misc_feature 1..23: note = Synthetic: WV-50047
  misc_feature 1..23: note = Synthetic: SSR-0104510
  modified_base 1: mod_base = um
  modified_base 1..2: mod_base = OTHER; note = S-phosphorothioate
  modified_base 2: mod_base = OTHER; note = 2-fluororibose uracil
  modified_base 2..3: mod_base = OTHER; note = R-phosphorothioate
  modified_base 3: mod_base = OTHER; note = 2-O-methylribose adenine
  modified_base 3..4: mod_base = OTHER; note S-N-(1,3-di(2-methoxyethyl)imidazolidin-2-ylidene)phosphora midate
  modified_base 4: mod_base = OTHER; note = 2-fluororibose uracil
  modified_base 5: mod_base = OTHER; note = 2-O-methylribose adenine
  modified_base 6: mod_base = OTHER; note = 2-fluororibose guanine
  modified_base 7: mod_base = OTHER; note = 2-O-methylribose adenine
  modified_base 8: mod_base = gm
  modified_base 9: mod_base = cm
  modified_base 10: mod_base = OTHER; note = 2-O-methylribose adenine
  modified_base 10..11: mod_base = OTHER; note S-N-(1,3-di(2-methoxyethyl)imidazolidin-2-ylidene)phosphora midate
  modified_base 11: mod_base = OTHER; note = 2-fluororibose adenine
  modified_base 12: mod_base = gm
  modified_base 13: mod_base = OTHER; note = 2-O-methylribose adenine
  modified_base 14: mod_base = OTHER; note = 2-fluororibose adenine
  modified_base 15: mod_base = cm
  modified_base 16: mod_base = OTHER; note = 2-fluororibose adenine
  modified_base 17: mod_base = cm
  modified_base 18: mod_base = um
  modified_base 19: mod_base = gm
  modified_base 20: mod_base = um
  modified_base 21: mod_base = um
  modified_base 21..22: mod_base = OTHER; note = S-phosphorothioate
  modified_base 22: mod_base = um
  modified_base 22..23: mod_base = OTHER; note = S-phosphorothioate
  modified_base 23: mod_base = um
  source 1..23: mol_type = other RNA
ttatagagcaagaacactgtttt

SEQ ID NO: 648 - RNA, 23 nt, synthetic construct
  misc_feature 1..23: note = Synthetic: WV-50048
  misc_feature 1..23: note = Synthetic: SSR-0104511
  modified_base 1: mod_base = um
  modified_base 1..2: mod_base = OTHER; note = S-phosphorothioate
  modified_base 2: mod_base = OTHER; note = 2-fluororibose uracil
  modified_base 2..3: mod_base = OTHER; note = R-phosphorothioate
  modified_base 3: mod_base = OTHER; note = 2-O-methylribose adenine
  modified_base 3..4: mod_base = OTHER; note S-N-(1-(2-methoxyethyl)-3-methylimidazolidin-2-ylidene)phos phoramidate
  modified_base 4: mod_base = OTHER; note = 2-fluororibose uracil
  modified_base 5: mod_base = OTHER; note = 2-O-methylribose adenine
  modified_base 6: mod_base = OTHER; note = 2-fluororibose guanine
  modified_base 7: mod_base = OTHER; note = 2-O-methylribose adenine
  modified_base 8: mod_base = gm
  modified_base 9: mod_base = cm
  modified_base 10: mod_base = OTHER; note = 2-O-methylribose adenine
  modified_base 10..11: mod_base = OTHER; note R-N-(1-(2-methoxyethyl)-3-methylimidazolidin-2-ylidene)phos phoramidate
  modified_base 11: mod_base = OTHER; note = 2-fluororibose adenine
  modified_base 12: mod_base = gm
  modified_base 13: mod_base = OTHER; note = 2-O-methylribose adenine
  modified_base 14: mod_base = OTHER; note = 2-fluororibose adenine
  modified_base 15: mod_base = cm
  modified_base 16: mod_base = OTHER; note = 2-fluororibose adenine
  modified_base 17: mod_base = cm
  modified_base 18: mod_base = um
  modified_base 19: mod_base = gm
  modified_base 20: mod_base = um
  modified_base 21: mod_base = um
  modified_base 21..22: mod_base = OTHER; note = S-phosphorothioate
  modified_base 22: mod_base = um
  modified_base 22..23: mod_base = OTHER; note = S-phosphorothioate
  modified_base 23: mod_base = um
  source 1..23: mol_type = other RNA
ttatagagcaagaacactgtttt

SEQ ID NO: 649 - RNA, 23 nt, synthetic construct
  misc_feature 1..23: note = Synthetic: WV-50049
  misc_feature 1..23: note = Synthetic: SSR-0104512
  modified_base 1: mod_base = um
  modified_base 1..2: mod_base = OTHER; note = S-phosphorothioate
  modified_base 2: mod_base = OTHER; note = 2-fluororibose uracil
  modified_base 2..3: mod_base = OTHER; note = R-phosphorothioate
  modified_base 3: mod_base = OTHER; note = 2-O-methylribose adenine
  modified_base 3..4: mod_base = OTHER; note S-N-(1-(2-methoxyethyl)-3-methylimidazolidin-2-ylidene)phos phoramidate
  modified_base 4: mod_base = OTHER; note = 2-fluororibose uracil
  modified_base 5: mod_base = OTHER; note = 2-O-methylribose adenine
  modified_base 6: mod_base = OTHER; note = 2-fluororibose guanine
  modified_base 7: mod_base = OTHER; note = 2-O-methylribose adenine
  modified_base 8: mod_base = gm
  modified_base 9: mod_base = cm
  modified_base 10: mod_base = OTHER; note = 2-O-methylribose adenine
  modified_base 10..11: mod_base = OTHER; note S-N-(1-(2-methoxyethyl)-3-methylimidazolidin-2-ylidene)phos phoramidate
  modified_base 11: mod_base = OTHER; note = 2-fluororibose adenine
  modified_base 12: mod_base = gm
  modified_base 13: mod_base = OTHER; note = 2-O-methylribose adenine
  modified_base 14: mod_base = OTHER; note = 2-fluororibose adenine
  modified_base 15: mod_base = cm
  modified_base 16: mod_base = OTHER; note = 2-fluororibose adenine
  modified_base 17: mod_base = cm
  modified_base 18: mod_base = um
  modified_base 19: mod_base = gm
  modified_base 20: mod_base = um
  modified_base 21: mod_base = um
  modified_base 21..22: mod_base = OTHER; note = S-phosphorothioate
  modified_base 22: mod_base = um
  modified_base 22..23: mod_base = OTHER; note = S-phosphorothioate
  modified_base 23: mod_base = um
  source 1..23: mol_type = other RNA
ttatagagcaagaacactgtttt

SEQ ID NO: 650 - RNA, 23 nt, synthetic construct
  misc_feature 1..23: note = Synthetic: WV-50101
  misc_feature 1..23: note = Synthetic: SSR-0104188
  modified_base 1: mod_base = OTHER; note = phosphate linked to the 5' end of 5-(R)-methyl-5-deoxy-2-O-methylribose uracil
  modified_base 1..2: mod_base = OTHER; note = R-phosphorothioate
  modified_base 2: mod_base = OTHER; note = 2-fluororibose uracil
  modified_base 2..3: mod_base = OTHER; note = S-phosphorothioate
  modified_base 3: mod_base = OTHER; note = 2-O-methylribose adenine
  modified_base 4: mod_base = um
  modified_base 5: mod_base = OTHER; note = 2-O-methylribose adenine
  modified_base 6: mod_base = OTHER; note = 2-fluororibose guanine
  modified_base 7: mod_base = OTHER; note = 2-O-methylribose adenine
  modified_base 8: mod_base = gm
  modified_base 9: mod_base = cm
  modified_base 10: mod_base = OTHER; note = 2-O-methylribose adenine
  modified_base 11: mod_base = OTHER; note = 2-O-methylribose adenine
  modified_base 12: mod_base = gm
  modified_base 13: mod_base = OTHER; note = 2-O-methylribose adenine
  modified_base 14: mod_base = OTHER; note = 2-fluororibose adenine
  modified_base 15: mod_base = cm
  modified_base 16: mod_base = OTHER; note = 2-fluororibose adenine
  modified_base 17: mod_base = cm
  modified_base 18: mod_base = um
  modified_base 19: mod_base = gm
  modified_base 20: mod_base = um
  modified_base 21: mod_base = um
  modified_base 21..22: mod_base = OTHER; note = S-phosphorothioate
  modified_base 22: mod_base = um
  modified_base 22..23: mod_base = OTHER; note = S-phosphorothioate
  modified_base 23: mod_base = um
  source 1..23: mol_type = other RNA
ttatagagcaagaacactgtttt

SEQ ID NO: 651 - RNA, 23 nt, synthetic construct
  misc_feature 1..23: note = Synthetic: WV-50102
  misc_feature 1..23: note = Synthetic: SSR-0104191
  modified_base 1: mod_base = OTHER; note = phosphate linked to the 5' end of 5-(R)-methyl-5-deoxy-2-O-methylribose uracil
  modified_base 1..2: mod_base = OTHER; note = S-phosphorothioate
  modified_base 2: mod_base = OTHER; note = 2-fluororibose uracil
  modified_base 2..3: mod_base = OTHER; note = R-phosphorothioate
  modified_base 3: mod_base = OTHER; note = 2-O-methylribose adenine
  modified_base 4: mod_base = um
  modified_base 5: mod_base = OTHER; note = 2-O-methylribose adenine
  modified_base 6: mod_base = OTHER; note = 2-fluororibose guanine
  modified_base 7: mod_base = OTHER; note = 2-O-methylribose adenine
  modified_base 8: mod_base = gm
  modified_base 9: mod_base = cm
  modified_base 10: mod_base = OTHER; note = 2-O-methylribose adenine
  modified_base 11: mod_base = OTHER; note = 2-O-methylribose adenine
  modified_base 12: mod_base = gm
  modified_base 13: mod_base = OTHER; note = 2-O-methylribose adenine
  modified_base 14: mod_base = OTHER; note = 2-fluororibose adenine
  modified_base 15: mod_base = cm
  modified_base 16: mod_base = OTHER; note = 2-fluororibose adenine
  modified_base 17: mod_base = cm
  modified_base 18: mod_base = um
  modified_base 19: mod_base = gm
  modified_base 20: mod_base = um
  modified_base 21: mod_base = um
  modified_base 21..22: mod_base = OTHER; note = S-phosphorothioate
  modified_base 22: mod_base = um
  modified_base 22..23: mod_base = OTHER; note = S-phosphorothioate
  modified_base 23: mod_base = um
  source 1..23: mol_type = other RNA
ttatagagcaagaacactgtttt

SEQ ID NO: 652 - RNA, 23 nt, synthetic construct
  misc_feature 1..23: note = Synthetic: WV-50103
  misc_feature 1..23: note = Synthetic: SSR-0104187
  modified_base 1: mod_base = OTHER; note = phosphate linked to the 5' end of 5-(R)-methyl-5-deoxy-2-O-methylribose uracil
  modified_base 1..2: mod_base = OTHER; note = R-phosphorothioate
  modified_base 2: mod_base = OTHER; note = 2-fluororibose uracil
  modified_base 2..3: mod_base = OTHER; note = S-phosphorothioate
  modified_base 3: mod_base = OTHER; note = 2-O-methylribose adenine
  modified_base 3..4: mod_base = OTHER; note S-N-(1,3-dimethylimidazolidin-2-ylidene)phosphoramidate
  modified_base 4: mod_base = OTHER; note = 2-fluororibose uracil
  modified_base 5: mod_base = OTHER; note = 2-O-methylribose adenine
  modified_base 6: mod_base = OTHER; note = 2-fluororibose guanine
  modified_base 7: mod_base = OTHER; note = 2-O-methylribose adenine
  modified_base 8: mod_base = gm
  modified_base 9: mod_base = cm
  modified_base 10: mod_base = OTHER; note = 2-O-methylribose adenine
  modified_base 10..11: mod_base = OTHER; note S-N-(1,3-dimethylimidazolidin-2-ylidene)phosphoramidate
  modified_base 11: mod_base = OTHER; note = 2-fluororibose adenine
  modified_base 12: mod_base = gm
  modified_base 13: mod_base = OTHER; note = 2-O-methylribose adenine
  modified_base 14: mod_base = OTHER; note = 2-fluororibose adenine
  modified_base 15: mod_base = cm
  modified_base 16: mod_base = OTHER; note = 2-fluororibose adenine
  modified_base 17: mod_base = cm
  modified_base 18: mod_base = um
  modified_base 19: mod_base = gm
  modified_base 20: mod_base = um
  modified_base 21: mod_base = um
  modified_base 21..22: mod_base = OTHER; note = S-phosphorothioate
  modified_base 22: mod_base = um
  modified_base 22..23: mod_base = OTHER; note = S-phosphorothioate
  modified_base 23: mod_base = um
  source 1..23: mol_type = other RNA
ttatagagcaagaacactgtttt

SEQ ID NO: 653 - RNA, 23 nt, synthetic construct
  misc_feature 1..23: note = Synthetic: WV-50104
  misc_feature 1..23: note = Synthetic: SSR-0104190
  modified_base 1: mod_base = OTHER; note = phosphate linked to the 5' end of 5-(R)-methyl-5-deoxy-2-O-methylribose uracil
  modified_base 1..2: mod_base = OTHER; note = S-phosphorothioate
  modified_base 2: mod_base = OTHER; note = 2-fluororibose uracil
  modified_base 2..3: mod_base = OTHER; note = R-phosphorothioate
  modified_base 3: mod_base = OTHER; note = 2-O-methylribose adenine
  modified_base 3..4: mod_base = OTHER; note S-N-(1,3-dimethylimidazolidin-2-ylidene)phosphoramidate
  modified_base 4: mod_base = OTHER; note = 2-fluororibose uracil
  modified_base 5: mod_base = OTHER; note = 2-O-methylribose adenine
  modified_base 6: mod_base = OTHER; note = 2-fluororibose guanine
  modified_base 7: mod_base = OTHER; note = 2-O-methylribose adenine
  modified_base 8: mod_base = gm
  modified_base 9: mod_base = cm
  modified_base 10: mod_base = OTHER; note = 2-O-methylribose adenine
  modified_base 10..11: mod_base = OTHER; note S-N-(1,3-dimethylimidazolidin-2-ylidene)phosphoramidate
  modified_base 11: mod_base = OTHER; note = 2-fluororibose adenine
  modified_base 12: mod_base = gm
  modified_base 13: mod_base = OTHER; note = 2-O-methylribose adenine
  modified_base 14: mod_base = OTHER; note = 2-fluororibose adenine
  modified_base 15: mod_base = cm
  modified_base 16: mod_base = OTHER; note = 2-fluororibose adenine
  modified_base 17: mod_base = cm
  modified_base 18: mod_base = um
  modified_base 19: mod_base = gm
  modified_base 20: mod_base = um
  modified_base 21: mod_base = um
  modified_base 21..22: mod_base = OTHER; note = S-phosphorothioate
  modified_base 22: mod_base = um
  modified_base 22..23: mod_base = OTHER; note = S-phosphorothioate
  modified_base 23: mod_base = um
  source 1..23: mol_type = other RNA
ttatagagcaagaacactgtttt

SEQ ID NO: 654 - RNA, 23 nt, synthetic construct
  misc_feature 1..23: note = Synthetic: WV-50105
  misc_feature 1..23: note = Synthetic: SSR-0104186
  modified_base 1: mod_base = OTHER; note = phosphate linked to the 5' end of 5-(R)-methyl-5-deoxy-2-O-methylribose uracil
  modified_base 1..2: mod_base = OTHER; note = R-phosphorothioate
  modified_base 2: mod_base = OTHER; note = 2-fluororibose uracil
  modified_base 2..3: mod_base = OTHER; note = S-phosphorothioate
  modified_base 3: mod_base = OTHER; note = 2-O-methylribose adenine
  modified_base 3..4: mod_base = OTHER; note S-N-(1,3-dimethylimidazolidin-2-ylidene)phosphoramidate
  modified_base 4: mod_base = OTHER; note = 2-fluororibose uracil
  modified_base 5: mod_base = OTHER; note = 2-O-methylribose adenine
  modified_base 6: mod_base = OTHER; note = 2-fluororibose guanine
  modified_base 7: mod_base = OTHER; note = 2-O-methylribose adenine
  modified_base 8: mod_base = gm
  modified_base 9: mod_base = cm
  modified_base 10: mod_base = OTHER; note = 2-O-methylribose adenine
  modified_base 10..11: mod_base = OTHER; note R-N-(1,3-dimethylimidazolidin-2-ylidene)phosphoramidate
  modified_base 11: mod_base = OTHER; note = 2-fluororibose adenine
  modified_base 12: mod_base = gm
  modified_base 13: mod_base = OTHER; note = 2-O-methylribose adenine
  modified_base 14: mod_base = OTHER; note = 2-fluororibose adenine
  modified_base 15: mod_base = cm
  modified_base 16: mod_base = OTHER; note = 2-fluororibose adenine
  modified_base 17: mod_base = cm
  modified_base 18: mod_base = um
  modified_base 19: mod_base = gm
  modified_base 20: mod_base = um
  modified_base 21: mod_base = um
  modified_base 21..22: mod_base = OTHER; note = S-phosphorothioate
  modified_base 22: mod_base = um
  modified_base 22..23: mod_base = OTHER; note = S-phosphorothioate
  modified_base 23: mod_base = um
  source 1..23: mol_type = other RNA
ttatagagcaagaacactgtttt

SEQ ID NO: 655 - RNA, 23 nt, synthetic construct
  misc_feature 1..23: note = Synthetic: WV-50106
  misc_feature 1..23: note = Synthetic: SSR-0104189
  modified_base 1: mod_base = OTHER; note = phosphate linked to the 5' end of 5-(R)-methyl-5-deoxy-2-O-methylribose uracil
  modified_base 1..2: mod_base = OTHER; note = S-phosphorothioate
  modified_base 2: mod_base = OTHER; note = 2-fluororibose uracil
  modified_base 2..3: mod_base = OTHER; note = R-phosphorothioate
  modified_base 3: mod_base = OTHER; note = 2-O-methylribose adenine
  modified_base 3..4: mod_base = OTHER; note S-N-(1,3-dimethylimidazolidin-2-ylidene)phosphoramidate
  modified_base 4: mod_base = OTHER; note = 2-fluororibose uracil
  modified_base 5: mod_base = OTHER; note = 2-O-methylribose adenine
  modified_base 6: mod_base = OTHER; note = 2-fluororibose guanine
  modified_base 7: mod_base = OTHER; note = 2-O-methylribose adenine
  modified_base 8: mod_base = gm
  modified_base 9: mod_base = cm
  modified_base 10: mod_base = OTHER; note = 2-O-methylribose adenine
  modified_base 10..11: mod_base = OTHER; note R-N-(1,3-dimethylimidazolidin-2-ylidene)phosphoramidate
  modified_base 11: mod_base = OTHER; note = 2-fluororibose adenine
  modified_base 12: mod_base = gm
  modified_base 13: mod_base = OTHER; note = 2-O-methylribose adenine
  modified_base 14: mod_base = OTHER; note = 2-fluororibose adenine
  modified_base 15: mod_base = cm
  modified_base 16: mod_base = OTHER; note = 2-fluororibose adenine
  modified_base 17: mod_base = cm
  modified_base 18: mod_base = um
  modified_base 19: mod_base = gm
  modified_base 20: mod_base = um
  modified_base 21: mod_base = um
  modified_base 21..22: mod_base = OTHER; note = S-phosphorothioate
  modified_base 22: mod_base = um
  modified_base 22..23: mod_base = OTHER; note = S-phosphorothioate
  modified_base 23: mod_base = um
  source 1..23: mol_type = other RNA
ttatagagcaagaacactgtttt

SEQ ID NO: 656 - RNA, 23 nt, synthetic construct
  misc_feature 1..23: note = Synthetic: WV-50108
  misc_feature 1..23: note = Synthetic: SSR-0104207
  modified_base 1: mod_base = OTHER; note = phosphate linked to the 5' end of 5-(S)-methyl-(E)-vinyl-5-deoxy-2-O-methylribose uracil
  modified_base 1..2: mod_base = OTHER; note = S-phosphorothioate
  modified_base 2: mod_base = OTHER; note = 2-fluororibose uracil
  modified_base 2..3: mod_base = OTHER; note = R-phosphorothioate
  modified_base 3: mod_base = OTHER; note = 2-O-methylribose adenine
  modified_base 4: mod_base = um
  modified_base 5: mod_base = OTHER; note = 2-O-methylribose adenine
  modified_base 6: mod_base = OTHER; note = 2-fluororibose guanine
  modified_base 7: mod_base = OTHER; note = 2-O-methylribose adenine
  modified_base 8: mod_base = gm
  modified_base 9: mod_base = cm
  modified_base 10: mod_base = OTHER; note = 2-O-methylribose adenine
  modified_base 11: mod_base = OTHER; note = 2-O-methylribose adenine
  modified_base 12: mod_base = gm
  modified_base 13: mod_base = OTHER; note = 2-O-methylribose adenine
  modified_base 14: mod_base = OTHER; note = 2-fluororibose adenine
  modified_base 15: mod_base = cm
  modified_base 16: mod_base = OTHER; note = 2-fluororibose adenine
  modified_base 17: mod_base = cm
  modified_base 18: mod_base = um
  modified_base 19: mod_base = gm
  modified_base 20: mod_base = um
  modified_base 21: mod_base = um
  modified_base 21..22: mod_base = OTHER; note = S-phosphorothioate
  modified_base 22: mod_base = um
  modified_base 22..23: mod_base = OTHER; note = S-phosphorothioate
  modified_base 23: mod_base = um
  source 1..23: mol_type = other RNA
ttatagagcaagaacactgtttt

SEQ ID NO: 657 - RNA, 23 nt, synthetic construct
  misc_feature 1..23: note = Synthetic: WV-50110
  misc_feature 1..23: note = Synthetic: SSR-0104206
  modified_base 1: mod_base = OTHER; note = phosphate linked to the 5' end of 5-(S)-methyl-(E)-vinyl-5-deoxy-2-O-methylribose uracil
  modified_base 1..2: mod_base = OTHER; note = S-phosphorothioate
  modified_base 2: mod_base = OTHER; note = 2-fluororibose uracil
  modified_base 2..3: mod_base = OTHER; note = R-phosphorothioate
  modified_base 3: mod_base = OTHER; note = 2-O-methylribose adenine
  modified_base 3..4: mod_base = OTHER; note S-N-(1,3-dimethylimidazolidin-2-ylidene)phosphoramidate
  modified_base 4: mod_base = OTHER; note = 2-fluororibose uracil
  modified_base 5: mod_base = OTHER; note = 2-O-methylribose adenine
  modified_base 6: mod_base = OTHER; note = 2-fluororibose guanine
  modified_base 7: mod_base = OTHER; note = 2-O-methylribose adenine
  modified_base 8: mod_base = gm
  modified_base 9: mod_base = cm
  modified_base 10: mod_base = OTHER; note = 2-O-methylribose adenine
  modified_base 10..11: mod_base = OTHER; note S-N-(1,3-dimethylimidazolidin-2-ylidene)phosphoramidate
  modified_base 11: mod_base = OTHER; note = 2-fluororibose adenine
  modified_base 12: mod_base = gm
  modified_base 13: mod_base = OTHER; note = 2-O-methylribose adenine
  modified_base 14: mod_base = OTHER; note = 2-fluororibose adenine
  modified_base 15: mod_base = cm
  modified_base 16: mod_base = OTHER; note = 2-fluororibose adenine
  modified_base 17: mod_base = cm
  modified_base 18: mod_base = um
  modified_base 19: mod_base = gm
  modified_base 20: mod_base = um
  modified_base 21: mod_base = um
  modified_base 21..22: mod_base = OTHER; note = S-phosphorothioate
  modified_base 22: mod_base = um
  modified_base 22..23: mod_base = OTHER; note = S-phosphorothioate
  modified_base 23: mod_base = um
  source 1..23: mol_type = other RNA
ttatagagcaagaacactgtttt

SEQ ID NO: 658 - RNA, 23 nt, synthetic construct
  misc_feature 1..23: note = Synthetic: WV-50112
  misc_feature 1..23: note = Synthetic: SSR-0104205
  modified_base 1: mod_base = OTHER; note = phosphate linked to the 5' end of 5-(S)-methyl-(E)-vinyl-5-deoxy-2-O-methylribose uracil
  modified_base 1..2: mod_base = OTHER; note = S-phosphorothioate
  modified_base 2: mod_base = OTHER; note = 2-fluororibose uracil
  modified_base 2..3: mod_base = OTHER; note = R-phosphorothioate
  modified_base 3: mod_base = OTHER; note = 2-O-methylribose adenine
  modified_base 3..4: mod_base = OTHER; note S-N-(1,3-dimethylimidazolidin-2-ylidene)phosphoramidate
  modified_base 4: mod_base = OTHER; note = 2-fluororibose uracil
  modified_base 5: mod_base = OTHER; note = 2-O-methylribose adenine
  modified_base 6: mod_base = OTHER; note = 2-fluororibose guanine
  modified_base 7: mod_base = OTHER; note = 2-O-methylribose adenine
  modified_base 8: mod_base = gm
  modified_base 9: mod_base = cm
  modified_base 10: mod_base = OTHER; note = 2-O-methylribose adenine
  modified_base 10..11: mod_base = OTHER; note R-N-(1,3-dimethylimidazolidin-2-ylidene)phosphoramidate
  modified_base 11: mod_base = OTHER; note = 2-fluororibose adenine
  modified_base 12: mod_base = gm
  modified_base 13: mod_base = OTHER; note = 2-O-methylribose adenine
  modified_base 14: mod_base = OTHER; note = 2-fluororibose adenine
  modified_base 15: mod_base = cm
  modified_base 16: mod_base = OTHER; note = 2-fluororibose adenine
  modified_base 17: mod_base = cm
  modified_base 18: mod_base = um
  modified_base 19: mod_base = gm
  modified_base 20: mod_base = um
  modified_base 21: mod_base = um
  modified_base 21..22: mod_base = OTHER; note = S-phosphorothioate
  modified_base 22: mod_base = um
  modified_base 22..23: mod_base = OTHER; note = S-phosphorothioate
  modified_base 23: mod_base = um
  source 1..23: mol_type = other RNA
ttatagagcaagaacactgtttt

SEQ ID NO: 659 - RNA, 23 nt, synthetic construct
  misc_feature 1..23: note = Synthetic: WV-50113
  misc_feature 1..23: note = Synthetic: SSR-0104476
  modified_base 1: mod_base = um
  modified_base 1..2: mod_base = OTHER; note = S-phosphorothioate
  modified_base 2: mod_base = OTHER; note = 2-fluororibose uracil
  modified_base 2..3: mod_base = OTHER; note = R-phosphorothioate
  modified_base 3: mod_base = OTHER; note = 2-O-methylribose adenine
  modified_base 3..4: mod_base = OTHER; note S-N-(1,3-dimethylimidazolidin-2-ylidene)phosphoramidate
  modified_base 4: mod_base = OTHER; note = 2-fluororibose uracil
  modified_base 5: mod_base = OTHER; note = 2-O-methylribose adenine
  modified_base 6: mod_base = OTHER; note = 2-fluororibose guanine
  modified_base 7: mod_base = OTHER; note = 2-O-methylribose adenine
  modified_base 8: mod_base = gm
  modified_base 9: mod_base = cm
  modified_base 10: mod_base = OTHER; note = 2-O-methylribose adenine
  modified_base 10..11: mod_base = OTHER; note R-N-(1-docecyl-3-methylimidazolidin-2-ylidene)phosphoramida te
  modified_base 11: mod_base = OTHER; note = 2-fluororibose adenine
  modified_base 12: mod_base = gm
  modified_base 13: mod_base = OTHER; note = 2-O-methylribose adenine
  modified_base 14: mod_base = OTHER; note = 2-fluororibose adenine
  modified_base 15: mod_base = cm
  modified_base 16: mod_base = OTHER; note = 2-fluororibose adenine
  modified_base 17: mod_base = cm
  modified_base 18: mod_base = um
  modified_base 19: mod_base = gm
  modified_base 20: mod_base = um
  modified_base 21: mod_base = um
  modified_base 21..22: mod_base = OTHER; note = S-phosphorothioate
  modified_base 22: mod_base = um
  modified_base 22..23: mod_base = OTHER; note = S-phosphorothioate
  modified_base 23: mod_base = um
  source 1..23: mol_type = other RNA
ttatagagcaagaacactgtttt

SEQ ID NO: 660 - RNA, 23 nt, synthetic construct
  misc_feature 1..23: note = Synthetic: WV-50114
  misc_feature 1..23: note = Synthetic: SSR-0104477
  modified_base 1: mod_base = um
  modified_base 1..2: mod_base = OTHER; note = S-phosphorothioate
  modified_base 2: mod_base = OTHER; note = 2-fluororibose uracil
  modified_base 2..3: mod_base = OTHER; note = R-phosphorothioate
  modified_base 3: mod_base = OTHER; note = 2-O-methylribose adenine
  modified_base 3..4: mod_base = OTHER; note S-N-(1,3-dimethylimidazolidin-2-ylidene)phosphoramidate
  modified_base 4: mod_base = OTHER; note = 2-fluororibose uracil
  modified_base 5: mod_base = OTHER; note = 2-O-methylribose adenine
  modified_base 6: mod_base = OTHER; note = 2-fluororibose guanine
  modified_base 7: mod_base = OTHER; note = 2-O-methylribose adenine
  modified_base 8: mod_base = gm
  modified_base 9: mod_base = cm
  modified_base 10: mod_base = OTHER; note = 2-O-methylribose adenine
  modified_base 10..11: mod_base = OTHER; note S-N-(1-docecyl-3-methylimidazolidin-2-ylidene)phosphoramida te
  modified_base 11: mod_base = OTHER; note = 2-fluororibose adenine
  modified_base 12: mod_base = gm
  modified_base 13: mod_base = OTHER; note = 2-O-methylribose adenine
  modified_base 14: mod_base = OTHER; note = 2-fluororibose adenine
  modified_base 15: mod_base = cm
  modified_base 16: mod_base = OTHER; note = 2-fluororibose adenine
  modified_base 17: mod_base = cm
  modified_base 18: mod_base = um
  modified_base 19: mod_base = gm
  modified_base 20: mod_base = um
  modified_base 21: mod_base = um
  modified_base 21..22: mod_base = OTHER; note = S-phosphorothioate
  modified_base 22: mod_base = um
  modified_base 22..23: mod_base = OTHER; note = S-phosphorothioate
  modified_base 23: mod_base = um
  source 1..23: mol_type = other RNA
ttatagagcaagaacactgtttt

SEQ ID NO: 661 - RNA, 23 nt, synthetic construct
  misc_feature 1..23: note = Synthetic: WV-50115
  misc_feature 1..23: note = Synthetic: SSR-0104478
  modified_base 1: mod_base = um
  modified_base 1..2: mod_base = OTHER; note = S-phosphorothioate
  modified_base 2: mod_base = OTHER; note = 2-fluororibose uracil
  modified_base 2..3: mod_base = OTHER; note = R-phosphorothioate
  modified_base 3: mod_base = OTHER; note = 2-O-methylribose adenine
  modified_base 3..4: mod_base = OTHER; note S-N-(1,3-dimethylimidazolidin-2-ylidene)phosphoramidate
  modified_base 4: mod_base = OTHER; note = 2-fluororibose uracil
  modified_base 5: mod_base = OTHER; note = 2-O-methylribose adenine
  modified_base 6: mod_base = OTHER; note = 2-fluororibose guanine
  modified_base 7: mod_base = OTHER; note = 2-O-methylribose adenine
  modified_base 8: mod_base = gm
  modified_base 9: mod_base = cm
  modified_base 10: mod_base = OTHER; note = 2-O-methylribose adenine
  modified_base 10..11: mod_base = OTHER; note R-N-(1-hexadecyl-3-methylimidazolidin-2-ylidene)phosphorami date
  modified_base 11: mod_base = OTHER; note = 2-fluororibose adenine
  modified_base 12: mod_base = gm
  modified_base 13: mod_base = OTHER; note = 2-O-methylribose adenine
  modified_base 14: mod_base = OTHER; note = 2-fluororibose adenine
  modified_base 15: mod_base = cm
  modified_base 16: mod_base = OTHER; note = 2-fluororibose adenine
  modified_base 17: mod_base = cm
  modified_base 18: mod_base = um
  modified_base 19: mod_base = gm
  modified_base 20: mod_base = um
  modified_base 21: mod_base = um
  modified_base 21..22: mod_base = OTHER; note = S-phosphorothioate
  modified_base 22: mod_base = um
  modified_base 22..23: mod_base = OTHER; note = S-phosphorothioate
  modified_base 23: mod_base = um
  source 1..23: mol_type = other RNA
ttatagagcaagaacactgtttt

SEQ ID NO: 662 - RNA, 23 nt, synthetic construct
  misc_feature 1..23: note = Synthetic: WV-50116
  misc_feature 1..23: note = Synthetic: SSR-0104479
  modified_base 1: mod_base = um
  modified_base 1..2: mod_base = OTHER; note = S-phosphorothioate
  modified_base 2: mod_base = OTHER; note = 2-fluororibose uracil
  modified_base 2..3: mod_base = OTHER; note = R-phosphorothioate
  modified_base 3: mod_base = OTHER; note = 2-O-methylribose adenine
  modified_base 3..4: mod_base = OTHER; note S-N-(1,3-dimethylimidazolidin-2-ylidene)phosphoramidate
  modified_base 4: mod_base = OTHER; note = 2-fluororibose uracil
  modified_base 5: mod_base = OTHER; note = 2-O-methylribose adenine
  modified_base 6: mod_base = OTHER; note = 2-fluororibose guanine
  modified_base 7: mod_base = OTHER; note = 2-O-methylribose adenine
  modified_base 8: mod_base = gm
  modified_base 9: mod_base = cm
  modified_base 10: mod_base = OTHER; note = 2-O-methylribose adenine
  modified_base 10..11: mod_base = OTHER; note S-N-(1-hexadecyl-3-methylimidazolidin-2-ylidene)phosphorami date
  modified_base 11: mod_base = OTHER; note = 2-fluororibose adenine
  modified_base 12: mod_base = gm
  modified_base 13: mod_base = OTHER; note = 2-O-methylribose adenine
  modified_base 14: mod_base = OTHER; note = 2-fluororibose adenine
  modified_base 15: mod_base = cm
  modified_base 16: mod_base = OTHER; note = 2-fluororibose adenine
  modified_base 17: mod_base = cm
  modified_base 18: mod_base = um
  modified_base 19: mod_base = gm
  modified_base 20: mod_base = um
  modified_base 21: mod_base = um
  modified_base 21..22: mod_base = OTHER; note = S-phosphorothioate
  modified_base 22: mod_base = um
  modified_base 22..23: mod_base = OTHER; note = S-phosphorothioate
  modified_base 23: mod_base = um
  source 1..23: mol_type = other RNA
ttatagagcaagaacactgtttt

SEQ ID NO: 663 - RNA, 23 nt, synthetic construct
  misc_feature 1..23: note = Synthetic: WV-50481
  misc_feature 1..23: note = Synthetic: SSR-0104709
  modified_base 1: mod_base = um
  modified_base 1..2: mod_base = OTHER; note = phosphorothioate
  modified_base 2: mod_base = OTHER; note = 2-fluororibose uracil
  modified_base 2..3: mod_base = OTHER; note = phosphorothioate
  modified_base 3: mod_base = OTHER; note = 2-O-methylribose adenine
  modified_base 3..4: mod_base = OTHER; note = N-(1,3-dimethylimidazolidin-2-ylidene)phosphoramidate
  modified_base 4: mod_base = OTHER; note = 2-fluororibose uracil
  modified_base 5: mod_base = OTHER; note = 2-O-methylribose adenine
  modified_base 6: mod_base = OTHER; note = 2-fluororibose guanine
  modified_base 7: mod_base = OTHER; note = 2-O-methylribose adenine
  modified_base 8: mod_base = gm
  modified_base 9: mod_base = cm
  modified_base 10: mod_base = OTHER; note = 2-O-methylribose adenine
  modified_base 10..11: mod_base = OTHER; note = N-(1,3-dimethylimidazolidin-2-ylidene)phosphoramidate
  modified_base 11: mod_base = OTHER; note = 2-fluororibose adenine
  modified_base 12: mod_base = gm
  modified_base 13: mod_base = OTHER; note = 2-O-methylribose adenine
  modified_base 14: mod_base = OTHER; note = 2-fluororibose adenine
  modified_base 15: mod_base = cm
  modified_base 16: mod_base = OTHER; note = 2-fluororibose adenine
  modified_base 17: mod_base = cm
  modified_base 18: mod_base = um
  modified_base 19: mod_base = gm
  modified_base 19..20: mod_base = OTHER; note = N-(1,3-dimethylimidazolidin-2-ylidene)phosphoramidate
  modified_base 20: mod_base = OTHER; note = 2-fluororibose uracil
  modified_base 21: mod_base = um
  modified_base 21..22: mod_base = OTHER; note = phosphorothioate
  modified_base 22: mod_base = um
  modified_base 22..23: mod_base = OTHER; note = phosphorothioate
  modified_base 23: mod_base = um
  source 1..23: mol_type = other RNA
ttatagagcaagaacactgtttt

SEQ ID NO: 664 - RNA, 23 nt, synthetic construct
  misc_feature 1..23: note = Synthetic: WV-50482
  misc_feature 1..23: note = Synthetic: SSR-0104708
  modified_base 1: mod_base = um
  modified_base 1..2: mod_base = OTHER; note = phosphorothioate
  modified_base 2: mod_base = OTHER; note = 2-fluororibose uracil
  modified_base 2..3: mod_base = OTHER; note = phosphorothioate
  modified_base 3: mod_base = OTHER; note = 2-O-methylribose adenine
  modified_base 3..4: mod_base = OTHER; note = N-(1,3-dimethylimidazolidin-2-ylidene)phosphoramidate
  modified_base 4: mod_base = OTHER; note = 2-fluororibose uracil
  modified_base 5: mod_base = OTHER; note = 2-O-methylribose adenine
  modified_base 6: mod_base = OTHER; note = 2-fluororibose guanine
  modified_base 7: mod_base = OTHER; note = 2-O-methylribose adenine
  modified_base 8: mod_base = gm
  modified_base 9: mod_base = cm
  modified_base 10: mod_base = OTHER; note = 2-fluororibose adenine
  modified_base 10..11: mod_base = OTHER; note = N-(1,3-dimethylimidazolidin-2-ylidene)phosphoramidate
  modified_base 11: mod_base = OTHER; note = 2-O-methylribose adenine
  modified_base 12: mod_base = gm
  modified_base 13: mod_base = OTHER; note = 2-O-methylribose adenine
  modified_base 14: mod_base = OTHER; note = 2-fluororibose adenine
  modified_base 15: mod_base = cm
  modified_base 16: mod_base = OTHER; note = 2-fluororibose adenine
  modified_base 17: mod_base = cm
  modified_base 18: mod_base = um
  modified_base 19: mod_base = gm
  modified_base 19..20: mod_base = OTHER; note = N-(1,3-dimethylimidazolidin-2-ylidene)phosphoramidate
  modified_base 20: mod_base = OTHER; note = 2-fluororibose uracil
  modified_base 21: mod_base = um
  modified_base 21..22: mod_base = OTHER; note = phosphorothioate
  modified_base 22: mod_base = um
  modified_base 22..23: mod_base = OTHER; note = phosphorothioate
  modified_base 23: mod_base = um
  source 1..23: mol_type = other RNA
ttatagagcaagaacactgtttt

SEQ ID NO: 665 - RNA, 23 nt, synthetic construct
  misc_feature 1..23: note = Synthetic: WV-50485
  misc_feature 1..23: note = Synthetic: SSR-0104494
  modified_base 1: mod_base = um
  modified_base 1..2: mod_base = OTHER; note = S-phosphorothioate
  modified_base 2: mod_base = OTHER; note = 2-fluororibose uracil
  modified_base 2..3: mod_base = OTHER; note = R-phosphorothioate
  modified_base 3: mod_base = OTHER; note = 2-O-methylribose adenine
  modified_base 3..4: mod_base = OTHER; note = N-(1,3-dimethylimidazolidin-2-ylidene)phosphoramidate
  modified_base 4: mod_base = OTHER; note = 2-fluororibose uracil
  modified_base 5: mod_base = OTHER; note = 2-O-methylribose adenine
  modified_base 6: mod_base = OTHER; note = 2-fluororibose guanine
  modified_base 7: mod_base = OTHER; note = 2-O-methylribose adenine
  modified_base 8: mod_base = gm
  modified_base 9: mod_base = cm
  modified_base 10: mod_base = OTHER; note = 2-O-methylribose adenine
  modified_base 10..11: mod_base = OTHER; note = N-(1,3-dimethylimidazolidin-2-ylidene)phosphoramidate
  modified_base 11: mod_base = OTHER; note = 2-fluororibose adenine
  modified_base 12: mod_base = gm
  modified_base 13: mod_base = OTHER; note = 2-O-methylribose adenine
  modified_base 14: mod_base = OTHER; note = 2-fluororibose adenine
  modified_base 15: mod_base = cm
  modified_base 16: mod_base = OTHER; note = 2-fluororibose adenine
  modified_base 17: mod_base = cm
  modified_base 18: mod_base = um
  modified_base 19: mod_base = gm
  modified_base 19..20: mod_base = OTHER; note = N-(1,3-dimethylimidazolidin-2-ylidene)phosphoramidate
  modified_base 20: mod_base = OTHER; note = 2-fluororibose uracil
  modified_base 21: mod_base = um
  modified_base 21..22: mod_base = OTHER; note = S-phosphorothioate
  modified_base 22: mod_base = um
  modified_base 22..23: mod_base = OTHER; note = S-phosphorothioate
  modified_base 23: mod_base = um
  source 1..23: mol_type = other RNA
ttatagagcaagaacactgtttt

SEQ ID NO: 666 - RNA, 23 nt, synthetic construct
  misc_feature 1..23: note = Synthetic: WV-50486
  misc_feature 1..23: note = Synthetic: SSR-0104492
  modified_base 1: mod_base = um
  modified_base 1..2: mod_base = OTHER; note = S-phosphorothioate
  modified_base 2: mod_base = OTHER; note = 2-fluororibose uracil
  modified_base 2..3: mod_base = OTHER; note = R-phosphorothioate
  modified_base 3: mod_base = OTHER; note = 2-O-methylribose adenine
  modified_base 3..4: mod_base = OTHER; note = N-(1,3-dimethylimidazolidin-2-ylidene)phosphoramidate
  modified_base 4: mod_base = OTHER; note = 2-fluororibose uracil
  modified_base 5: mod_base = OTHER; note = 2-O-methylribose adenine
  modified_base 6: mod_base = OTHER; note = 2-fluororibose guanine
  modified_base 7: mod_base = OTHER; note = 2-O-methylribose adenine
  modified_base 8: mod_base = gm
  modified_base 9: mod_base = cm
  modified_base 10: mod_base = OTHER; note = 2-fluororibose adenine
  modified_base 10..11: mod_base = OTHER; note = N-(1,3-dimethylimidazolidin-2-ylidene)phosphoramidate
  modified_base 11: mod_base = OTHER; note = 2-O-methylribose adenine
  modified_base 12: mod_base = gm
  modified_base 13: mod_base = OTHER; note = 2-O-methylribose adenine
  modified_base 14: mod_base = OTHER; note = 2-fluororibose adenine
  modified_base 15: mod_base = cm
  modified_base 16: mod_base = OTHER; note = 2-fluororibose adenine
  modified_base 17: mod_base = cm
  modified_base 18: mod_base = um
  modified_base 19: mod_base = gm
  modified_base 19..20: mod_base = OTHER; note = N-(1,3-dimethylimidazolidin-2-ylidene)phosphoramidate
  modified_base 20: mod_base = OTHER; note = 2-fluororibose uracil
  modified_base 21: mod_base = um
  modified_base 21..22: mod_base = OTHER; note = S-phosphorothioate
  modified_base 22: mod_base = um
  modified_base 22..23: mod_base = OTHER; note = S-phosphorothioate
  modified_base 23: mod_base = um
  source 1..23: mol_type = other RNA
ttatagagcaagaacactgtttt

SEQ ID NO: 667 - RNA, 23 nt, synthetic construct
  misc_feature 1..23: note = Synthetic: WV-51122
  misc_feature 1..23: note = Synthetic: SSR-0105245
  modified_base 1: mod_base = um
  modified_base 1..2: mod_base = OTHER; note = S-phosphorothioate
  modified_base 2: mod_base = OTHER; note = 2-fluororibose uracil
  modified_base 2..3: mod_base = OTHER; note = R-phosphorothioate
  modified_base 3: mod_base = OTHER; note = 2-O-methylribose adenine
  modified_base 4: mod_base = OTHER; note = 2-fluororibose uracil
  modified_base 5: mod_base = OTHER; note = 2-O-methylribose adenine
  modified_base 6: mod_base = OTHER; note = 2-fluororibose guanine
  modified_base 7: mod_base = OTHER; note = 2-O-methylribose adenine
  modified_base 8: mod_base = gm
  modified_base 9: mod_base = cm
  modified_base 10: mod_base = OTHER; note = 2-O-methylribose adenine
  modified_base 11: mod_base = OTHER; note = 2-fluororibose adenine
  modified_base 12: mod_base = gm
  modified_base 13: mod_base = OTHER; note = 2-O-methylribose adenine
  modified_base 14: mod_base = OTHER; note = 2-fluororibose adenine
  modified_base 15: mod_base = cm
  modified_base 16: mod_base = OTHER; note = 2-fluororibose adenine
  modified_base 17: mod_base = cm
  modified_base 18: mod_base = um
  modified_base 19: mod_base = gm
  modified_base 20: mod_base = um
  modified_base 21: mod_base = um
  modified_base 21..22: mod_base = OTHER; note = S-phosphorothioate
  modified_base 22: mod_base = um
  modified_base 22..23: mod_base = OTHER; note = S-phosphorothioate
  modified_base 23: mod_base = um
  source 1..23: mol_type = other RNA
ttatagagcaagaacactgtttt

SEQ ID NO: 668 - RNA, 23 nt, synthetic construct
  misc_feature 1..23: note = Synthetic: WV-49903
  misc_feature 1..23: note = Synthetic: SSR-0105220
  modified_base 1: mod_base = um
  modified_base 1..2: mod_base = OTHER; note = phosphorothioate
  modified_base 2: mod_base = OTHER; note = 2-fluororibose cytosine
  modified_base 2..3: mod_base = OTHER; note = phosphorothioate
  modified_base 3: mod_base = cm
  modified_base 4: mod_base = um
  modified_base 5: mod_base = um
  modified_base 6: mod_base = OTHER; note = 2-fluororibose cytosine
  modified_base 7: mod_base = cm
  modified_base 8: mod_base = cm
  modified_base 9: mod_base = um
  modified_base 10: mod_base = gm
  modified_base 11: mod_base = OTHER; note = 2-O-methylribose adenine
  modified_base 12: mod_base = OTHER; note = 2-O-methylribose adenine
  modified_base 13: mod_base = gm
  modified_base 14: mod_base = OTHER; note = 2-fluororibose guanine
  modified_base 15: mod_base = um
  modified_base 16: mod_base = OTHER; note = 2-fluororibose uracil
  modified_base 17: mod_base = cm
  modified_base 18: mod_base = cm
  modified_base 19: mod_base = um
  modified_base 20: mod_base = cm
  modified_base 21: mod_base = cm
  modified_base 21..22: mod_base = OTHER; note = phosphorothioate
  modified_base 22: mod_base = um
  modified_base 22..23: mod_base = OTHER; note = phosphorothioate
  modified_base 23: mod_base = um
  source 1..23: mol_type = other RNA
tccttccctgaaggttcctcctt

SEQ ID NO: 669 - RNA, 21 nt, synthetic construct
  misc_feature 1..21: note = Synthetic: WV-49904
  misc_feature 1..21: note = Synthetic: SSR-0105238
  modified_base 1: mod_base = OTHER; note = triantennary GalNAc with C12 linker linked to 6-aminohexanol linked by phosphate to the 5' end of 2-O-methylribose guanine
  modified_base 1..2: mod_base = OTHER; note = phosphorothioate
  modified_base 2: mod_base = gm
  modified_base 3: mod_base = OTHER; note = 2-O-methylribose adenine
  modified_base 4: mod_base = gm
  modified_base 5: mod_base = gm
  modified_base 6: mod_base = OTHER; note = 2-O-methylribose adenine
  modified_base 7: mod_base = OTHER; note = 2-fluororibose adenine
  modified_base 8: mod_base = cm
  modified_base 9: mod_base = OTHER; note = 2-fluororibose cytosine
  modified_base 10: mod_base = OTHER; note = 2-fluororibose uracil
  modified_base 11: mod_base = OTHER; note = 2-fluororibose uracil
  modified_base 12: mod_base = cm
  modified_base 13: mod_base = OTHER; note = 2-O-methylribose adenine
  modified_base 14: mod_base = gm
  modified_base 15: mod_base = gm
  modified_base 16: mod_base = gm
  modified_base 17: mod_base = OTHER; note = 2-O-methylribose adenine
  modified_base 18: mod_base = OTHER; note = 2-O-methylribose adenine
  modified_base 19: mod_base = gm
  modified_base 20: mod_base = gm
  modified_base 20..21: mod_base = OTHER; note = phosphorothioate
  modified_base 21: mod_base = OTHER; note = 2-O-methylribose adenine
  source 1..21: mol_type = other RNA
ggaggaaccttcagggaagga

SEQ ID NO: 670 - RNA, 23 nt, synthetic construct
  misc_feature 1..23: note = Synthetic: SSR-0106307
  modified_base 1: mod_base = um
  modified_base 1..2: mod_base = OTHER; note = S-phosphorothioate
  modified_base 2: mod_base = OTHER; note = 2-fluororibose uracil
  modified_base 2..3: mod_base = OTHER; note = R-phosphorothioate
  modified_base 3: mod_base = OTHER; note = 2-O-methylribose adenine
  modified_base 3..4: mod_base = OTHER; note S-N-(1,3-dimethylimidazolidin-2-ylidene)phosphoramidate
  modified_base 4: mod_base = OTHER; note = 2-fluororibose uracil
  modified_base 5: mod_base = OTHER; note = 2-O-methylribose adenine
  modified_base 6: mod_base = OTHER; note = 2-fluororibose guanine
  modified_base 7: mod_base = OTHER; note = 2-O-methylribose adenine
  modified_base 8: mod_base = gm
  modified_base 9: mod_base = cm
  modified_base 10: mod_base = OTHER; note = 2-O-methylribose adenine
  modified_base 10..11: mod_base = OTHER; note S-N-(1,3-dimethylimidazolidin-2-ylidene)phosphoramidate
  modified_base 11: mod_base = OTHER; note = 2-fluororibose adenine
  modified_base 12: mod_base = gm
  modified_base 13: mod_base = OTHER; note = 2-O-methylribose adenine
  modified_base 14: mod_base = OTHER; note = 2-fluororibose adenine
  modified_base 15: mod_base = cm
  modified_base 16: mod_base = OTHER; note = 2-fluororibose adenine
  modified_base 17: mod_base = cm
  modified_base 18: mod_base = um
  modified_base 19: mod_base = gm
  modified_base 20: mod_base = um
  modified_base 20..21: mod_base = OTHER; note S-N-(1,3-dimethylimidazolidin-2-ylidene)phosphoramidate
  modified_base 21: mod_base = OTHER; note = 2-fluororibose uracil
  modified_base 21..22: mod_base = OTHER; note = S-phosphorothioate
  modified_base 22: mod_base = um
  modified_base 22..23: mod_base = OTHER; note = S-phosphorothioate
  modified_base 23: mod_base = um
  source 1..23: mol_type = other RNA
ttatagagcaagaacactgtttt

SEQ ID NO: 671 - RNA, 21 nt, synthetic construct
  misc_feature 1..21: note = Synthetic: WV-42427
  misc_feature 1..21: note = Synthetic: SSR-0101630
  modified_base 1: mod_base = OTHER; note = triantennary GalNAc with C12 linker linked to 6-aminohexanol linked by phosphate to the 5' end of 2-O-methylribose uracil
  modified_base 1..2: mod_base = OTHER; note = phosphorothioate
  modified_base 2: mod_base = gm
  modified_base 3: mod_base = gm
  modified_base 4: mod_base = um
  modified_base 5: mod_base = OTHER; note = 2-O-methylribose adenine
  modified_base 6: mod_base = um
  modified_base 7: mod_base = OTHER; note = 2-fluororibose cytosine
  modified_base 8: mod_base = OTHER; note = 2-O-methylribose adenine
  modified_base 9: mod_base = OTHER; note = 2-fluororibose adenine
  modified_base 10: mod_base = OTHER; note = 2-fluororibose adenine
  modified_base 11: mod_base = OTHER; note = 2-fluororibose adenine
  modified_base 12: mod_base = cm
  modified_base 13: mod_base = cm
  modified_base 14: mod_base = um
  modified_base 15: mod_base = cm
  modified_base 16: mod_base = OTHER; note = 2-O-methylribose adenine
  modified_base 17: mod_base = um
  modified_base 18: mod_base = gm
  modified_base 19: mod_base = um
  modified_base 20: mod_base = cm
  modified_base 20..21: mod_base = OTHER; note = phosphorothioate
  modified_base 21: mod_base = OTHER; note = 2-O-methylribose adenine
  source 1..21: mol_type = other RNA
tggtatcaaaacctcatgtca

SEQ ID NO: 672 - RNA, 21 nt, synthetic construct
  source 1..21: mol_type = other RNA
tggtatcaaaacctcatgtca

SEQ ID NO: 673 - RNA, 21 nt, synthetic construct
  misc_feature 1..21: note = Synthetic: WV-42589
  misc_feature 1..21: note = Synthetic: SSR-0101695
  modified_base 1: mod_base = OTHER; note = triantennary GalNAc with C12 linker linked to 6-aminohexanol linked by phosphate to the 5' end of 2-O-methylribose uracil
  modified_base 1..2: mod_base = OTHER; note = S-phosphorothioate
  modified_base 2: mod_base = gm
  modified_base 3: mod_base = gm
  modified_base 4: mod_base = um
  modified_base 5: mod_base = OTHER; note = 2-O-methylribose adenine
  modified_base 6: mod_base = um
  modified_base 7: mod_base = OTHER; note = 2-fluororibose cytosine
  modified_base 8: mod_base = OTHER; note = 2-O-methylribose adenine
  modified_base 9: mod_base = OTHER; note = 2-fluororibose adenine
  modified_base 10: mod_base = OTHER; note = 2-fluororibose adenine
  modified_base 11: mod_base = OTHER; note = 2-fluororibose adenine
  modified_base 12: mod_base = cm
  modified_base 13: mod_base = cm
  modified_base 14: mod_base = um
  modified_base 15: mod_base = cm
  modified_base 16: mod_base = OTHER; note = 2-O-methylribose adenine
  modified_base 17: mod_base = um
  modified_base 18: mod_base = gm
  modified_base 19: mod_base = um
  modified_base 20: mod_base = cm
  modified_base 20..21: mod_base = OTHER; note = S-phosphorothioate
  modified_base 21: mod_base = OTHER; note = 2-O-methylribose adenine
  source 1..21: mol_type = other RNA
tggtatcaaaacctcatgtca

SEQ ID NO: 674 - RNA, 23 nt, synthetic construct
  misc_feature 1..23: note = Synthetic: WV-49593
  misc_feature 1..23: note = Synthetic: SSR-0105101
  modified_base 1: mod_base = um
  modified_base 1..2: mod_base = OTHER; note = phosphorothioate
  modified_base 2: mod_base = OTHER; note = 2-fluororibose guanine
  modified_base 2..3: mod_base = OTHER; note = phosphorothioate
  modified_base 3: mod_base = OTHER; note = 2-O-methylribose adenine
  modified_base 4: mod_base = OTHER; note = 2-fluororibose cytosine
  modified_base 5: mod_base = OTHER; note = 2-O-methylribose adenine
  modified_base 6: mod_base = OTHER; note = 2-fluororibose uracil
  modified_base 7: mod_base = gm
  modified_base 8: mod_base = OTHER; note = 2-O-methylribose adenine
  modified_base 9: mod_base = gm
  modified_base 10: mod_base = gm
  modified_base 11: mod_base = OTHER; note = 2-fluororibose uracil
  modified_base 12: mod_base = um
  modified_base 13: mod_base = um
  modified_base 14: mod_base = OTHER; note = 2-fluororibose uracil
  modified_base 15: mod_base = gm
  modified_base 16: mod_base = OTHER; note = 2-fluororibose adenine
  modified_base 17: mod_base = um
  modified_base 18: mod_base = OTHER; note = 2-O-methylribose adenine
  modified_base 19: mod_base = cm
  modified_base 20: mod_base = cm
  modified_base 21: mod_base = OTHER; note = 2-O-methylribose adenine
  modified_base 21..22: mod_base = OTHER; note = phosphorothioate
  modified_base 22: mod_base = um
  modified_base 22..23: mod_base = OTHER; note = phosphorothioate
  modified_base 23: mod_base = um
  source 1..23: mol_type = other RNA
tgacatgaggttttgataccatt

SEQ ID NO: 675 - RNA, 23 nt, synthetic construct
  source 1..23: mol_type = other RNA
tgacatgaggttttgataccatt

SEQ ID NO: 676 - RNA, 23 nt, synthetic construct
  misc_feature 1..23: note = Synthetic: SSR-0106582
  modified_base 1: mod_base = um
  modified_base 1..2: mod_base = OTHER; note = S-phosphorothioate
  modified_base 2: mod_base = OTHER; note = 2-fluororibose uracil
  modified_base 2..3: mod_base = OTHER; note = R-phosphorothioate
  modified_base 3: mod_base = OTHER; note = 2-O-methylribose adenine
  modified_base 4: mod_base = OTHER; note = 2-fluororibose uracil
  modified_base 5: mod_base = OTHER; note = 2-O-methylribose adenine
  modified_base 6: mod_base = OTHER; note = 2-fluororibose guanine
  modified_base 7: mod_base = OTHER; note = 2-O-methylribose adenine
  modified_base 8: mod_base = gm
  modified_base 9: mod_base = cm
  modified_base 10: mod_base = OTHER; note = 2-O-methylribose adenine
  modified_base 11: mod_base = OTHER; note = 2-O-methylribose adenine
  modified_base 12: mod_base = gm
  modified_base 13: mod_base = OTHER; note = 2-O-methylribose adenine
  modified_base 14: mod_base = OTHER; note = 2-fluororibose adenine
  modified_base 15: mod_base = cm
  modified_base 16: mod_base = OTHER; note = 2-fluororibose adenine
  modified_base 17: mod_base = cm
  modified_base 18: mod_base = um
  modified_base 19: mod_base = gm
  modified_base 20: mod_base = um
  modified_base 21: mod_base = um
  modified_base 21..22: mod_base = OTHER; note = S-phosphorothioate
  modified_base 22: mod_base = um
  modified_base 22..23: mod_base = OTHER; note = S-phosphorothioate
  modified_base 23: mod_base = um
  source 1..23: mol_type = other RNA
ttatagagcaagaacactgtttt

SEQ ID NO: 677 - RNA, 21 nt, synthetic construct
  misc_feature 1..21: note = Synthetic: WV-48429
  misc_feature 1..21: note = Synthetic: SSR-0104021
  modified_base 1: mod_base = OTHER; note = 2-O-methylribose adenine
  modified_base 1..2: mod_base = OTHER; note = S-phosphorothioate
  modified_base 2: mod_base = gm
  modified_base 2..3: mod_base = OTHER; note = S-phosphorothioate
  modified_base 3: mod_base = OTHER; note = 2-fluororibose adenine
  modified_base 3..4: mod_base = OTHER; note = S-phosphorothioate
  modified_base 4: mod_base = um
  modified_base 4..5: mod_base = OTHER; note = S-phosphorothioate
  modified_base 5: mod_base = OTHER; note = 2-fluororibose guanine
  modified_base 5..6: mod_base = OTHER; note = S-phosphorothioate
  modified_base 6: mod_base = cm
  modified_base 6..7: mod_base = OTHER; note = S-phosphorothioate
  modified_base 7: mod_base = OTHER; note = 2-fluororibose cytosine
  modified_base 7..8: mod_base = OTHER; note R-N-(1,3-dimethylimidazolidin-2-ylidene)phosphoramidate
  modified_base 8: mod_base = um
  modified_base 9: mod_base = OTHER; note = 2-fluororibose guanine
  modified_base 10: mod_base = OTHER; note = 2-fluororibose adenine
  modified_base 11: mod_base = OTHER; note = 2-fluororibose adenine
  modified_base 12: mod_base = cm
  modified_base 13: mod_base = OTHER; note = 2-fluororibose uracil
  modified_base 14: mod_base = um
  modified_base 15: mod_base = OTHER; note = 2-fluororibose guanine
  modified_base 15..16: mod_base = OTHER; note R-N-(1,3-dimethylimidazolidin-2-ylidene)phosphoramidate
  modified_base 16: mod_base = OTHER; note = 2-O-methylribose adenine
  modified_base 16..17: mod_base = OTHER; note = S-phosphorothioate
  modified_base 17: mod_base = OTHER; note = 2-fluororibose adenine
  modified_base 17..18: mod_base = OTHER; note = S-phosphorothioate
  modified_base 18: mod_base = um
  modified_base 18..19: mod_base = OTHER; note = S-phosphorothioate
  modified_base 19: mod_base = OTHER; note = 2-fluororibose uracil
  modified_base 19..20: mod_base = OTHER; note = S-phosphorothioate
  modified_base 20: mod_base = OTHER; note = 2-O-methylribose adenine
  modified_base 20..21: mod_base = OTHER; note = S-phosphorothioate
  modified_base 21: mod_base = OTHER; note = 2-O-methylribose adenine
  source 1..21: mol_type = other RNA
agatgcctgaacttgaattaa

SEQ ID NO: 678 - RNA, 21 nt, synthetic construct
  source 1..21: mol_type = other RNA
agatgcctgaacttgaattaa

SEQ ID NO: 679 - RNA, 21 nt, synthetic construct
  misc_feature 1..21: note = Synthetic: WV-49628
  misc_feature 1..21: note = Synthetic: SSR-0104022
  modified_base 1: mod_base = OTHER; note = 2-O-methylribose adenine
  modified_base 1..2: mod_base = OTHER; note = S-phosphorothioate
  modified_base 2: mod_base = gm
  modified_base 2..3: mod_base = OTHER; note = S-phosphorothioate
  modified_base 3: mod_base = OTHER; note = 2-O-methylribose adenine
  modified_base 3..4: mod_base = OTHER; note = S-phosphorothioate
  modified_base 4: mod_base = um
  modified_base 4..5: mod_base = OTHER; note = S-phosphorothioate
  modified_base 5: mod_base = gm
  modified_base 5..6: mod_base = OTHER; note = S-phosphorothioate
  modified_base 6: mod_base = cm
  modified_base 6..7: mod_base = OTHER; note = S-phosphorothioate
  modified_base 7: mod_base = OTHER; note = 2-fluororibose cytosine
  modified_base 7..8: mod_base = OTHER; note R-N-(1,3-dimethylimidazolidin-2-ylidene)phosphoramidate
  modified_base 8: mod_base = um
  modified_base 9: mod_base = OTHER; note = 2-fluororibose guanine
  modified_base 10: mod_base = OTHER; note = 2-fluororibose adenine
  modified_base 11: mod_base = OTHER; note = 2-fluororibose adenine
  modified_base 12: mod_base = cm
  modified_base 13: mod_base = um
  modified_base 14: mod_base = um
  modified_base 15: mod_base = gm
  modified_base 15..16: mod_base = OTHER; note R-N-(1,3-dimethylimidazolidin-2-ylidene)phosphoramidate
  modified_base 16: mod_base = OTHER; note = 2-O-methylribose adenine
  modified_base 16..17: mod_base = OTHER; note = S-phosphorothioate
  modified_base 17: mod_base = OTHER; note = 2-O-methylribose adenine
  modified_base 17..18: mod_base = OTHER; note = S-phosphorothioate
  modified_base 18: mod_base = um
  modified_base 18..19: mod_base = OTHER; note = S-phosphorothioate
  modified_base 19: mod_base = um
  modified_base 19..20: mod_base = OTHER; note = S-phosphorothioate
  modified_base 20: mod_base = OTHER; note = 2-O-methylribose adenine
  modified_base 20..21: mod_base = OTHER; note = S-phosphorothioate
  modified_base 21: mod_base = OTHER; note = 2-O-methylribose adenine
  source 1..21: mol_type = other RNA
agatgcctgaacttgaattaa

SEQ ID NO: 680 - RNA, 21 nt, synthetic construct
  misc_feature 1..21: note = Synthetic: WV-50665
  misc_feature 1..21: note = Synthetic: SSR-0104024
  modified_base 1: mod_base = OTHER; note = 2-O-methylribose adenine
  modified_base 1..2: mod_base = OTHER; note = phosphorothioate
  modified_base 2: mod_base = gm
  modified_base 3: mod_base = OTHER; note = 2-fluororibose adenine
  modified_base 4: mod_base = um
  modified_base 5: mod_base = OTHER; note = 2-fluororibose guanine
  modified_base 6: mod_base = cm
  modified_base 7: mod_base = OTHER; note = 2-fluororibose cytosine
  modified_base 8: mod_base = um
  modified_base 9: mod_base = OTHER; note = 2-fluororibose guanine
  modified_base 10: mod_base = OTHER; note = 2-fluororibose adenine
  modified_base 11: mod_base = OTHER; note = 2-fluororibose adenine
  modified_base 12: mod_base = cm
  modified_base 13: mod_base = OTHER; note = 2-fluororibose uracil
  modified_base 14: mod_base = um
  modified_base 15: mod_base = OTHER; note = 2-fluororibose guanine
  modified_base 16: mod_base = OTHER; note = 2-O-methylribose adenine
  modified_base 17: mod_base = OTHER; note = 2-fluororibose adenine
  modified_base 18: mod_base = um
  modified_base 19: mod_base = OTHER; note = 2-fluororibose uracil
  modified_base 20: mod_base = OTHER; note = 2-O-methylribose adenine
  modified_base 20..21: mod_base = OTHER; note = phosphorothioate
  modified_base 21: mod_base = OTHER; note = 2-fluororibose adenine
  source 1..21: mol_type = other RNA
agatgcctgaacttgaattaa

SEQ ID NO: 681 - RNA, 21 nt, synthetic construct
  misc_feature 1..21: note = Synthetic: WV-50667
  misc_feature 1..21: note = Synthetic: SSR-0104025
  modified_base 1: mod_base = OTHER; note = 2-O-methylribose adenine
  modified_base 1..2: mod_base = OTHER; note = phosphorothioate
  modified_base 2: mod_base = gm
  modified_base 3: mod_base = OTHER; note = 2-O-methylribose adenine
  modified_base 4: mod_base = um
  modified_base 5: mod_base = gm
  modified_base 6: mod_base = cm
  modified_base 7: mod_base = OTHER; note = 2-fluororibose cytosine
  modified_base 8: mod_base = um
  modified_base 9: mod_base = OTHER; note = 2-fluororibose guanine
  modified_base 10: mod_base = OTHER; note = 2-fluororibose adenine
  modified_base 11: mod_base = OTHER; note = 2-fluororibose adenine
  modified_base 12: mod_base = cm
  modified_base 13: mod_base = um
  modified_base 14: mod_base = um
  modified_base 15: mod_base = gm
  modified_base 16: mod_base = OTHER; note = 2-O-methylribose adenine
  modified_base 17: mod_base = OTHER; note = 2-O-methylribose adenine
  modified_base 18: mod_base = um
  modified_base 19: mod_base = um
  modified_base 20: mod_base = OTHER; note = 2-O-methylribose adenine
  modified_base 20..21: mod_base = OTHER; note = phosphorothioate
  modified_base 21: mod_base = OTHER; note = 2-O-methylribose adenine
  source 1..21: mol_type = other RNA
agatgcctgaacttgaattaa

SEQ ID NO: 682 - RNA, 21 nt, synthetic construct
  misc_feature 1..21: note = Synthetic: WV-48435
  misc_feature 1..21: note = Synthetic: SSR-0104026
  modified_base 1: mod_base = cm
  modified_base 1..2: mod_base = OTHER; note = S-phosphorothioate
  modified_base 2: mod_base = um
  modified_base 2..3: mod_base = OTHER; note = S-phosphorothioate
  modified_base 3: mod_base = OTHER; note = 2-fluororibose guanine
  modified_base 3..4: mod_base = OTHER; note = S-phosphorothioate
  modified_base 4: mod_base = um
  modified_base 4..5: mod_base = OTHER; note = S-phosphorothioate
  modified_base 5: mod_base = OTHER; note = 2-fluororibose guanine
  modified_base 5..6: mod_base = OTHER; note = S-phosphorothioate
  modified_base 6: mod_base = cm
  modified_base 6..7: mod_base = OTHER; note = S-phosphorothioate
  modified_base 7: mod_base = OTHER; note = 2-fluororibose uracil
  modified_base 7..8: mod_base = OTHER; note R-N-(1,3-dimethylimidazolidin-2-ylidene)phosphoramidate
  modified_base 8: mod_base = gm
  modified_base 9: mod_base = OTHER; note = 2-fluororibose uracil
  modified_base 10: mod_base = OTHER; note = 2-fluororibose adenine
  modified_base 11: mod_base = OTHER; note = 2-fluororibose adenine
  modified_base 12: mod_base = cm
  modified_base 13: mod_base = OTHER; note = 2-fluororibose adenine
  modified_base 14: mod_base = cm
  modified_base 15: mod_base = OTHER; note = 2-fluororibose adenine
  modified_base 15..16: mod_base = OTHER; note R-N-(1,3-dimethylimidazolidin-2-ylidene)phosphoramidate
  modified_base 16: mod_base = OTHER; note = 2-O-methylribose adenine
  modified_base 16..17: mod_base = OTHER; note = S-phosphorothioate
  modified_base 17: mod_base = OTHER; note = 2-fluororibose guanine
  modified_base 17..18: mod_base = OTHER; note = S-phosphorothioate
  modified_base 18: mod_base = um
  modified_base 18..19: mod_base = OTHER; note = S-phosphorothioate
  modified_base 19: mod_base = OTHER; note = 2-fluororibose adenine
  modified_base 19..20: mod_base = OTHER; note = S-phosphorothioate
  modified_base 20: mod_base = gm
  modified_base 20..21: mod_base = OTHER; note = S-phosphorothioate
  modified_base 21: mod_base = OTHER; note = 2-O-methylribose adenine
  source 1..21: mol_type = other RNA
ctgtgctgtaacacaagtaga

SEQ ID NO: 683 - RNA, 21 nt, synthetic construct
  source 1..21: mol_type = other RNA
ctgtgctgtaacacaagtaga

SEQ ID NO: 684 - RNA, 21 nt, synthetic construct
  misc_feature 1..21: note = Synthetic: WV-49633
  misc_feature 1..21: note = Synthetic: SSR-0104027
  modified_base 1: mod_base = cm
  modified_base 1..2: mod_base = OTHER; note = S-phosphorothioate
  modified_base 2: mod_base = um
  modified_base 2..3: mod_base = OTHER; note = S-phosphorothioate
  modified_base 3: mod_base = gm
  modified_base 3..4: mod_base = OTHER; note = S-phosphorothioate
  modified_base 4: mod_base = um
  modified_base 4..5: mod_base = OTHER; note = S-phosphorothioate
  modified_base 5: mod_base = gm
  modified_base 5..6: mod_base = OTHER; note = S-phosphorothioate
  modified_base 6: mod_base = cm
  modified_base 6..7: mod_base = OTHER; note = S-phosphorothioate
  modified_base 7: mod_base = OTHER; note = 2-fluororibose uracil
  modified_base 7..8: mod_base = OTHER; note R-N-(1,3-dimethylimidazolidin-2-ylidene)phosphoramidate
  modified_base 8: mod_base = gm
  modified_base 9: mod_base = OTHER; note = 2-fluororibose uracil
  modified_base 10: mod_base = OTHER; note = 2-fluororibose adenine
  modified_base 11: mod_base = OTHER; note = 2-fluororibose adenine
  modified_base 12: mod_base = cm
  modified_base 13: mod_base = OTHER; note = 2-O-methylribose adenine
  modified_base 14: mod_base = cm
  modified_base 15: mod_base = OTHER; note = 2-O-methylribose adenine
  modified_base 15..16: mod_base = OTHER; note R-N-(1,3-dimethylimidazolidin-2-ylidene)phosphoramidate
  modified_base 16: mod_base = OTHER; note = 2-O-methylribose adenine
  modified_base 16..17: mod_base = OTHER; note = S-phosphorothioate
  modified_base 17: mod_base = gm
  modified_base 17..18: mod_base = OTHER; note = S-phosphorothioate
  modified_base 18: mod_base = um
  modified_base 18..19: mod_base = OTHER; note = S-phosphorothioate
  modified_base 19: mod_base = OTHER; note = 2-O-methylribose adenine
  modified_base 19..20: mod_base = OTHER; note = S-phosphorothioate
  modified_base 20: mod_base = gm
  modified_base 20..21: mod_base = OTHER; note = S-phosphorothioate
  modified_base 21: mod_base = OTHER; note = 2-O-methylribose adenine
  source 1..21: mol_type = other RNA
ctgtgctgtaacacaagtaga

SEQ ID NO: 685 - RNA, 21 nt, synthetic construct
  misc_feature 1..21: note = Synthetic: WV-50669
  misc_feature 1..21: note = Synthetic: SSR-0104028
  modified_base 1: mod_base = cm
  modified_base 1..2: mod_base = OTHER; note = phosphorothioate
  modified_base 2: mod_base = um
  modified_base 3: mod_base = OTHER; note = 2-fluororibose guanine
  modified_base 4: mod_base = um
  modified_base 5: mod_base = OTHER; note = 2-fluororibose guanine
  modified_base 6: mod_base = cm
  modified_base 7: mod_base = OTHER; note = 2-fluororibose uracil
  modified_base 8: mod_base = gm
  modified_base 9: mod_base = OTHER; note = 2-fluororibose uracil
  modified_base 10: mod_base = OTHER; note = 2-fluororibose adenine
  modified_base 11: mod_base = OTHER; note = 2-fluororibose adenine
  modified_base 12: mod_base = cm
  modified_base 13: mod_base = OTHER; note = 2-fluororibose adenine
  modified_base 14: mod_base = cm
  modified_base 15: mod_base = OTHER; note = 2-fluororibose adenine
  modified_base 16: mod_base = OTHER; note = 2-O-methylribose adenine
  modified_base 17: mod_base = OTHER; note = 2-fluororibose guanine
  modified_base 18: mod_base = um
  modified_base 19: mod_base = OTHER; note = 2-fluororibose adenine
  modified_base 20: mod_base = gm
  modified_base 20..21: mod_base = OTHER; note = phosphorothioate
  modified_base 21: mod_base = OTHER; note = 2-fluororibose adenine
  source 1..21: mol_type = other RNA
ctgtgctgtaacacaagtaga

SEQ ID NO: 686 - RNA, 21 nt, synthetic construct
  misc_feature 1..21: note = Synthetic: WV-50671
  misc_feature 1..21: note = Synthetic: SSR-0104029
  modified_base 1: mod_base = cm
  modified_base 1..2: mod_base = OTHER; note = phosphorothioate
  modified_base 2: mod_base = um
  modified_base 3: mod_base = gm
  modified_base 4: mod_base = um
  modified_base 5: mod_base = gm
  modified_base 6: mod_base = cm
  modified_base 7: mod_base = OTHER; note = 2-fluororibose uracil
  modified_base 8: mod_base = gm
  modified_base 9: mod_base = OTHER; note = 2-fluororibose uracil
  modified_base 10: mod_base = OTHER; note = 2-fluororibose adenine
  modified_base 11: mod_base = OTHER; note = 2-fluororibose adenine
  modified_base 12: mod_base = cm
  modified_base 13: mod_base = OTHER; note = 2-O-methylribose adenine
  modified_base 14: mod_base = cm
  modified_base 15: mod_base = OTHER; note = 2-O-methylribose adenine
  modified_base 16: mod_base = OTHER; note = 2-O-methylribose adenine
  modified_base 17: mod_base = gm
  modified_base 18: mod_base = um
  modified_base 19: mod_base = OTHER; note = 2-O-methylribose adenine
  modified_base 20: mod_base = gm
  modified_base 20..21: mod_base = OTHER; note = phosphorothioate
  modified_base 21: mod_base = OTHER; note = 2-O-methylribose adenine
  source 1..21: mol_type = other RNA
ctgtgctgtaacacaagtaga

SEQ ID NO: 687 - RNA, 21 nt, synthetic construct
  misc_feature 1..21: note = Synthetic: WV-48438
  misc_feature 1..21: note = Synthetic: SSR-0104030
  modified_base 1: mod_base = gm
  modified_base 1..2: mod_base = OTHER; note = S-phosphorothioate
  modified_base 2: mod_base = gm
  modified_base 2..3: mod_base = OTHER; note = S-phosphorothioate
  modified_base 3: mod_base = OTHER; note = 2-fluororibose adenine
  modified_base 3..4: mod_base = OTHER; note = S-phosphorothioate
  modified_base 4: mod_base = um
  modified_base 4..5: mod_base = OTHER; note = S-phosphorothioate
  modified_base 5: mod_base = OTHER; note = 2-fluororibose guanine
  modified_base 5..6: mod_base = OTHER; note = S-phosphorothioate
  modified_base 6: mod_base = OTHER; note = 2-O-methylribose adenine
  modified_base 6..7: mod_base = OTHER; note = S-phosphorothioate
  modified_base 7: mod_base = OTHER; note = 2-fluororibose uracil
  modified_base 7..8: mod_base = OTHER; note R-N-(1,3-dimethylimidazolidin-2-ylidene)phosphoramidate
  modified_base 8: mod_base = um
  modified_base 9: mod_base = OTHER; note = 2-fluororibose guanine
  modified_base 10: mod_base = OTHER; note = 2-fluororibose uracil
  modified_base 11: mod_base = OTHER; note = 2-fluororibose adenine
  modified_base 12: mod_base = cm
  modified_base 13: mod_base = OTHER; note = 2-fluororibose adenine
  modified_base 14: mod_base = gm
  modified_base 15: mod_base = OTHER; note = 2-fluororibose adenine
  modified_base 15..16: mod_base = OTHER; note R-N-(1,3-dimethylimidazolidin-2-ylidene)phosphoramidate
  modified_base 16: mod_base = OTHER; note = 2-O-methylribose adenine
  modified_base 16..17: mod_base = OTHER; note = S-phosphorothioate
  modified_base 17: mod_base = OTHER; note = 2-fluororibose uracil
  modified_base 17..18: mod_base = OTHER; note = S-phosphorothioate
  modified_base 18: mod_base = cm
  modified_base 18..19: mod_base = OTHER; note = S-phosphorothioate
  modified_base 19: mod_base = OTHER; note = 2-fluororibose adenine
  modified_base 19..20: mod_base = OTHER; note = S-phosphorothioate
  modified_base 20: mod_base = um
  modified_base 20..21: mod_base = OTHER; note = S-phosphorothioate
  modified_base 21: mod_base = OTHER; note = 2-O-methylribose adenine
  source 1..21: mol_type = other RNA
ggatgattgtacagaatcata

SEQ ID NO: 688 - RNA, 21 nt, synthetic construct
  source 1..21: mol_type = other RNA
ggatgattgtacagaatcata

SEQ ID NO: 689 - RNA, 23 nt, synthetic construct
  misc_feature 1..23: note = Synthetic: WV-48433
  misc_feature 1..23: note = Synthetic: SSR-0104031
  modified_base 1: mod_base = um
  modified_base 1..2: mod_base = OTHER; note = R-phosphorothioate
  modified_base 2: mod_base = OTHER; note = 2-fluororibose adenine
  modified_base 2..3: mod_base = OTHER; note = S-phosphorothioate
  modified_base 3: mod_base = OTHER; note = 2-O-methylribose adenine
  modified_base 3..4: mod_base = OTHER; note S-N-(1,3-dimethylimidazolidin-2-ylidene)phosphoramidate
  modified_base 4: mod_base = OTHER; note = 2-fluororibose adenine
  modified_base 5: mod_base = um
  modified_base 6: mod_base = OTHER; note = 2-fluororibose guanine
  modified_base 7: mod_base = cm
  modified_base 7..8: mod_base = OTHER; note S-N-(1,3-dimethylimidazolidin-2-ylidene)phosphoramidate
  modified_base 8: mod_base = OTHER; note = 2-fluororibose adenine
  modified_base 9: mod_base = um
  modified_base 10: mod_base = OTHER; note = 2-fluororibose adenine
  modified_base 11: mod_base = gm
  modified_base 12: mod_base = um
  modified_base 13: mod_base = gm
  modified_base 13..14: mod_base = OTHER; note = S-phosphorothioate
  modified_base 14: mod_base = OTHER; note = 2-fluororibose adenine
  modified_base 14..15: mod_base = OTHER; note = S-phosphorothioate
  modified_base 15: mod_base = um
  modified_base 15..16: mod_base = OTHER; note = S-phosphorothioate
  modified_base 16: mod_base = OTHER; note = 2-fluororibose cytosine
  modified_base 16..17: mod_base = OTHER; note = S-phosphorothioate
  modified_base 17: mod_base = OTHER; note = 2-O-methylribose adenine
  modified_base 17..18: mod_base = OTHER; note = S-phosphorothioate
  modified_base 18: mod_base = OTHER; note = 2-fluororibose guanine
  modified_base 18..19: mod_base = OTHER; note S-N-(1,3-dimethylimidazolidin-2-ylidene)phosphoramidate
  modified_base 19: mod_base = gm
  modified_base 19..20: mod_base = OTHER; note = S-phosphorothioate
  modified_base 20: mod_base = OTHER; note = 2-fluororibose adenine
  modified_base 20..21: mod_base = OTHER; note = S-phosphorothioate
  modified_base 21: mod_base = OTHER; note = 2-O-methylribose adenine
  modified_base 21..22: mod_base = OTHER; note = S-phosphorothioate
  modified_base 22: mod_base = um
  modified_base 22..23: mod_base = OTHER; note = S-phosphorothioate
  modified_base 23: mod_base = um
  source 1..23: mol_type = other RNA
taaatgcatagtgatcaggaatt

SEQ ID NO: 690 - RNA, 23 nt, synthetic construct
  source 1..23: mol_type = other RNA
taaatgcatagtgatcaggaatt

SEQ ID NO: 691 - RNA, 23 nt, synthetic construct
  misc_feature 1..23: note = Synthetic: WV-48439
  misc_feature 1..23: note = Synthetic: SSR-0104035
  modified_base 1: mod_base = um
  modified_base 1..2: mod_base = OTHER; note = R-phosphorothioate
  modified_base 2: mod_base = OTHER; note = 2-fluororibose adenine
  modified_base 2..3: mod_base = OTHER; note = S-phosphorothioate
  modified_base 3: mod_base = um
  modified_base 3..4: mod_base = OTHER; note S-N-(1,3-dimethylimidazolidin-2-ylidene)phosphoramidate
  modified_base 4: mod_base = OTHER; note = 2-fluororibose guanine
  modified_base 5: mod_base = OTHER; note = 2-O-methylribose adenine
  modified_base 6: mod_base = OTHER; note = 2-fluororibose uracil
  modified_base 7: mod_base = um
  modified_base 7..8: mod_base = OTHER; note S-N-(1,3-dimethylimidazolidin-2-ylidene)phosphoramidate
  modified_base 8: mod_base = OTHER; note = 2-fluororibose cytosine
  modified_base 9: mod_base = um
  modified_base 10: mod_base = OTHER; note = 2-fluororibose guanine
  modified_base 11: mod_base = um
  modified_base 12: mod_base = OTHER; note = 2-O-methylribose adenine
  modified_base 13: mod_base = cm
  modified_base 13..14: mod_base = OTHER; note = S-phosphorothioate
  modified_base 14: mod_base = OTHER; note = 2-fluororibose adenine
  modified_base 14..15: mod_base = OTHER; note = S-phosphorothioate
  modified_base 15: mod_base = OTHER; note = 2-O-methylribose adenine
  modified_base 15..16: mod_base = OTHER; note = S-phosphorothioate
  modified_base 16: mod_base = OTHER; note = 2-fluororibose uracil
  modified_base 16..17: mod_base = OTHER; note = S-phosphorothioate
  modified_base 17: mod_base = cm
  modified_base 17..18: mod_base = OTHER; note = S-phosphorothioate
  modified_base 18: mod_base = OTHER; note = 2-fluororibose adenine
  modified_base 18..19: mod_base = OTHER; note S-N-(1,3-dimethylimidazolidin-2-ylidene)phosphoramidate
  modified_base 19: mod_base = um
  modified_base 19..20: mod_base = OTHER; note = S-phosphorothioate
  modified_base 20: mod_base = OTHER; note = 2-fluororibose cytosine
  modified_base 20..21: mod_base = OTHER; note = S-phosphorothioate
  modified_base 21: mod_base = cm
  modified_base 21..22: mod_base = OTHER; note = S-phosphorothioate
  modified_base 22: mod_base = um
  modified_base 22..23: mod_base = OTHER; note = S-phosphorothioate
  modified_base 23: mod_base = um
  source 1..23: mol_type = other RNA
tatgattctgtacaatcatcctt

SEQ ID NO: 692 - RNA, 23 nt, synthetic construct
  source 1..23: mol_type = other RNA
tatgattctgtacaatcatcctt

SEQ ID NO: 693 - RNA, 23 nt, synthetic construct
  misc_feature 1..23: note = Synthetic: WV-48427
  misc_feature 1..23: note = Synthetic: SSR-0104036
  modified_base 1: mod_base = um
  modified_base 1..2: mod_base = OTHER; note = R-phosphorothioate
  modified_base 2: mod_base = OTHER; note = 2-fluororibose cytosine
  modified_base 2..3: mod_base = OTHER; note = S-phosphorothioate
  modified_base 3: mod_base = OTHER; note = 2-O-methylribose adenine
  modified_base 3..4: mod_base = OTHER; note S-N-(1,3-dimethylimidazolidin-2-ylidene)phosphoramidate
  modified_base 4: mod_base = OTHER; note = 2-fluororibose uracil
  modified_base 5: mod_base = gm
  modified_base 6: mod_base = OTHER; note = 2-fluororibose uracil
  modified_base 7: mod_base = um
  modified_base 7..8: mod_base = OTHER; note S-N-(1,3-dimethylimidazolidin-2-ylidene)phosphoramidate
  modified_base 8: mod_base = OTHER; note = 2-fluororibose guanine
  modified_base 9: mod_base = OTHER; note = 2-O-methylribose adenine
  modified_base 10: mod_base = OTHER; note = 2-fluororibose guanine
  modified_base 11: mod_base = um
  modified_base 12: mod_base = um
  modified_base 13: mod_base = um
  modified_base 13..14: mod_base = OTHER; note = S-phosphorothioate
  modified_base 14: mod_base = OTHER; note = 2-fluororibose adenine
  modified_base 14..15: mod_base = OTHER; note = S-phosphorothioate
  modified_base 15: mod_base = cm
  modified_base 15..16: mod_base = OTHER; note = S-phosphorothioate
  modified_base 16: mod_base = OTHER; note = 2-fluororibose cytosine
  modified_base 16..17: mod_base = OTHER; note = S-phosphorothioate
  modified_base 17: mod_base = OTHER; note = 2-O-methylribose adenine
  modified_base 17..18: mod_base = OTHER; note = S-phosphorothioate
  modified_base 18: mod_base = OTHER; note = 2-fluororibose cytosine
  modified_base 18..19: mod_base = OTHER; note S-N-(1,3-dimethylimidazolidin-2-ylidene)phosphoramidate
  modified_base 19: mod_base = OTHER; note = 2-O-methylribose adenine
  modified_base 19..20: mod_base = OTHER; note = S-phosphorothioate
  modified_base 20: mod_base = OTHER; note = 2-fluororibose guanine
  modified_base 20..21: mod_base = OTHER; note = S-phosphorothioate
  modified_base 21: mod_base = OTHER; note = 2-O-methylribose adenine
  modified_base 21..22: mod_base = OTHER; note = S-phosphorothioate
  modified_base 22: mod_base = um
  modified_base 22..23: mod_base = OTHER; note = S-phosphorothioate
  modified_base 23: mod_base = um
  source 1..23: mol_type = other RNA
tcatgttgagtttaccacagatt

SEQ ID NO: 694 - RNA, 23 nt, synthetic construct
  source 1..23: mol_type = other RNA
tcatgttgagtttaccacagatt

SEQ ID NO: 695 - RNA, 23 nt, synthetic construct
  misc_feature 1..23: note = Synthetic: WV-48436
  misc_feature 1..23: note = Synthetic: SSR-0104037
  modified_base 1: mod_base = um
  modified_base 1..2: mod_base = OTHER; note = R-phosphorothioate
  modified_base 2: mod_base = OTHER; note = 2-fluororibose cytosine
  modified_base 2..3: mod_base = OTHER; note = S-phosphorothioate
  modified_base 3: mod_base = um
  modified_base 3..4: mod_base = OTHER; note S-N-(1,3-dimethylimidazolidin-2-ylidene)phosphoramidate
  modified_base 4: mod_base = OTHER; note = 2-fluororibose adenine
  modified_base 5: mod_base = cm
  modified_base 6: mod_base = OTHER; note = 2-fluororibose uracil
  modified_base 7: mod_base = um
  modified_base 7..8: mod_base = OTHER; note S-N-(1,3-dimethylimidazolidin-2-ylidene)phosphoramidate
  modified_base 8: mod_base = OTHER; note = 2-fluororibose guanine
  modified_base 9: mod_base = um
  modified_base 10: mod_base = OTHER; note = 2-fluororibose guanine
  modified_base 11: mod_base = um
  modified_base 12: mod_base = um
  modified_base 13: mod_base = OTHER; note = 2-O-methylribose adenine
  modified_base 13..14: mod_base = OTHER; note = S-phosphorothioate
  modified_base 14: mod_base = OTHER; note = 2-fluororibose cytosine
  modified_base 14..15: mod_base = OTHER; note = S-phosphorothioate
  modified_base 15: mod_base = OTHER; note = 2-O-methylribose adenine
  modified_base 15..16: mod_base = OTHER; note = S-phosphorothioate
  modified_base 16: mod_base = OTHER; note = 2-fluororibose guanine
  modified_base 16..17: mod_base = OTHER; note = S-phosphorothioate
  modified_base 17: mod_base = cm
  modified_base 17..18: mod_base = OTHER; note = S-phosphorothioate
  modified_base 18: mod_base = OTHER; note = 2-fluororibose adenine
  modified_base 18..19: mod_base = OTHER; note S-N-(1,3-dimethylimidazolidin-2-ylidene)phosphoramidate
  modified_base 19: mod_base = cm
  modified_base 19..20: mod_base = OTHER; note = S-phosphorothioate
  modified_base 20: mod_base = OTHER; note = 2-fluororibose adenine
  modified_base 20..21: mod_base = OTHER; note = S-phosphorothioate
  modified_base 21: mod_base = gm
  modified_base 21..22: mod_base = OTHER; note = S-phosphorothioate
  modified_base 22: mod_base = um
  modified_base 22..23: mod_base = OTHER; note = S-phosphorothioate
  modified_base 23: mod_base = um
  source 1..23: mol_type = other RNA
tctacttgtgttacagcacagtt

SEQ ID NO: 696 - RNA, 23 nt, synthetic construct
  source 1..23: mol_type = other RNA
tctacttgtgttacagcacagtt

SEQ ID NO: 697 - RNA, 23 nt, synthetic construct
  misc_feature 1..23: note = Synthetic: WV-49636
  misc_feature 1..23: note = Synthetic: SSR-0104038
  modified_base 1: mod_base = um
  modified_base 1..2: mod_base = OTHER; note = R-phosphorothioate
  modified_base 2: mod_base = OTHER; note = 2-fluororibose cytosine
  modified_base 2..3: mod_base = OTHER; note = S-phosphorothioate
  modified_base 3: mod_base = um
  modified_base 3..4: mod_base = OTHER; note S-N-(1,3-dimethylimidazolidin-2-ylidene)phosphoramidate
  modified_base 4: mod_base = OTHER; note = 2-fluororibose adenine
  modified_base 5: mod_base = cm
  modified_base 6: mod_base = OTHER; note = 2-fluororibose uracil
  modified_base 7: mod_base = um
  modified_base 8: mod_base = gm
  modified_base 9: mod_base = um
  modified_base 10: mod_base = gm
  modified_base 10..11: mod_base = OTHER; note R-N-(1,3-dimethylimidazolidin-2-ylidene)phosphoramidate
  modified_base 11: mod_base = OTHER; note = 2-fluororibose uracil
  modified_base 12: mod_base = um
  modified_base 13: mod_base = OTHER; note = 2-O-methylribose adenine
  modified_base 13..14: mod_base = OTHER; note = S-phosphorothioate
  modified_base 14: mod_base = OTHER; note = 2-fluororibose cytosine
  modified_base 14..15: mod_base = OTHER; note = S-phosphorothioate
  modified_base 15: mod_base = OTHER; note = 2-O-methylribose adenine
  modified_base 15..16: mod_base = OTHER; note = S-phosphorothioate
  modified_base 16: mod_base = OTHER; note = 2-fluororibose guanine
  modified_base 16..17: mod_base = OTHER; note = S-phosphorothioate
  modified_base 17: mod_base = cm
  modified_base 17..18: mod_base = OTHER; note = S-phosphorothioate
  modified_base 18: mod_base = OTHER; note = 2-O-methylribose adenine
  modified_base 18..19: mod_base = OTHER; note = S-phosphorothioate
  modified_base 19: mod_base = cm
  modified_base 19..20: mod_base = OTHER; note = S-phosphorothioate
  modified_base 20: mod_base = OTHER; note = 2-O-methylribose adenine
  modified_base 20..21: mod_base = OTHER; note = S-phosphorothioate
  modified_base 21: mod_base = gm
  modified_base 21..22: mod_base = OTHER; note = S-phosphorothioate
  modified_base 22: mod_base = um
  modified_base 22..23: mod_base = OTHER; note = S-phosphorothioate
  modified_base 23: mod_base = um
  source 1..23: mol_type = other RNA
tctacttgtgttacagcacagtt

SEQ ID NO: 698 - RNA, 23 nt, synthetic construct
  misc_feature 1..23: note = Synthetic: WV-49634
  misc_feature 1..23: note = Synthetic: SSR-0104039
  modified_base 1: mod_base = um
  modified_base 1..2: mod_base = OTHER; note = R-phosphorothioate
  modified_base 2: mod_base = OTHER; note = 2-fluororibose cytosine
  modified_base 2..3: mod_base = OTHER; note = S-phosphorothioate
  modified_base 3: mod_base = um
  modified_base 3..4: mod_base = OTHER; note S-N-(1,3-dimethylimidazolidin-2-ylidene)phosphoramidate
  modified_base 4: mod_base = OTHER; note = 2-fluororibose adenine
  modified_base 5: mod_base = cm
  modified_base 6: mod_base = OTHER; note = 2-fluororibose uracil
  modified_base 7: mod_base = um
  modified_base 8: mod_base = gm
  modified_base 9: mod_base = um
  modified_base 10: mod_base = gm
  modified_base 10..11: mod_base = OTHER; note S-N-(1,3-dimethylimidazolidin-2-ylidene)phosphoramidate
  modified_base 11: mod_base = OTHER; note = 2-fluororibose uracil
  modified_base 12: mod_base = um
  modified_base 13: mod_base = OTHER; note = 2-O-methylribose adenine
  modified_base 13..14: mod_base = OTHER; note = S-phosphorothioate
  modified_base 14: mod_base = OTHER; note = 2-fluororibose cytosine
  modified_base 14..15: mod_base = OTHER; note = S-phosphorothioate
  modified_base 15: mod_base = OTHER; note = 2-O-methylribose adenine
  modified_base 15..16: mod_base = OTHER; note = S-phosphorothioate
  modified_base 16: mod_base = OTHER; note = 2-fluororibose guanine
  modified_base 16..17: mod_base = OTHER; note = S-phosphorothioate
  modified_base 17: mod_base = cm
  modified_base 17..18: mod_base = OTHER; note = S-phosphorothioate
  modified_base 18: mod_base = OTHER; note = 2-O-methylribose adenine
  modified_base 18..19: mod_base = OTHER; note = S-phosphorothioate
  modified_base 19: mod_base = cm
  modified_base 19..20: mod_base = OTHER; note = S-phosphorothioate
  modified_base 20: mod_base = OTHER; note = 2-O-methylribose adenine
  modified_base 20..21: mod_base = OTHER; note = S-phosphorothioate
  modified_base 21: mod_base = gm
  modified_base 21..22: mod_base = OTHER; note = S-phosphorothioate
  modified_base 22: mod_base = um
  modified_base 22..23: mod_base = OTHER; note = S-phosphorothioate
  modified_base 23: mod_base = um
  source 1..23: mol_type = other RNA
tctacttgtgttacagcacagtt

SEQ ID NO: 699 - RNA, 23 nt, synthetic construct
  misc_feature 1..23: note = Synthetic: WV-48442
  misc_feature 1..23: note = Synthetic: SSR-0104043
  modified_base 1: mod_base = um
  modified_base 1..2: mod_base = OTHER; note = R-phosphorothioate
  modified_base 2: mod_base = OTHER; note = 2-fluororibose guanine
  modified_base 2..3: mod_base = OTHER; note = S-phosphorothioate
  modified_base 3: mod_base = OTHER; note = 2-O-methylribose adenine
  modified_base 3..4: mod_base = OTHER; note S-N-(1,3-dimethylimidazolidin-2-ylidene)phosphoramidate
  modified_base 4: mod_base = OTHER; note = 2-fluororibose guanine
  modified_base 5: mod_base = OTHER; note = 2-O-methylribose adenine
  modified_base 6: mod_base = OTHER; note = 2-fluororibose adenine
  modified_base 7: mod_base = um
  modified_base 7..8: mod_base = OTHER; note S-N-(1,3-dimethylimidazolidin-2-ylidene)phosphoramidate
  modified_base 8: mod_base = OTHER; note = 2-fluororibose cytosine
  modified_base 9: mod_base = um
  modified_base 10: mod_base = OTHER; note = 2-fluororibose adenine
  modified_base 11: mod_base = um
  modified_base 12: mod_base = um
  modified_base 13: mod_base = cm
  modified_base 13..14: mod_base = OTHER; note = S-phosphorothioate
  modified_base 14: mod_base = OTHER; note = 2-fluororibose adenine
  modified_base 14..15: mod_base = OTHER; note = S-phosphorothioate
  modified_base 15: mod_base = um
  modified_base 15..16: mod_base = OTHER; note = S-phosphorothioate
  modified_base 16: mod_base = OTHER; note = 2-fluororibose guanine
  modified_base 16..17: mod_base = OTHER; note = S-phosphorothioate
  modified_base 17: mod_base = cm
  modified_base 17..18: mod_base = OTHER; note = S-phosphorothioate
  modified_base 18: mod_base = OTHER; note = 2-fluororibose adenine
  modified_base 18..19: mod_base = OTHER; note S-N-(1,3-dimethylimidazolidin-2-ylidene)phosphoramidate
  modified_base 19: mod_base = cm
  modified_base 19..20: mod_base = OTHER; note = S-phosphorothioate
  modified_base 20: mod_base = OTHER; note = 2-fluororibose uracil
  modified_base 20..21: mod_base = OTHER; note = S-phosphorothioate
  modified_base 21: mod_base = OTHER; note = 2-O-methylribose adenine
  modified_base 21..22: mod_base = OTHER; note = S-phosphorothioate
  modified_base 22: mod_base = um
  modified_base 22..23: mod_base = OTHER; note = S-phosphorothioate
  modified_base 23: mod_base = um
  source 1..23: mol_type = other RNA
tgagaatctattcatgcactatt

SEQ ID NO: 700 - RNA, 23 nt, synthetic construct
  source 1..23: mol_type = other RNA
tgagaatctattcatgcactatt

SEQ ID NO: 701 - RNA, 23 nt, synthetic construct
  misc_feature 1..23: note = Synthetic: WV-49641
  misc_feature 1..23: note = Synthetic: SSR-0104044
  modified_base 1: mod_base = um
  modified_base 1..2: mod_base = OTHER; note = R-phosphorothioate
  modified_base 2: mod_base = OTHER; note = 2-fluororibose guanine
  modified_base 2..3: mod_base = OTHER; note = S-phosphorothioate
  modified_base 3: mod_base = OTHER; note = 2-O-methylribose adenine
  modified_base 3..4: mod_base = OTHER; note S-N-(1,3-dimethylimidazolidin-2-ylidene)phosphoramidate
  modified_base 4: mod_base = OTHER; note = 2-fluororibose guanine
  modified_base 5: mod_base = OTHER; note = 2-O-methylribose adenine
  modified_base 6: mod_base = OTHER; note = 2-fluororibose adenine
  modified_base 7: mod_base = um
  modified_base 8: mod_base = cm
  modified_base 9: mod_base = um
  modified_base 10: mod_base = OTHER; note = 2-O-methylribose adenine
  modified_base 10..11: mod_base = OTHER; note R-N-(1,3-dimethylimidazolidin-2-ylidene)phosphoramidate
  modified_base 11: mod_base = OTHER; note = 2-fluororibose uracil
  modified_base 12: mod_base = um
  modified_base 13: mod_base = cm
  modified_base 13..14: mod_base = OTHER; note = S-phosphorothioate
  modified_base 14: mod_base = OTHER; note = 2-fluororibose adenine
  modified_base 14..15: mod_base = OTHER; note = S-phosphorothioate
  modified_base 15: mod_base = um
  modified_base 15..16: mod_base = OTHER; note = S-phosphorothioate
  modified_base 16: mod_base = OTHER; note = 2-fluororibose guanine
  modified_base 16..17: mod_base = OTHER; note = S-phosphorothioate
  modified_base 17: mod_base = cm
  modified_base 17..18: mod_base = OTHER; note = S-phosphorothioate
  modified_base 18: mod_base = OTHER; note = 2-O-methylribose adenine
  modified_base 18..19: mod_base = OTHER; note = S-phosphorothioate
  modified_base 19: mod_base = cm
  modified_base 19..20: mod_base = OTHER; note = S-phosphorothioate
  modified_base 20: mod_base = um
  modified_base 20..21: mod_base = OTHER; note = S-phosphorothioate
  modified_base 21: mod_base = OTHER; note = 2-O-methylribose adenine
  modified_base 21..22: mod_base = OTHER; note = S-phosphorothioate
  modified_base 22: mod_base = um
  modified_base 22..23: mod_base = OTHER; note = S-phosphorothioate
  modified_base 23: mod_base = um
  source 1..23: mol_type = other RNA
tgagaatctattcatgcactatt

SEQ ID NO: 702 - RNA, 23 nt, synthetic construct
  misc_feature 1..23: note = Synthetic: WV-49639
  misc_feature 1..23: note = Synthetic: SSR-0104045
  modified_base 1: mod_base = um
  modified_base 1..2: mod_base = OTHER; note = R-phosphorothioate
  modified_base 2: mod_base = OTHER; note = 2-fluororibose guanine
  modified_base 2..3: mod_base = OTHER; note = S-phosphorothioate
  modified_base 3: mod_base = OTHER; note = 2-O-methylribose adenine
  modified_base 3..4: mod_base = OTHER; note S-N-(1,3-dimethylimidazolidin-2-ylidene)phosphoramidate
  modified_base 4: mod_base = OTHER; note = 2-fluororibose guanine
  modified_base 5: mod_base = OTHER; note = 2-O-methylribose adenine
  modified_base 6: mod_base = OTHER; note = 2-fluororibose adenine
  modified_base 7: mod_base = um
  modified_base 8: mod_base = cm
  modified_base 9: mod_base = um
  modified_base 10: mod_base = OTHER; note = 2-O-methylribose adenine
  modified_base 10..11: mod_base = OTHER; note S-N-(1,3-dimethylimidazolidin-2-ylidene)phosphoramidate
  modified_base 11: mod_base = OTHER; note = 2-fluororibose uracil
  modified_base 12: mod_base = um
  modified_base 13: mod_base = cm
  modified_base 13..14: mod_base = OTHER; note = S-phosphorothioate
  modified_base 14: mod_base = OTHER; note = 2-fluororibose adenine
  modified_base 14..15: mod_base = OTHER; note = S-phosphorothioate
  modified_base 15: mod_base = um
  modified_base 15..16: mod_base = OTHER; note = S-phosphorothioate
  modified_base 16: mod_base = OTHER; note = 2-fluororibose guanine
  modified_base 16..17: mod_base = OTHER; note = S-phosphorothioate
  modified_base 17: mod_base = cm
  modified_base 17..18: mod_base = OTHER; note = S-phosphorothioate
  modified_base 18: mod_base = OTHER; note = 2-O-methylribose adenine
  modified_base 18..19: mod_base = OTHER; note = S-phosphorothioate
  modified_base 19: mod_base = cm
  modified_base 19..20: mod_base = OTHER; note = S-phosphorothioate
  modified_base 20: mod_base = um
  modified_base 20..21: mod_base = OTHER; note = S-phosphorothioate
  modified_base 21: mod_base = OTHER; note = 2-O-methylribose adenine
  modified_base 21..22: mod_base = OTHER; note = S-phosphorothioate
  modified_base 22: mod_base = um
  modified_base 22..23: mod_base = OTHER; note = S-phosphorothioate
  modified_base 23: mod_base = um
  source 1..23: mol_type = other RNA
tgagaatctattcatgcactatt

SEQ ID NO: 703 - RNA, 23 nt, synthetic construct
  misc_feature 1..23: note = Synthetic: WV-48430
  misc_feature 1..23: note = Synthetic: SSR-0104052
  modified_base 1: mod_base = um
  modified_base 1..2: mod_base = OTHER; note = R-phosphorothioate
  modified_base 2: mod_base = OTHER; note = 2-fluororibose uracil
  modified_base 2..3: mod_base = OTHER; note = S-phosphorothioate
  modified_base 3: mod_base = OTHER; note = 2-O-methylribose adenine
  modified_base 3..4: mod_base = OTHER; note S-N-(1,3-dimethylimidazolidin-2-ylidene)phosphoramidate
  modified_base 4: mod_base = OTHER; note = 2-fluororibose adenine
  modified_base 5: mod_base = um
  modified_base 6: mod_base = OTHER; note = 2-fluororibose uracil
  modified_base 7: mod_base = cm
  modified_base 7..8: mod_base = OTHER; note S-N-(1,3-dimethylimidazolidin-2-ylidene)phosphoramidate
  modified_base 8: mod_base = OTHER; note = 2-fluororibose adenine
  modified_base 9: mod_base = OTHER; note = 2-O-methylribose adenine
  modified_base 10: mod_base = OTHER; note = 2-fluororibose guanine
  modified_base 11: mod_base = um
  modified_base 12: mod_base = um
  modified_base 13: mod_base = cm
  modified_base 13..14: mod_base = OTHER; note = S-phosphorothioate
  modified_base 14: mod_base = OTHER; note = 2-fluororibose adenine
  modified_base 14..15: mod_base = OTHER; note = S-phosphorothioate
  modified_base 15: mod_base = gm
  modified_base 15..16: mod_base = OTHER; note = S-phosphorothioate
  modified_base 16: mod_base = OTHER; note = 2-fluororibose guanine
  modified_base 16..17: mod_base = OTHER; note = S-phosphorothioate
  modified_base 17: mod_base = cm
  modified_base 17..18: mod_base = OTHER; note = S-phosphorothioate
  modified_base 18: mod_base = OTHER; note = 2-fluororibose adenine
  modified_base 18..19: mod_base = OTHER; note S-N-(1,3-dimethylimidazolidin-2-ylidene)phosphoramidate
  modified_base 19: mod_base = um
  modified_base 19..20: mod_base = OTHER; note = S-phosphorothioate
  modified_base 20: mod_base = OTHER; note = 2-fluororibose cytosine
  modified_base 20..21: mod_base = OTHER; note = S-phosphorothioate
  modified_base 21: mod_base = um
  modified_base 21..22: mod_base = OTHER; note = S-phosphorothioate
  modified_base 22: mod_base = um
  modified_base 22..23: mod_base = OTHER; note = S-phosphorothioate
  modified_base 23: mod_base = um
  source 1..23: mol_type = other RNA
ttaattcaagttcaggcatcttt

SEQ ID NO: 704 - RNA, 23 nt, synthetic construct
  source 1..23: mol_type = other RNA
ttaattcaagttcaggcatcttt

SEQ ID NO: 705 - RNA, 23 nt, synthetic construct
  misc_feature 1..23: note = Synthetic: WV-49631
  misc_feature 1..23: note = Synthetic: SSR-0104053
  modified_base 1: mod_base = um
  modified_base 1..2: mod_base = OTHER; note = R-phosphorothioate
  modified_base 2: mod_base = OTHER; note = 2-fluororibose uracil
  modified_base 2..3: mod_base = OTHER; note = S-phosphorothioate
  modified_base 3: mod_base = OTHER; note = 2-O-methylribose adenine
  modified_base 3..4: mod_base = OTHER; note S-N-(1,3-dimethylimidazolidin-2-ylidene)phosphoramidate
  modified_base 4: mod_base = OTHER; note = 2-fluororibose adenine
  modified_base 5: mod_base = um
  modified_base 6: mod_base = OTHER; note = 2-fluororibose uracil
  modified_base 7: mod_base = cm
  modified_base 8: mod_base = OTHER; note = 2-O-methylribose adenine
  modified_base 9: mod_base = OTHER; note = 2-O-methylribose adenine
  modified_base 10: mod_base = gm
  modified_base 10..11: mod_base = OTHER; note R-N-(1,3-dimethylimidazolidin-2-ylidene)phosphoramidate
  modified_base 11: mod_base = OTHER; note = 2-fluororibose uracil
  modified_base 12: mod_base = um
  modified_base 13: mod_base = cm
  modified_base 13..14: mod_base = OTHER; note = S-phosphorothioate
  modified_base 14: mod_base = OTHER; note = 2-fluororibose adenine
  modified_base 14..15: mod_base = OTHER; note = S-phosphorothioate
  modified_base 15: mod_base = gm
  modified_base 15..16: mod_base = OTHER; note = S-phosphorothioate
  modified_base 16: mod_base = OTHER; note = 2-fluororibose guanine
  modified_base 16..17: mod_base = OTHER; note = S-phosphorothioate
  modified_base 17: mod_base = cm
  modified_base 17..18: mod_base = OTHER; note = S-phosphorothioate
  modified_base 18: mod_base = OTHER; note = 2-O-methylribose adenine
  modified_base 18..19: mod_base = OTHER; note = S-phosphorothioate
  modified_base 19: mod_base = um
  modified_base 19..20: mod_base = OTHER; note = S-phosphorothioate
  modified_base 20: mod_base = cm
  modified_base 20..21: mod_base = OTHER; note = S-phosphorothioate
  modified_base 21: mod_base = um
  modified_base 21..22: mod_base = OTHER; note = S-phosphorothioate
  modified_base 22: mod_base = um
  modified_base 22..23: mod_base = OTHER; note = S-phosphorothioate
  modified_base 23: mod_base = um
  source 1..23: mol_type = other RNA
ttaattcaagttcaggcatcttt

SEQ ID NO: 706 - RNA, 23 nt, synthetic construct
  misc_feature 1..23: note = Synthetic: WV-49629
  misc_feature 1..23: note = Synthetic: SSR-0104054
  modified_base 1: mod_base = um
  modified_base 1..2: mod_base = OTHER; note = R-phosphorothioate
  modified_base 2: mod_base = OTHER; note = 2-fluororibose uracil
  modified_base 2..3: mod_base = OTHER; note = S-phosphorothioate
  modified_base 3: mod_base = OTHER; note = 2-O-methylribose adenine
  modified_base 3..4: mod_base = OTHER; note S-N-(1,3-dimethylimidazolidin-2-ylidene)phosphoramidate
  modified_base 4: mod_base = OTHER; note = 2-fluororibose adenine
  modified_base 5: mod_base = um
  modified_base 6: mod_base = OTHER; note = 2-fluororibose uracil
  modified_base 7: mod_base = cm
  modified_base 8: mod_base = OTHER; note = 2-O-methylribose adenine
  modified_base 9: mod_base = OTHER; note = 2-O-methylribose adenine
  modified_base 10: mod_base = gm
  modified_base 10..11: mod_base = OTHER; note S-N-(1,3-dimethylimidazolidin-2-ylidene)phosphoramidate
  modified_base 11: mod_base = OTHER; note = 2-fluororibose uracil
  modified_base 12: mod_base = um
  modified_base 13: mod_base = cm
  modified_base 13..14: mod_base = OTHER; note = S-phosphorothioate
  modified_base 14: mod_base = OTHER; note = 2-fluororibose adenine
  modified_base 14..15: mod_base = OTHER; note = S-phosphorothioate
  modified_base 15: mod_base = gm
  modified_base 15..16: mod_base = OTHER; note = S-phosphorothioate
  modified_base 16: mod_base = OTHER; note = 2-fluororibose guanine
  modified_base 16..17: mod_base = OTHER; note = S-phosphorothioate
  modified_base 17: mod_base = cm
  modified_base 17..18: mod_base = OTHER; note = S-phosphorothioate
  modified_base 18: mod_base = OTHER; note = 2-O-methylribose adenine
  modified_base 18..19: mod_base = OTHER; note = S-phosphorothioate
  modified_base 19: mod_base = um
  modified_base 19..20: mod_base = OTHER; note = S-phosphorothioate
  modified_base 20: mod_base = cm
  modified_base 20..21: mod_base = OTHER; note = S-phosphorothioate
  modified_base 21: mod_base = um
  modified_base 21..22: mod_base = OTHER; note = S-phosphorothioate
  modified_base 22: mod_base = um
  modified_base 22..23: mod_base = OTHER; note = S-phosphorothioate
  modified_base 23: mod_base = um
  source 1..23: mol_type = other RNA
ttaattcaagttcaggcatcttt

SEQ ID NO: 707 - RNA, 23 nt, synthetic construct
  misc_feature 1..23: note = Synthetic: WV-48434
  misc_feature 1..23: note = Synthetic: SSR-0104061
  modified_base 1: mod_base = um
  modified_base 1..2: mod_base = OTHER; note = S-phosphorothioate
  modified_base 2: mod_base = OTHER; note = 2-fluororibose adenine
  modified_base 2..3: mod_base = OTHER; note = R-phosphorothioate
  modified_base 3: mod_base = OTHER; note = 2-O-methylribose adenine
  modified_base 3..4: mod_base = OTHER; note S-N-(1,3-dimethylimidazolidin-2-ylidene)phosphoramidate
  modified_base 4: mod_base = OTHER; note = 2-fluororibose adenine
  modified_base 5: mod_base = um
  modified_base 6: mod_base = OTHER; note = 2-fluororibose guanine
  modified_base 7: mod_base = cm
  modified_base 7..8: mod_base = OTHER; note S-N-(1,3-dimethylimidazolidin-2-ylidene)phosphoramidate
  modified_base 8: mod_base = OTHER; note = 2-fluororibose adenine
  modified_base 9: mod_base = um
  modified_base 10: mod_base = OTHER; note = 2-fluororibose adenine
  modified_base 11: mod_base = gm
  modified_base 12: mod_base = um
  modified_base 13: mod_base = gm
  modified_base 13..14: mod_base = OTHER; note = S-phosphorothioate
  modified_base 14: mod_base = OTHER; note = 2-fluororibose adenine
  modified_base 14..15: mod_base = OTHER; note = S-phosphorothioate
  modified_base 15: mod_base = um
  modified_base 15..16: mod_base = OTHER; note = S-phosphorothioate
  modified_base 16: mod_base = OTHER; note = 2-fluororibose cytosine
  modified_base 16..17: mod_base = OTHER; note = S-phosphorothioate
  modified_base 17: mod_base = OTHER; note = 2-O-methylribose adenine
  modified_base 17..18: mod_base = OTHER; note = S-phosphorothioate
  modified_base 18: mod_base = OTHER; note = 2-fluororibose guanine
  modified_base 18..19: mod_base = OTHER; note S-N-(1,3-dimethylimidazolidin-2-ylidene)phosphoramidate
  modified_base 19: mod_base = gm
  modified_base 19..20: mod_base = OTHER; note = S-phosphorothioate
  modified_base 20: mod_base = OTHER; note = 2-fluororibose adenine
  modified_base 20..21: mod_base = OTHER; note = S-phosphorothioate
  modified_base 21: mod_base = OTHER; note = 2-O-methylribose adenine
  modified_base 21..22: mod_base = OTHER; note = S-phosphorothioate
  modified_base 22: mod_base = um
  modified_base 22..23: mod_base = OTHER; note = S-phosphorothioate
  modified_base 23: mod_base = um
  source 1..23: mol_type = other RNA
taaatgcatagtgatcaggaatt

SEQ ID NO: 708 - RNA, 23 nt, synthetic construct
  misc_feature 1..23: note = Synthetic: WV-48440
  misc_feature 1..23: note = Synthetic: SSR-0104065
  modified_base 1: mod_base = um
  modified_base 1..2: mod_base = OTHER; note = S-phosphorothioate
  modified_base 2: mod_base = OTHER; note = 2-fluororibose adenine
  modified_base 2..3: mod_base = OTHER; note = R-phosphorothioate
  modified_base 3: mod_base = um
  modified_base 3..4: mod_base = OTHER; note S-N-(1,3-dimethylimidazolidin-2-ylidene)phosphoramidate
  modified_base 4: mod_base = OTHER; note = 2-fluororibose guanine
  modified_base 5: mod_base = OTHER; note = 2-O-methylribose adenine
  modified_base 6: mod_base = OTHER; note = 2-fluororibose uracil
  modified_base 7: mod_base = um
  modified_base 7..8: mod_base = OTHER; note S-N-(1,3-dimethylimidazolidin-2-ylidene)phosphoramidate
  modified_base 8: mod_base = OTHER; note = 2-fluororibose cytosine
  modified_base 9: mod_base = um
  modified_base 10: mod_base = OTHER; note = 2-fluororibose guanine
  modified_base 11: mod_base = um
  modified_base 12: mod_base = OTHER; note = 2-O-methylribose adenine
  modified_base 13: mod_base = cm
  modified_base 13..14: mod_base = OTHER; note = S-phosphorothioate
  modified_base 14: mod_base = OTHER; note = 2-fluororibose adenine
  modified_base 14..15: mod_base = OTHER; note = S-phosphorothioate
  modified_base 15: mod_base = OTHER; note = 2-O-methylribose adenine
  modified_base 15..16: mod_base = OTHER; note = S-phosphorothioate
  modified_base 16: mod_base = OTHER; note = 2-fluororibose uracil
  modified_base 16..17: mod_base = OTHER; note = S-phosphorothioate
  modified_base 17: mod_base = cm
  modified_base 17..18: mod_base = OTHER; note = S-phosphorothioate
  modified_base 18: mod_base = OTHER; note = 2-fluororibose adenine
  modified_base 18..19: mod_base = OTHER; note S-N-(1,3-dimethylimidazolidin-2-ylidene)phosphoramidate
  modified_base 19: mod_base = um
  modified_base 19..20: mod_base = OTHER; note = S-phosphorothioate
  modified_base 20: mod_base = OTHER; note = 2-fluororibose cytosine
  modified_base 20..21: mod_base = OTHER; note = S-phosphorothioate
  modified_base 21: mod_base = cm
  modified_base 21..22: mod_base = OTHER; note = S-phosphorothioate
  modified_base 22: mod_base = um
  modified_base 22..23: mod_base = OTHER; note = S-phosphorothioate
  modified_base 23: mod_base = um
  source 1..23: mol_type = other RNA
tatgattctgtacaatcatcctt

SEQ ID NO: 709 - RNA, 23 nt, synthetic construct
  misc_feature 1..23: note = Synthetic: WV-48428
  misc_feature 1..23: note = Synthetic: SSR-0104066
  modified_base 1: mod_base = um
  modified_base 1..2: mod_base = OTHER; note = S-phosphorothioate
  modified_base 2: mod_base = OTHER; note = 2-fluororibose cytosine
  modified_base 2..3: mod_base = OTHER; note = R-phosphorothioate
  modified_base 3: mod_base = OTHER; note = 2-O-methylribose adenine
  modified_base 3..4: mod_base = OTHER; note S-N-(1,3-dimethylimidazolidin-2-ylidene)phosphoramidate
  modified_base 4: mod_base = OTHER; note = 2-fluororibose uracil
  modified_base 5: mod_base = gm
  modified_base 6: mod_base = OTHER; note = 2-fluororibose uracil
  modified_base 7: mod_base = um
  modified_base 7..8: mod_base = OTHER; note S-N-(1,3-dimethylimidazolidin-2-ylidene)phosphoramidate
  modified_base 8: mod_base = OTHER; note = 2-fluororibose guanine
  modified_base 9: mod_base = OTHER; note = 2-O-methylribose adenine
  modified_base 10: mod_base = OTHER; note = 2-fluororibose guanine
  modified_base 11: mod_base = um
  modified_base 12: mod_base = um
  modified_base 13: mod_base = um
  modified_base 13..14: mod_base = OTHER; note = S-phosphorothioate
  modified_base 14: mod_base = OTHER; note = 2-fluororibose adenine
  modified_base 14..15: mod_base = OTHER; note = S-phosphorothioate
  modified_base 15: mod_base = cm
  modified_base 15..16: mod_base = OTHER; note = S-phosphorothioate
  modified_base 16: mod_base = OTHER; note = 2-fluororibose cytosine
  modified_base 16..17: mod_base = OTHER; note = S-phosphorothioate
  modified_base 17: mod_base = OTHER; note = 2-O-methylribose adenine
  modified_base 17..18: mod_base = OTHER; note = S-phosphorothioate
  modified_base 18: mod_base = OTHER; note = 2-fluororibose cytosine
  modified_base 18..19: mod_base = OTHER; note S-N-(1,3-dimethylimidazolidin-2-ylidene)phosphoramidate
  modified_base 19: mod_base = OTHER; note = 2-O-methylribose adenine
  modified_base 19..20: mod_base = OTHER; note = S-phosphorothioate
  modified_base 20: mod_base = OTHER; note = 2-fluororibose guanine
  modified_base 20..21: mod_base = OTHER; note = S-phosphorothioate
  modified_base 21: mod_base = OTHER; note = 2-O-methylribose adenine
  modified_base 21..22: mod_base = OTHER; note = S-phosphorothioate
  modified_base 22: mod_base = um
  modified_base 22..23: mod_base = OTHER; note = S-phosphorothioate
  modified_base 23: mod_base = um
  source 1..23: mol_type = other RNA
tcatgttgagtttaccacagatt

SEQ ID NO: 710 - RNA, 23 nt, synthetic construct
  misc_feature 1..23: note = Synthetic: WV-48437
  misc_feature 1..23: note = Synthetic: SSR-0104067
  modified_base 1: mod_base = um
  modified_base 1..2: mod_base = OTHER; note = S-phosphorothioate
  modified_base 2: mod_base = OTHER; note = 2-fluororibose cytosine
  modified_base 2..3: mod_base = OTHER; note = R-phosphorothioate
  modified_base 3: mod_base = um
  modified_base 3..4: mod_base = OTHER; note S-N-(1,3-dimethylimidazolidin-2-ylidene)phosphoramidate
  modified_base 4: mod_base = OTHER; note = 2-fluororibose adenine
  modified_base 5: mod_base = cm
  modified_base 6: mod_base = OTHER; note = 2-fluororibose uracil
  modified_base 7: mod_base = um
  modified_base 7..8: mod_base = OTHER; note S-N-(1,3-dimethylimidazolidin-2-ylidene)phosphoramidate
  modified_base 8: mod_base = OTHER; note = 2-fluororibose guanine
  modified_base 9: mod_base = um
  modified_base 10: mod_base = OTHER; note = 2-fluororibose guanine
  modified_base 11: mod_base = um
  modified_base 12: mod_base = um
  modified_base 13: mod_base = OTHER; note = 2-O-methylribose adenine
  modified_base 13..14: mod_base = OTHER; note = S-phosphorothioate
  modified_base 14: mod_base = OTHER; note = 2-fluororibose cytosine
  modified_base 14..15: mod_base = OTHER; note = S-phosphorothioate
  modified_base 15: mod_base = OTHER; note = 2-O-methylribose adenine
  modified_base 15..16: mod_base = OTHER; note = S-phosphorothioate
  modified_base 16: mod_base = OTHER; note = 2-fluororibose guanine
  modified_base 16..17: mod_base = OTHER; note = S-phosphorothioate
  modified_base 17: mod_base = cm
  modified_base 17..18: mod_base = OTHER; note = S-phosphorothioate
  modified_base 18: mod_base = OTHER; note = 2-fluororibose adenine
  modified_base 18..19: mod_base = OTHER; note S-N-(1,3-dimethylimidazolidin-2-ylidene)phosphoramidate
  modified_base 19: mod_base = cm
  modified_base 19..20: mod_base = OTHER; note = S-phosphorothioate
  modified_base 20: mod_base = OTHER; note = 2-fluororibose adenine
  modified_base 20..21: mod_base = OTHER; note = S-phosphorothioate
  modified_base 21: mod_base = gm
  modified_base 21..22: mod_base = OTHER; note = S-phosphorothioate
  modified_base 22: mod_base = um
  modified_base 22..23: mod_base = OTHER; note = S-phosphorothioate
  modified_base 23: mod_base = um
  source 1..23: mol_type = other RNA
tctacttgtgttacagcacagtt

SEQ ID NO: 711 - RNA, 23 nt, synthetic construct
  misc_feature 1..23: note = Synthetic: WV-49637
  misc_feature 1..23: note = Synthetic: SSR-0104068
  modified_base 1: mod_base = um
  modified_base 1..2: mod_base = OTHER; note = S-phosphorothioate
  modified_base 2: mod_base = OTHER; note = 2-fluororibose cytosine
  modified_base 2..3: mod_base = OTHER; note = R-phosphorothioate
  modified_base 3: mod_base = um
  modified_base 3..4: mod_base = OTHER; note S-N-(1,3-dimethylimidazolidin-2-ylidene)phosphoramidate
  modified_base 4: mod_base = OTHER; note = 2-fluororibose adenine
  modified_base 5: mod_base = cm
  modified_base 6: mod_base = OTHER; note = 2-fluororibose uracil
  modified_base 7: mod_base = um
  modified_base 8: mod_base = gm
  modified_base 9: mod_base = um
  modified_base 10: mod_base = gm
  modified_base 10..11: mod_base = OTHER; note R-N-(1,3-dimethylimidazolidin-2-ylidene)phosphoramidate
  modified_base 11: mod_base = OTHER; note = 2-fluororibose uracil
  modified_base 12: mod_base = um
  modified_base 13: mod_base = OTHER; note = 2-O-methylribose adenine
  modified_base 13..14: mod_base = OTHER; note = S-phosphorothioate
  modified_base 14: mod_base = OTHER; note = 2-fluororibose cytosine
  modified_base 14..15: mod_base = OTHER; note = S-phosphorothioate
  modified_base 15: mod_base = OTHER; note = 2-O-methylribose adenine
  modified_base 15..16: mod_base = OTHER; note = S-phosphorothioate
  modified_base 16: mod_base = OTHER; note = 2-fluororibose guanine
  modified_base 16..17: mod_base = OTHER; note = S-phosphorothioate
  modified_base 17: mod_base = cm
  modified_base 17..18: mod_base = OTHER; note = S-phosphorothioate
  modified_base 18: mod_base = OTHER; note = 2-O-methylribose adenine
  modified_base 18..19: mod_base = OTHER; note = S-phosphorothioate
  modified_base 19: mod_base = cm
  modified_base 19..20: mod_base = OTHER; note = S-phosphorothioate
  modified_base 20: mod_base = OTHER; note = 2-O-methylribose adenine
  modified_base 20..21: mod_base = OTHER; note = S-phosphorothioate
  modified_base 21: mod_base = gm
  modified_base 21..22: mod_base = OTHER; note = S-phosphorothioate
  modified_base 22: mod_base = um
  modified_base 22..23: mod_base = OTHER; note = S-phosphorothioate
  modified_base 23: mod_base = um
  source 1..23: mol_type = other RNA
tctacttgtgttacagcacagtt

SEQ ID NO: 712 - RNA, 23 nt, synthetic construct
  misc_feature 1..23: note = Synthetic: WV-49635
  misc_feature 1..23: note = Synthetic: SSR-0104069
  modified_base 1: mod_base = um
  modified_base 1..2: mod_base = OTHER; note = S-phosphorothioate
  modified_base 2: mod_base = OTHER; note = 2-fluororibose cytosine
  modified_base 2..3: mod_base = OTHER; note = R-phosphorothioate
  modified_base 3: mod_base = um
  modified_base 3..4: mod_base = OTHER; note S-N-(1,3-dimethylimidazolidin-2-ylidene)phosphoramidate
  modified_base 4: mod_base = OTHER; note = 2-fluororibose adenine
  modified_base 5: mod_base = cm
  modified_base 6: mod_base = OTHER; note = 2-fluororibose uracil
  modified_base 7: mod_base = um
  modified_base 8: mod_base = gm
  modified_base 9: mod_base = um
  modified_base 10: mod_base = gm
  modified_base 10..11: mod_base = OTHER; note S-N-(1,3-dimethylimidazolidin-2-ylidene)phosphoramidate
  modified_base 11: mod_base = OTHER; note = 2-fluororibose uracil
  modified_base 12: mod_base = um
  modified_base 13: mod_base = OTHER; note = 2-O-methylribose adenine
  modified_base 13..14: mod_base = OTHER; note = S-phosphorothioate
  modified_base 14: mod_base = OTHER; note = 2-fluororibose cytosine
  modified_base 14..15: mod_base = OTHER; note = S-phosphorothioate
  modified_base 15: mod_base = OTHER; note = 2-O-methylribose adenine
  modified_base 15..16: mod_base = OTHER; note = S-phosphorothioate
  modified_base 16: mod_base = OTHER; note = 2-fluororibose guanine
  modified_base 16..17: mod_base = OTHER; note = S-phosphorothioate
  modified_base 17: mod_base = cm
  modified_base 17..18: mod_base = OTHER; note = S-phosphorothioate
  modified_base 18: mod_base = OTHER; note = 2-O-methylribose adenine
  modified_base 18..19: mod_base = OTHER; note = S-phosphorothioate
  modified_base 19: mod_base = cm
  modified_base 19..20: mod_base = OTHER; note = S-phosphorothioate
  modified_base 20: mod_base = OTHER; note = 2-O-methylribose adenine
  modified_base 20..21: mod_base = OTHER; note = S-phosphorothioate
  modified_base 21: mod_base = gm
  modified_base 21..22: mod_base = OTHER; note = S-phosphorothioate
  modified_base 22: mod_base = um
  modified_base 22..23: mod_base = OTHER; note = S-phosphorothioate
  modified_base 23: mod_base = um
  source 1..23: mol_type = other RNA
tctacttgtgttacagcacagtt

SEQ ID NO: 713 - RNA, 23 nt, synthetic construct
  misc_feature 1..23: note = Synthetic: WV-48443
  misc_feature 1..23: note = Synthetic: SSR-0104073
  modified_base 1: mod_base = um
  modified_base 1..2: mod_base = OTHER; note = S-phosphorothioate
  modified_base 2: mod_base = OTHER; note = 2-fluororibose guanine
  modified_base 2..3: mod_base = OTHER; note = R-phosphorothioate
  modified_base 3: mod_base = OTHER; note = 2-O-methylribose adenine
  modified_base 3..4: mod_base = OTHER; note S-N-(1,3-dimethylimidazolidin-2-ylidene)phosphoramidate
  modified_base 4: mod_base = OTHER; note = 2-fluororibose guanine
  modified_base 5: mod_base = OTHER; note = 2-O-methylribose adenine
  modified_base 6: mod_base = OTHER; note = 2-fluororibose adenine
  modified_base 7: mod_base = um
  modified_base 7..8: mod_base = OTHER; note S-N-(1,3-dimethylimidazolidin-2-ylidene)phosphoramidate
  modified_base 8: mod_base = OTHER; note = 2-fluororibose cytosine
  modified_base 9: mod_base = um
  modified_base 10: mod_base = OTHER; note = 2-fluororibose adenine
  modified_base 11: mod_base = um
  modified_base 12: mod_base = um
  modified_base 13: mod_base = cm
  modified_base 13..14: mod_base = OTHER; note = S-phosphorothioate
  modified_base 14: mod_base = OTHER; note = 2-fluororibose adenine
  modified_base 14..15: mod_base = OTHER; note = S-phosphorothioate
  modified_base 15: mod_base = um
  modified_base 15..16: mod_base = OTHER; note = S-phosphorothioate
  modified_base 16: mod_base = OTHER; note = 2-fluororibose guanine
  modified_base 16..17: mod_base = OTHER; note = S-phosphorothioate
  modified_base 17: mod_base = cm
  modified_base 17..18: mod_base = OTHER; note = S-phosphorothioate
  modified_base 18: mod_base = OTHER; note = 2-fluororibose adenine
  modified_base 18..19: mod_base = OTHER; note S-N-(1,3-dimethylimidazolidin-2-ylidene)phosphoramidate
  modified_base 19: mod_base = cm
  modified_base 19..20: mod_base = OTHER; note = S-phosphorothioate
  modified_base 20: mod_base = OTHER; note = 2-fluororibose uracil
  modified_base 20..21: mod_base = OTHER; note = S-phosphorothioate
  modified_base 21: mod_base = OTHER; note = 2-O-methylribose adenine
  modified_base 21..22: mod_base = OTHER; note = S-phosphorothioate
  modified_base 22: mod_base = um
  modified_base 22..23: mod_base = OTHER; note = S-phosphorothioate
  modified_base 23: mod_base = um
  source 1..23: mol_type = other RNA
tgagaatctattcatgcactatt

SEQ ID NO: 714 - RNA, 23 nt, synthetic construct
  misc_feature 1..23: note = Synthetic: WV-49642
  misc_feature 1..23: note = Synthetic: SSR-0104074
  modified_base 1: mod_base = um
  modified_base 1..2: mod_base = OTHER; note = S-phosphorothioate
  modified_base 2: mod_base = OTHER; note = 2-fluororibose guanine
  modified_base 2..3: mod_base = OTHER; note = R-phosphorothioate
  modified_base 3: mod_base = OTHER; note = 2-O-methylribose adenine
  modified_base 3..4: mod_base = OTHER; note S-N-(1,3-dimethylimidazolidin-2-ylidene)phosphoramidate
  modified_base 4: mod_base = OTHER; note = 2-fluororibose guanine
  modified_base 5: mod_base = OTHER; note = 2-O-methylribose adenine
  modified_base 6: mod_base = OTHER; note = 2-fluororibose adenine
  modified_base 7: mod_base = um
  modified_base 8: mod_base = cm
  modified_base 9: mod_base = um
  modified_base 10: mod_base = OTHER; note = 2-O-methylribose adenine
  modified_base 10..11: mod_base = OTHER; note R-N-(1,3-dimethylimidazolidin-2-ylidene)phosphoramidate
  modified_base 11: mod_base = OTHER; note = 2-fluororibose uracil
  modified_base 12: mod_base = um
  modified_base 13: mod_base = cm
  modified_base 13..14: mod_base = OTHER; note = S-phosphorothioate
  modified_base 14: mod_base = OTHER; note = 2-fluororibose adenine
  modified_base 14..15: mod_base = OTHER; note = S-phosphorothioate
  modified_base 15: mod_base = um
  modified_base 15..16: mod_base = OTHER; note = S-phosphorothioate
  modified_base 16: mod_base = OTHER; note = 2-fluororibose guanine
  modified_base 16..17: mod_base = OTHER; note = S-phosphorothioate
  modified_base 17: mod_base = cm
  modified_base 17..18: mod_base = OTHER; note = S-phosphorothioate
  modified_base 18: mod_base = OTHER; note = 2-O-methylribose adenine
  modified_base 18..19: mod_base = OTHER; note = S-phosphorothioate
  modified_base 19: mod_base = cm
  modified_base 19..20: mod_base = OTHER; note = S-phosphorothioate
  modified_base 20: mod_base = um
  modified_base 20..21: mod_base = OTHER; note = S-phosphorothioate
  modified_base 21: mod_base = OTHER; note = 2-O-methylribose adenine
  modified_base 21..22: mod_base = OTHER; note = S-phosphorothioate
  modified_base 22: mod_base = um
  modified_base 22..23: mod_base = OTHER; note = S-phosphorothioate
  modified_base 23: mod_base = um
  source 1..23: mol_type = other RNA
tgagaatctattcatgcactatt

SEQ ID NO: 715 - RNA, 23 nt, synthetic construct
  misc_feature 1..23: note = Synthetic: WV-49640
  misc_feature 1..23: note = Synthetic: SSR-0104075
  modified_base 1: mod_base = um
  modified_base 1..2: mod_base = OTHER; note = S-phosphorothioate
  modified_base 2: mod_base = OTHER; note = 2-fluororibose guanine
  modified_base 2..3: mod_base = OTHER; note = R-phosphorothioate
  modified_base 3: mod_base = OTHER; note = 2-O-methylribose adenine
  modified_base 3..4: mod_base = OTHER; note S-N-(1,3-dimethylimidazolidin-2-ylidene)phosphoramidate
  modified_base 4: mod_base = OTHER; note = 2-fluororibose guanine
  modified_base 5: mod_base = OTHER; note = 2-O-methylribose adenine
  modified_base 6: mod_base = OTHER; note = 2-fluororibose adenine
  modified_base 7: mod_base = um
  modified_base 8: mod_base = cm
  modified_base 9: mod_base = um
  modified_base 10: mod_base = OTHER; note = 2-O-methylribose adenine
  modified_base 10..11: mod_base = OTHER; note S-N-(1,3-dimethylimidazolidin-2-ylidene)phosphoramidate
  modified_base 11: mod_base = OTHER; note = 2-fluororibose uracil
  modified_base 12: mod_base = um
  modified_base 13: mod_base = cm
  modified_base 13..14: mod_base = OTHER; note = S-phosphorothioate
  modified_base 14: mod_base = OTHER; note = 2-fluororibose adenine
  modified_base 14..15: mod_base = OTHER; note = S-phosphorothioate
  modified_base 15: mod_base = um
  modified_base 15..16: mod_base = OTHER; note = S-phosphorothioate
  modified_base 16: mod_base = OTHER; note = 2-fluororibose guanine
  modified_base 16..17: mod_base = OTHER; note = S-phosphorothioate
  modified_base 17: mod_base = cm
  modified_base 17..18: mod_base = OTHER; note = S-phosphorothioate
  modified_base 18: mod_base = OTHER; note = 2-O-methylribose adenine
  modified_base 18..19: mod_base = OTHER; note = S-phosphorothioate
  modified_base 19: mod_base = cm
  modified_base 19..20: mod_base = OTHER; note = S-phosphorothioate
  modified_base 20: mod_base = um
  modified_base 20..21: mod_base = OTHER; note = S-phosphorothioate
  modified_base 21: mod_base = OTHER; note = 2-O-methylribose adenine
  modified_base 21..22: mod_base = OTHER; note = S-phosphorothioate
  modified_base 22: mod_base = um
  modified_base 22..23: mod_base = OTHER; note = S-phosphorothioate
  modified_base 23: mod_base = um
  source 1..23: mol_type = other RNA
tgagaatctattcatgcactatt

SEQ ID NO: 716 - RNA, 23 nt, synthetic construct
  misc_feature 1..23: note = Synthetic: WV-48431
  misc_feature 1..23: note = Synthetic: SSR-0104082
  modified_base 1: mod_base = um
  modified_base 1..2: mod_base = OTHER; note = S-phosphorothioate
  modified_base 2: mod_base = OTHER; note = 2-fluororibose uracil
  modified_base 2..3: mod_base = OTHER; note = R-phosphorothioate
  modified_base 3: mod_base = OTHER; note = 2-O-methylribose adenine
  modified_base 3..4: mod_base = OTHER; note S-N-(1,3-dimethylimidazolidin-2-ylidene)phosphoramidate
  modified_base 4: mod_base = OTHER; note = 2-fluororibose adenine
  modified_base 5: mod_base = um
  modified_base 6: mod_base = OTHER; note = 2-fluororibose uracil
  modified_base 7: mod_base = cm
  modified_base 7..8: mod_base = OTHER; note S-N-(1,3-dimethylimidazolidin-2-ylidene)phosphoramidate
  modified_base 8: mod_base = OTHER; note = 2-fluororibose adenine
  modified_base 9: mod_base = OTHER; note = 2-O-methylribose adenine
  modified_base 10: mod_base = OTHER; note = 2-fluororibose guanine
  modified_base 11: mod_base = um
  modified_base 12: mod_base = um
  modified_base 13: mod_base = cm
  modified_base 13..14: mod_base = OTHER; note = S-phosphorothioate
  modified_base 14: mod_base = OTHER; note = 2-fluororibose adenine
  modified_base 14..15: mod_base = OTHER; note = S-phosphorothioate
  modified_base 15: mod_base = gm
  modified_base 15..16: mod_base = OTHER; note = S-phosphorothioate
  modified_base 16: mod_base = OTHER; note = 2-fluororibose guanine
  modified_base 16..17: mod_base = OTHER; note = S-phosphorothioate
  modified_base 17: mod_base = cm
  modified_base 17..18: mod_base = OTHER; note = S-phosphorothioate
  modified_base 18: mod_base = OTHER; note = 2-fluororibose adenine
  modified_base 18..19: mod_base = OTHER; note S-N-(1,3-dimethylimidazolidin-2-ylidene)phosphoramidate
  modified_base 19: mod_base = um
  modified_base 19..20: mod_base = OTHER; note = S-phosphorothioate
  modified_base 20: mod_base = OTHER; note = 2-fluororibose cytosine
  modified_base 20..21: mod_base = OTHER; note = S-phosphorothioate
  modified_base 21: mod_base = um
  modified_base 21..22: mod_base = OTHER; note = S-phosphorothioate
  modified_base 22: mod_base = um
  modified_base 22..23: mod_base = OTHER; note = S-phosphorothioate
  modified_base 23: mod_base = um
  source 1..23: mol_type = other RNA
ttaattcaagttcaggcatcttt

SEQ ID NO: 717 - RNA, 23 nt, synthetic construct
  misc_feature 1..23: note = Synthetic: WV-49632
  misc_feature 1..23: note = Synthetic: SSR-0104083
  modified_base 1: mod_base = um
  modified_base 1..2: mod_base = OTHER; note = S-phosphorothioate
  modified_base 2: mod_base = OTHER; note = 2-fluororibose uracil
  modified_base 2..3: mod_base = OTHER; note = R-phosphorothioate
  modified_base 3: mod_base = OTHER; note = 2-O-methylribose adenine
  modified_base 3..4: mod_base = OTHER; note S-N-(1,3-dimethylimidazolidin-2-ylidene)phosphoramidate
  modified_base 4: mod_base = OTHER; note = 2-fluororibose adenine
  modified_base 5: mod_base = um
  modified_base 6: mod_base = OTHER; note = 2-fluororibose uracil
  modified_base 7: mod_base = cm
  modified_base 8: mod_base = OTHER; note = 2-O-methylribose adenine
  modified_base 9: mod_base = OTHER; note = 2-O-methylribose adenine
  modified_base 10: mod_base = gm
  modified_base 10..11: mod_base = OTHER; note R-N-(1,3-dimethylimidazolidin-2-ylidene)phosphoramidate
  modified_base 11: mod_base = OTHER; note = 2-fluororibose uracil
  modified_base 12: mod_base = um
  modified_base 13: mod_base = cm
  modified_base 13..14: mod_base = OTHER; note = S-phosphorothioate
  modified_base 14: mod_base = OTHER; note = 2-fluororibose adenine
  modified_base 14..15: mod_base = OTHER; note = S-phosphorothioate
  modified_base 15: mod_base = gm
  modified_base 15..16: mod_base = OTHER; note = S-phosphorothioate
  modified_base 16: mod_base = OTHER; note = 2-fluororibose guanine
  modified_base 16..17: mod_base = OTHER; note = S-phosphorothioate
  modified_base 17: mod_base = cm
  modified_base 17..18: mod_base = OTHER; note = S-phosphorothioate
  modified_base 18: mod_base = OTHER; note = 2-O-methylribose adenine
  modified_base 18..19: mod_base = OTHER; note = S-phosphorothioate
  modified_base 19: mod_base = um
  modified_base 19..20: mod_base = OTHER; note = S-phosphorothioate
  modified_base 20: mod_base = cm
  modified_base 20..21: mod_base = OTHER; note = S-phosphorothioate
  modified_base 21: mod_base = um
  modified_base 21..22: mod_base = OTHER; note = S-phosphorothioate
  modified_base 22: mod_base = um
  modified_base 22..23: mod_base = OTHER; note = S-phosphorothioate
  modified_base 23: mod_base = um
  source 1..23: mol_type = other RNA
ttaattcaagttcaggcatcttt

SEQ ID NO: 718 - RNA, 23 nt, synthetic construct
  misc_feature 1..23: note = Synthetic: WV-49630
  misc_feature 1..23: note = Synthetic: SSR-0104084
  modified_base 1: mod_base = um
  modified_base 1..2: mod_base = OTHER; note = S-phosphorothioate
  modified_base 2: mod_base = OTHER; note = 2-fluororibose uracil
  modified_base 2..3: mod_base = OTHER; note = R-phosphorothioate
  modified_base 3: mod_base = OTHER; note = 2-O-methylribose adenine
  modified_base 3..4: mod_base = OTHER; note S-N-(1,3-dimethylimidazolidin-2-ylidene)phosphoramidate
  modified_base 4: mod_base = OTHER; note = 2-fluororibose adenine
  modified_base 5: mod_base = um
  modified_base 6: mod_base = OTHER; note = 2-fluororibose uracil
  modified_base 7: mod_base = cm
  modified_base 8: mod_base = OTHER; note = 2-O-methylribose adenine
  modified_base 9: mod_base = OTHER; note = 2-O-methylribose adenine
  modified_base 10: mod_base = gm
  modified_base 10..11: mod_base = OTHER; note S-N-(1,3-dimethylimidazolidin-2-ylidene)phosphoramidate
  modified_base 11: mod_base = OTHER; note = 2-fluororibose uracil
  modified_base 12: mod_base = um
  modified_base 13: mod_base = cm
  modified_base 13..14: mod_base = OTHER; note = S-phosphorothioate
  modified_base 14: mod_base = OTHER; note = 2-fluororibose adenine
  modified_base 14..15: mod_base = OTHER; note = S-phosphorothioate
  modified_base 15: mod_base = gm
  modified_base 15..16: mod_base = OTHER; note = S-phosphorothioate
  modified_base 16: mod_base = OTHER; note = 2-fluororibose guanine
  modified_base 16..17: mod_base = OTHER; note = S-phosphorothioate
  modified_base 17: mod_base = cm
  modified_base 17..18: mod_base = OTHER; note = S-phosphorothioate
  modified_base 18: mod_base = OTHER; note = 2-O-methylribose adenine
  modified_base 18..19: mod_base = OTHER; note = S-phosphorothioate
  modified_base 19: mod_base = um
  modified_base 19..20: mod_base = OTHER; note = S-phosphorothioate
  modified_base 20: mod_base = cm
  modified_base 20..21: mod_base = OTHER; note = S-phosphorothioate
  modified_base 21: mod_base = um
  modified_base 21..22: mod_base = OTHER; note = S-phosphorothioate
  modified_base 22: mod_base = um
  modified_base 22..23: mod_base = OTHER; note = S-phosphorothioate
  modified_base 23: mod_base = um
  source 1..23: mol_type = other RNA
ttaattcaagttcaggcatcttt

SEQ ID NO: 719 - RNA, 21 nt, synthetic construct
  misc_feature 1..21: note = Synthetic: WV-48441
  misc_feature 1..21: note = Synthetic: SSR-0104092
  modified_base 1: mod_base = um
  modified_base 1..2: mod_base = OTHER; note = S-phosphorothioate
  modified_base 2: mod_base = OTHER; note = 2-O-methylribose adenine
  modified_base 2..3: mod_base = OTHER; note = S-phosphorothioate
  modified_base 3: mod_base = OTHER; note = 2-fluororibose guanine
  modified_base 3..4: mod_base = OTHER; note = S-phosphorothioate
  modified_base 4: mod_base = um
  modified_base 4..5: mod_base = OTHER; note = S-phosphorothioate
  modified_base 5: mod_base = OTHER; note = 2-fluororibose guanine
  modified_base 5..6: mod_base = OTHER; note = S-phosphorothioate
  modified_base 6: mod_base = cm
  modified_base 6..7: mod_base = OTHER; note = S-phosphorothioate
  modified_base 7: mod_base = OTHER; note = 2-fluororibose adenine
  modified_base 7..8: mod_base = OTHER; note R-N-(1,3-dimethylimidazolidin-2-ylidene)phosphoramidate
  modified_base 8: mod_base = um
  modified_base 9: mod_base = OTHER; note = 2-fluororibose guanine
  modified_base 10: mod_base = OTHER; note = 2-fluororibose adenine
  modified_base 11: mod_base = OTHER; note = 2-fluororibose adenine
  modified_base 12: mod_base = um
  modified_base 13: mod_base = OTHER; note = 2-fluororibose adenine
  modified_base 14: mod_base = gm
  modified_base 15: mod_base = OTHER; note = 2-fluororibose adenine
  modified_base 15..16: mod_base = OTHER; note R-N-(1,3-dimethylimidazolidin-2-ylidene)phosphoramidate
  modified_base 16: mod_base = um
  modified_base 16..17: mod_base = OTHER; note = S-phosphorothioate
  modified_base 17: mod_base = OTHER; note = 2-fluororibose uracil
  modified_base 17..18: mod_base = OTHER; note = S-phosphorothioate
  modified_base 18: mod_base = cm
  modified_base 18..19: mod_base = OTHER; note = S-phosphorothioate
  modified_base 19: mod_base = OTHER; note = 2-fluororibose uracil
  modified_base 19..20: mod_base = OTHER; note = S-phosphorothioate
  modified_base 20: mod_base = cm
  modified_base 20..21: mod_base = OTHER; note = S-phosphorothioate
  modified_base 21: mod_base = OTHER; note = 2-O-methylribose adenine
  source 1..21: mol_type = other RNA
tagtgcatgaatagattctca

SEQ ID NO: 720 - RNA, 21 nt, synthetic construct
  source 1..21: mol_type = other RNA
tagtgcatgaatagattctca

SEQ ID NO: 721 - RNA, 21 nt, synthetic construct
  misc_feature 1..21: note = Synthetic: WV-49638
  misc_feature 1..21: note = Synthetic: SSR-0104094
  modified_base 1: mod_base = um
  modified_base 1..2: mod_base = OTHER; note = S-phosphorothioate
  modified_base 2: mod_base = OTHER; note = 2-O-methylribose adenine
  modified_base 2..3: mod_base = OTHER; note = S-phosphorothioate
  modified_base 3: mod_base = gm
  modified_base 3..4: mod_base = OTHER; note = S-phosphorothioate
  modified_base 4: mod_base = um
  modified_base 4..5: mod_base = OTHER; note = S-phosphorothioate
  modified_base 5: mod_base = gm
  modified_base 5..6: mod_base = OTHER; note = S-phosphorothioate
  modified_base 6: mod_base = cm
  modified_base 6..7: mod_base = OTHER; note = S-phosphorothioate
  modified_base 7: mod_base = OTHER; note = 2-fluororibose adenine
  modified_base 7..8: mod_base = OTHER; note R-N-(1,3-dimethylimidazolidin-2-ylidene)phosphoramidate
  modified_base 8: mod_base = um
  modified_base 9: mod_base = OTHER; note = 2-fluororibose guanine
  modified_base 10: mod_base = OTHER; note = 2-fluororibose adenine
  modified_base 11: mod_base = OTHER; note = 2-fluororibose adenine
  modified_base 12: mod_base = um
  modified_base 13: mod_base = OTHER; note = 2-O-methylribose adenine
  modified_base 14: mod_base = gm
  modified_base 15: mod_base = OTHER; note = 2-O-methylribose adenine
  modified_base 15..16: mod_base = OTHER; note R-N-(1,3-dimethylimidazolidin-2-ylidene)phosphoramidate
  modified_base 16: mod_base = um
  modified_base 16..17: mod_base = OTHER; note = S-phosphorothioate
  modified_base 17: mod_base = um
  modified_base 17..18: mod_base = OTHER; note = S-phosphorothioate
  modified_base 18: mod_base = cm
  modified_base 18..19: mod_base = OTHER; note = S-phosphorothioate
  modified_base 19: mod_base = um
  modified_base 19..20: mod_base = OTHER; note = S-phosphorothioate
  modified_base 20: mod_base = cm
  modified_base 20..21: mod_base = OTHER; note = S-phosphorothioate
  modified_base 21: mod_base = OTHER; note = 2-O-methylribose adenine
  source 1..21: mol_type = other RNA
tagtgcatgaatagattctca

SEQ ID NO: 722 - RNA, 21 nt, synthetic construct
  misc_feature 1..21: note = Synthetic: WV-48426
  misc_feature 1..21: note = Synthetic: SSR-0104097
  modified_base 1: mod_base = um
  modified_base 1..2: mod_base = OTHER; note = S-phosphorothioate
  modified_base 2: mod_base = cm
  modified_base 2..3: mod_base = OTHER; note = S-phosphorothioate
  modified_base 3: mod_base = OTHER; note = 2-fluororibose uracil
  modified_base 3..4: mod_base = OTHER; note = S-phosphorothioate
  modified_base 4: mod_base = gm
  modified_base 4..5: mod_base = OTHER; note = S-phosphorothioate
  modified_base 5: mod_base = OTHER; note = 2-fluororibose uracil
  modified_base 5..6: mod_base = OTHER; note = S-phosphorothioate
  modified_base 6: mod_base = gm
  modified_base 6..7: mod_base = OTHER; note = S-phosphorothioate
  modified_base 7: mod_base = OTHER; note = 2-fluororibose guanine
  modified_base 7..8: mod_base = OTHER; note R-N-(1,3-dimethylimidazolidin-2-ylidene)phosphoramidate
  modified_base 8: mod_base = um
  modified_base 9: mod_base = OTHER; note = 2-fluororibose adenine
  modified_base 10: mod_base = OTHER; note = 2-fluororibose adenine
  modified_base 11: mod_base = OTHER; note = 2-fluororibose adenine
  modified_base 12: mod_base = cm
  modified_base 13: mod_base = OTHER; note = 2-fluororibose uracil
  modified_base 14: mod_base = cm
  modified_base 15: mod_base = OTHER; note = 2-fluororibose adenine
  modified_base 15..16: mod_base = OTHER; note R-N-(1,3-dimethylimidazolidin-2-ylidene)phosphoramidate
  modified_base 16: mod_base = OTHER; note = 2-O-methylribose adenine
  modified_base 16..17: mod_base = OTHER; note = S-phosphorothioate
  modified_base 17: mod_base = OTHER; note = 2-fluororibose cytosine
  modified_base 17..18: mod_base = OTHER; note = S-phosphorothioate
  modified_base 18: mod_base = OTHER; note = 2-O-methylribose adenine
  modified_base 18..19: mod_base = OTHER; note = S-phosphorothioate
  modified_base 19: mod_base = OTHER; note = 2-fluororibose uracil
  modified_base 19..20: mod_base = OTHER; note = S-phosphorothioate
  modified_base 20: mod_base = gm
  modified_base 20..21: mod_base = OTHER; note = S-phosphorothioate
  modified_base 21: mod_base = OTHER; note = 2-O-methylribose adenine
  source 1..21: mol_type = other RNA
tctgtggtaaactcaacatga

SEQ ID NO: 723 - RNA, 21 nt, synthetic construct
  source 1..21: mol_type = other RNA
tctgtggtaaactcaacatga

SEQ ID NO: 724 - RNA, 21 nt, synthetic construct
  misc_feature 1..21: note = Synthetic: WV-48432
  misc_feature 1..21: note = Synthetic: SSR-0104099
  modified_base 1: mod_base = um
  modified_base 1..2: mod_base = OTHER; note = S-phosphorothioate
  modified_base 2: mod_base = um
  modified_base 2..3: mod_base = OTHER; note = S-phosphorothioate
  modified_base 3: mod_base = OTHER; note = 2-fluororibose cytosine
  modified_base 3..4: mod_base = OTHER; note = S-phosphorothioate
  modified_base 4: mod_base = cm
  modified_base 4..5: mod_base = OTHER; note = S-phosphorothioate
  modified_base 5: mod_base = OTHER; note = 2-fluororibose uracil
  modified_base 5..6: mod_base = OTHER; note = S-phosphorothioate
  modified_base 6: mod_base = gm
  modified_base 6..7: mod_base = OTHER; note = S-phosphorothioate
  modified_base 7: mod_base = OTHER; note = 2-fluororibose adenine
  modified_base 7..8: mod_base = OTHER; note R-N-(1,3-dimethylimidazolidin-2-ylidene)phosphoramidate
  modified_base 8: mod_base = um
  modified_base 9: mod_base = OTHER; note = 2-fluororibose cytosine
  modified_base 10: mod_base = OTHER; note = 2-fluororibose adenine
  modified_base 11: mod_base = OTHER; note = 2-fluororibose cytosine
  modified_base 12: mod_base = um
  modified_base 13: mod_base = OTHER; note = 2-fluororibose adenine
  modified_base 14: mod_base = um
  modified_base 15: mod_base = OTHER; note = 2-fluororibose guanine
  modified_base 15..16: mod_base = OTHER; note R-N-(1,3-dimethylimidazolidin-2-ylidene)phosphoramidate
  modified_base 16: mod_base = cm
  modified_base 16..17: mod_base = OTHER; note = S-phosphorothioate
  modified_base 17: mod_base = OTHER; note = 2-fluororibose adenine
  modified_base 17..18: mod_base = OTHER; note = S-phosphorothioate
  modified_base 18: mod_base = um
  modified_base 18..19: mod_base = OTHER; note = S-phosphorothioate
  modified_base 19: mod_base = OTHER; note = 2-fluororibose uracil
  modified_base 19..20: mod_base = OTHER; note = S-phosphorothioate
  modified_base 20: mod_base = um
  modified_base 20..21: mod_base = OTHER; note = S-phosphorothioate
  modified_base 21: mod_base = OTHER; note = 2-O-methylribose adenine
  source 1..21: mol_type = other RNA
ttcctgatcactatgcattta

SEQ ID NO: 725 - RNA, 21 nt, synthetic construct
  source 1..21: mol_type = other RNA
ttcctgatcactatgcattta

SEQ ID NO: 726 - RNA, 23 nt, synthetic construct
  misc_feature 1..23: note = Synthetic: WV-50670
  misc_feature 1..23: note = Synthetic: SSR-0104100
  modified_base 1: mod_base = um
  modified_base 1..2: mod_base = OTHER; note = phosphorothioate
  modified_base 2: mod_base = OTHER; note = 2-fluororibose cytosine
  modified_base 2..3: mod_base = OTHER; note = phosphorothioate
  modified_base 3: mod_base = um
  modified_base 4: mod_base = OTHER; note = 2-fluororibose adenine
  modified_base 5: mod_base = cm
  modified_base 6: mod_base = OTHER; note = 2-fluororibose uracil
  modified_base 7: mod_base = um
  modified_base 8: mod_base = OTHER; note = 2-fluororibose guanine
  modified_base 9: mod_base = um
  modified_base 10: mod_base = OTHER; note = 2-fluororibose guanine
  modified_base 11: mod_base = um
  modified_base 12: mod_base = um
  modified_base 13: mod_base = OTHER; note = 2-O-methylribose adenine
  modified_base 14: mod_base = OTHER; note = 2-fluororibose cytosine
  modified_base 15: mod_base = OTHER; note = 2-O-methylribose adenine
  modified_base 16: mod_base = OTHER; note = 2-fluororibose guanine
  modified_base 17: mod_base = cm
  modified_base 18: mod_base = OTHER; note = 2-fluororibose adenine
  modified_base 19: mod_base = cm
  modified_base 20: mod_base = OTHER; note = 2-fluororibose adenine
  modified_base 21: mod_base = gm
  modified_base 21..22: mod_base = OTHER; note = phosphorothioate
  modified_base 22: mod_base = um
  modified_base 22..23: mod_base = OTHER; note = phosphorothioate
  modified_base 23: mod_base = um
  source 1..23: mol_type = other RNA
tctacttgtgttacagcacagtt

SEQ ID NO: 727 - RNA, 23 nt, synthetic construct
  misc_feature 1..23: note = Synthetic: WV-50672
  misc_feature 1..23: note = Synthetic: SSR-0104101
  modified_base 1: mod_base = um
  modified_base 1..2: mod_base = OTHER; note = phosphorothioate
  modified_base 2: mod_base = OTHER; note = 2-fluororibose cytosine
  modified_base 2..3: mod_base = OTHER; note = phosphorothioate
  modified_base 3: mod_base = um
  modified_base 4: mod_base = OTHER; note = 2-O-methylribose adenine
  modified_base 5: mod_base = cm
  modified_base 6: mod_base = OTHER; note = 2-fluororibose uracil
  modified_base 7: mod_base = um
  modified_base 8: mod_base = gm
  modified_base 9: mod_base = um
  modified_base 10: mod_base = gm
  modified_base 11: mod_base = um
  modified_base 12: mod_base = um
  modified_base 13: mod_base = OTHER; note = 2-O-methylribose adenine
  modified_base 14: mod_base = OTHER; note = 2-fluororibose cytosine
  modified_base 15: mod_base = OTHER; note = 2-O-methylribose adenine
  modified_base 16: mod_base = OTHER; note = 2-fluororibose guanine
  modified_base 17: mod_base = cm
  modified_base 18: mod_base = OTHER; note = 2-O-methylribose adenine
  modified_base 19: mod_base = cm
  modified_base 20: mod_base = OTHER; note = 2-O-methylribose adenine
  modified_base 21: mod_base = gm
  modified_base 21..22: mod_base = OTHER; note = phosphorothioate
  modified_base 22: mod_base = um
  modified_base 22..23: mod_base = OTHER; note = phosphorothioate
  modified_base 23: mod_base = um
  source 1..23: mol_type = other RNA
tctacttgtgttacagcacagtt

SEQ ID NO: 728 - RNA, 23 nt, synthetic construct
  misc_feature 1..23: note = Synthetic: WV-50674
  misc_feature 1..23: note = Synthetic: SSR-0104102
  modified_base 1: mod_base = um
  modified_base 1..2: mod_base = OTHER; note = phosphorothioate
  modified_base 2: mod_base = OTHER; note = 2-fluororibose guanine
  modified_base 2..3: mod_base = OTHER; note = phosphorothioate
  modified_base 3: mod_base = OTHER; note = 2-O-methylribose adenine
  modified_base 4: mod_base = OTHER; note = 2-fluororibose guanine
  modified_base 5: mod_base = OTHER; note = 2-O-methylribose adenine
  modified_base 6: mod_base = OTHER; note = 2-fluororibose adenine
  modified_base 7: mod_base = um
  modified_base 8: mod_base = OTHER; note = 2-fluororibose cytosine
  modified_base 9: mod_base = um
  modified_base 10: mod_base = OTHER; note = 2-fluororibose adenine
  modified_base 11: mod_base = um
  modified_base 12: mod_base = um
  modified_base 13: mod_base = cm
  modified_base 14: mod_base = OTHER; note = 2-fluororibose adenine
  modified_base 15: mod_base = um
  modified_base 16: mod_base = OTHER; note = 2-fluororibose guanine
  modified_base 17: mod_base = cm
  modified_base 18: mod_base = OTHER; note = 2-fluororibose adenine
  modified_base 19: mod_base = cm
  modified_base 20: mod_base = OTHER; note = 2-fluororibose uracil
  modified_base 21: mod_base = OTHER; note = 2-O-methylribose adenine
  modified_base 21..22: mod_base = OTHER; note = phosphorothioate
  modified_base 22: mod_base = um
  modified_base 22..23: mod_base = OTHER; note = phosphorothioate
  modified_base 23: mod_base = um
  source 1..23: mol_type = other RNA
tgagaatctattcatgcactatt

SEQ ID NO: 729 - RNA, 23 nt, synthetic construct
  misc_feature 1..23: note = Synthetic: WV-50676
  misc_feature 1..23: note = Synthetic: SSR-0104103
  modified_base 1: mod_base = um
  modified_base 1..2: mod_base = OTHER; note = phosphorothioate
  modified_base 2: mod_base = OTHER; note = 2-fluororibose guanine
  modified_base 2..3: mod_base = OTHER; note = phosphorothioate
  modified_base 3: mod_base = OTHER; note = 2-O-methylribose adenine
  modified_base 4: mod_base = gm
  modified_base 5: mod_base = OTHER; note = 2-O-methylribose adenine
  modified_base 6: mod_base = OTHER; note = 2-fluororibose adenine
  modified_base 7: mod_base = um
  modified_base 8: mod_base = cm
  modified_base 9: mod_base = um
  modified_base 10: mod_base = OTHER; note = 2-O-methylribose adenine
  modified_base 11: mod_base = um
  modified_base 12: mod_base = um
  modified_base 13: mod_base = cm
  modified_base 14: mod_base = OTHER; note = 2-fluororibose adenine
  modified_base 15: mod_base = um
  modified_base 16: mod_base = OTHER; note = 2-fluororibose guanine
  modified_base 17: mod_base = cm
  modified_base 18: mod_base = OTHER; note = 2-O-methylribose adenine
  modified_base 19: mod_base = cm
  modified_base 20: mod_base = um
  modified_base 21: mod_base = OTHER; note = 2-O-methylribose adenine
  modified_base 21..22: mod_base = OTHER; note = phosphorothioate
  modified_base 22: mod_base = um
  modified_base 22..23: mod_base = OTHER; note = phosphorothioate
  modified_base 23: mod_base = um
  source 1..23: mol_type = other RNA
tgagaatctattcatgcactatt

SEQ ID NO: 730 - RNA, 23 nt, synthetic construct
  misc_feature 1..23: note = Synthetic: WV-50666
  misc_feature 1..23: note = Synthetic: SSR-0104104
  modified_base 1: mod_base = um
  modified_base 1..2: mod_base = OTHER; note = phosphorothioate
  modified_base 2: mod_base = OTHER; note = 2-fluororibose uracil
  modified_base 2..3: mod_base = OTHER; note = phosphorothioate
  modified_base 3: mod_base = OTHER; note = 2-O-methylribose adenine
  modified_base 4: mod_base = OTHER; note = 2-fluororibose adenine
  modified_base 5: mod_base = um
  modified_base 6: mod_base = OTHER; note = 2-fluororibose uracil
  modified_base 7: mod_base = cm
  modified_base 8: mod_base = OTHER; note = 2-fluororibose adenine
  modified_base 9: mod_base = OTHER; note = 2-O-methylribose adenine
  modified_base 10: mod_base = OTHER; note = 2-fluororibose guanine
  modified_base 11: mod_base = um
  modified_base 12: mod_base = um
  modified_base 13: mod_base = cm
  modified_base 14: mod_base = OTHER; note = 2-fluororibose adenine
  modified_base 15: mod_base = gm
  modified_base 16: mod_base = OTHER; note = 2-fluororibose guanine
  modified_base 17: mod_base = cm
  modified_base 18: mod_base = OTHER; note = 2-fluororibose adenine
  modified_base 19: mod_base = um
  modified_base 20: mod_base = OTHER; note = 2-fluororibose cytosine
  modified_base 21: mod_base = um
  modified_base 21..22: mod_base = OTHER; note = phosphorothioate
  modified_base 22: mod_base = um
  modified_base 22..23: mod_base = OTHER; note = phosphorothioate
  modified_base 23: mod_base = um
  source 1..23: mol_type = other RNA
ttaattcaagttcaggcatcttt

SEQ ID NO: 731 - RNA, 23 nt, synthetic construct
  misc_feature 1..23: note = Synthetic: WV-50668
  misc_feature 1..23: note = Synthetic: SSR-0104105
  modified_base 1: mod_base = um
  modified_base 1..2: mod_base = OTHER; note = phosphorothioate
  modified_base 2: mod_base = OTHER; note = 2-fluororibose uracil
  modified_base 2..3: mod_base = OTHER; note = phosphorothioate
  modified_base 3: mod_base = OTHER; note = 2-O-methylribose adenine
  modified_base 4: mod_base = OTHER; note = 2-O-methylribose adenine
  modified_base 5: mod_base = um
  modified_base 6: mod_base = OTHER; note = 2-fluororibose uracil
  modified_base 7: mod_base = cm
  modified_base 8: mod_base = OTHER; note = 2-O-methylribose adenine
  modified_base 9: mod_base = OTHER; note = 2-O-methylribose adenine
  modified_base 10: mod_base = gm
  modified_base 11: mod_base = um
  modified_base 12: mod_base = um
  modified_base 13: mod_base = cm
  modified_base 14: mod_base = OTHER; note = 2-fluororibose adenine
  modified_base 15: mod_base = gm
  modified_base 16: mod_base = OTHER; note = 2-fluororibose guanine
  modified_base 17: mod_base = cm
  modified_base 18: mod_base = OTHER; note = 2-O-methylribose adenine
  modified_base 19: mod_base = um
  modified_base 20: mod_base = cm
  modified_base 21: mod_base = um
  modified_base 21..22: mod_base = OTHER; note = phosphorothioate
  modified_base 22: mod_base = um
  modified_base 22..23: mod_base = OTHER; note = phosphorothioate
  modified_base 23: mod_base = um
  source 1..23: mol_type = other RNA
ttaattcaagttcaggcatcttt

SEQ ID NO: 732 - RNA, 21 nt, synthetic construct
  misc_feature 1..21: note = Synthetic: WV-50673
  misc_feature 1..21: note = Synthetic: SSR-0104106
  modified_base 1: mod_base = um
  modified_base 1..2: mod_base = OTHER; note = phosphorothioate
  modified_base 2: mod_base = OTHER; note = 2-O-methylribose adenine
  modified_base 3: mod_base = OTHER; note = 2-fluororibose guanine
  modified_base 4: mod_base = um
  modified_base 5: mod_base = OTHER; note = 2-fluororibose guanine
  modified_base 6: mod_base = cm
  modified_base 7: mod_base = OTHER; note = 2-fluororibose adenine
  modified_base 8: mod_base = um
  modified_base 9: mod_base = OTHER; note = 2-fluororibose guanine
  modified_base 10: mod_base = OTHER; note = 2-fluororibose adenine
  modified_base 11: mod_base = OTHER; note = 2-fluororibose adenine
  modified_base 12: mod_base = um
  modified_base 13: mod_base = OTHER; note = 2-fluororibose adenine
  modified_base 14: mod_base = gm
  modified_base 15: mod_base = OTHER; note = 2-fluororibose adenine
  modified_base 16: mod_base = um
  modified_base 17: mod_base = OTHER; note = 2-fluororibose uracil
  modified_base 18: mod_base = cm
  modified_base 19: mod_base = OTHER; note = 2-fluororibose uracil
  modified_base 20: mod_base = cm
  modified_base 20..21: mod_base = OTHER; note = phosphorothioate
  modified_base 21: mod_base = OTHER; note = 2-fluororibose adenine
  source 1..21: mol_type = other RNA
tagtgcatgaatagattctca

SEQ ID NO: 733 - RNA, 21 nt, synthetic construct
  misc_feature 1..21: note = Synthetic: WV-50675
  misc_feature 1..21: note = Synthetic: SSR-0104107
  modified_base 1: mod_base = um
  modified_base 1..2: mod_base = OTHER; note = phosphorothioate
  modified_base 2: mod_base = OTHER; note = 2-O-methylribose adenine
  modified_base 3: mod_base = gm
  modified_base 4: mod_base = um
  modified_base 5: mod_base = gm
  modified_base 6: mod_base = cm
  modified_base 7: mod_base = OTHER; note = 2-fluororibose adenine
  modified_base 8: mod_base = um
  modified_base 9: mod_base = OTHER; note = 2-fluororibose guanine
  modified_base 10: mod_base = OTHER; note = 2-fluororibose adenine
  modified_base 11: mod_base = OTHER; note = 2-fluororibose adenine
  modified_base 12: mod_base = um
  modified_base 13: mod_base = OTHER; note = 2-O-methylribose adenine
  modified_base 14: mod_base = gm
  modified_base 15: mod_base = OTHER; note = 2-O-methylribose adenine
  modified_base 16: mod_base = um
  modified_base 17: mod_base = um
  modified_base 18: mod_base = cm
  modified_base 19: mod_base = um
  modified_base 20: mod_base = cm
  modified_base 20..21: mod_base = OTHER; note = phosphorothioate
  modified_base 21: mod_base = OTHER; note = 2-O-methylribose adenine
  source 1..21: mol_type = other RNA
tagtgcatgaatagattctca

SEQ ID NO: 734 - RNA, 23 nt, synthetic construct
  misc_feature 1..23: note = Synthetic: SSR-0106170
  modified_base 1: mod_base = um
  modified_base 1..2: mod_base = OTHER; note = R-phosphorothioate
  modified_base 2: mod_base = OTHER; note = 2-fluororibose cytosine
  modified_base 2..3: mod_base = OTHER; note = S-phosphorothioate
  modified_base 3: mod_base = um
  modified_base 3..4: mod_base = OTHER; note S-N-(1,3-dimethylimidazolidin-2-ylidene)phosphoramidate
  modified_base 4: mod_base = OTHER; note = 2-fluororibose adenine
  modified_base 5: mod_base = cm
  modified_base 6: mod_base = OTHER; note = 2-fluororibose uracil
  modified_base 7: mod_base = um
  modified_base 7..8: mod_base = OTHER; note S-N-(1,3-dimethylimidazolidin-2-ylidene)phosphoramidate
  modified_base 8: mod_base = OTHER; note = 2-fluororibose guanine
  modified_base 9: mod_base = um
  modified_base 10: mod_base = OTHER; note = 2-fluororibose guanine
  modified_base 11: mod_base = um
  modified_base 12: mod_base = um
  modified_base 13: mod_base = OTHER; note = 2-O-methylribose adenine
  modified_base 13..14: mod_base = OTHER; note = S-phosphorothioate
  modified_base 14: mod_base = OTHER; note = 2-fluororibose cytosine
  modified_base 14..15: mod_base = OTHER; note = S-phosphorothioate
  modified_base 15: mod_base = OTHER; note = 2-O-methylribose adenine
  modified_base 15..16: mod_base = OTHER; note = S-phosphorothioate
  modified_base 16: mod_base = OTHER; note = 2-fluororibose guanine
  modified_base 16..17: mod_base = OTHER; note = S-phosphorothioate
  modified_base 17: mod_base = cm
  modified_base 17..18: mod_base = OTHER; note = S-phosphorothioate
  modified_base 18: mod_base = OTHER; note = 2-fluororibose adenine
  modified_base 18..19: mod_base = OTHER; note = S-phosphorothioate
  modified_base 19: mod_base = cm
  modified_base 19..20: mod_base = OTHER; note S-N-(1,3-dimethylimidazolidin-2-ylidene)phosphoramidate
  modified_base 20: mod_base = OTHER; note = 2-fluororibose adenine
  modified_base 20..21: mod_base = OTHER; note = S-phosphorothioate
  modified_base 21: mod_base = gm
  modified_base 21..22: mod_base = OTHER; note = S-phosphorothioate
  modified_base 22: mod_base = um
  modified_base 22..23: mod_base = OTHER; note = S-phosphorothioate
  modified_base 23: mod_base = um
  source 1..23: mol_type = other RNA
tctacttgtgttacagcacagtt

SEQ ID NO: 735 - RNA, 23 nt, synthetic construct
  misc_feature 1..23: note = Synthetic: SSR-0106171
  modified_base 1: mod_base = um
  modified_base 1..2: mod_base = OTHER; note = R-phosphorothioate
  modified_base 2: mod_base = OTHER; note = 2-fluororibose cytosine
  modified_base 2..3: mod_base = OTHER; note = S-phosphorothioate
  modified_base 3: mod_base = um
  modified_base 3..4: mod_base = OTHER; note S-N-(1,3-dimethylimidazolidin-2-ylidene)phosphoramidate
  modified_base 4: mod_base = OTHER; note = 2-fluororibose adenine
  modified_base 5: mod_base = cm
  modified_base 6: mod_base = OTHER; note = 2-fluororibose uracil
  modified_base 7: mod_base = um
  modified_base 8: mod_base = OTHER; note = 2-fluororibose guanine
  modified_base 9: mod_base = um
  modified_base 10: mod_base = OTHER; note = 2-fluororibose guanine
  modified_base 10..11: mod_base = OTHER; note S-N-(1,3-dimethylimidazolidin-2-ylidene)phosphoramidate
  modified_base 11: mod_base = um
  modified_base 12: mod_base = um
  modified_base 13: mod_base = OTHER; note = 2-O-methylribose adenine
  modified_base 13..14: mod_base = OTHER; note = S-phosphorothioate
  modified_base 14: mod_base = OTHER; note = 2-fluororibose cytosine
  modified_base 14..15: mod_base = OTHER; note = S-phosphorothioate
  modified_base 15: mod_base = OTHER; note = 2-O-methylribose adenine
  modified_base 15..16: mod_base = OTHER; note = S-phosphorothioate
  modified_base 16: mod_base = OTHER; note = 2-fluororibose guanine
  modified_base 16..17: mod_base = OTHER; note = S-phosphorothioate
  modified_base 17: mod_base = cm
  modified_base 17..18: mod_base = OTHER; note = S-phosphorothioate
  modified_base 18: mod_base = OTHER; note = 2-fluororibose adenine
  modified_base 18..19: mod_base = OTHER; note = S-phosphorothioate
  modified_base 19: mod_base = cm
  modified_base 19..20: mod_base = OTHER; note S-N-(1,3-dimethylimidazolidin-2-ylidene)phosphoramidate
  modified_base 20: mod_base = OTHER; note = 2-fluororibose adenine
  modified_base 20..21: mod_base = OTHER; note = S-phosphorothioate
  modified_base 21: mod_base = gm
  modified_base 21..22: mod_base = OTHER; note = S-phosphorothioate
  modified_base 22: mod_base = um
  modified_base 22..23: mod_base = OTHER; note = S-phosphorothioate
  modified_base 23: mod_base = um
  source 1..23: mol_type = other RNA
tctacttgtgttacagcacagtt

SEQ ID NO: 736 - RNA, 23 nt, synthetic construct
  misc_feature 1..23: note = Synthetic: SSR-0106172
  modified_base 1: mod_base = um
  modified_base 1..2: mod_base = OTHER; note = R-phosphorothioate
  modified_base 2: mod_base = OTHER; note = 2-fluororibose cytosine
  modified_base 2..3: mod_base = OTHER; note = S-phosphorothioate
  modified_base 3: mod_base = um
  modified_base 3..4: mod_base = OTHER; note S-N-(1,3-dimethylimidazolidin-2-ylidene)phosphoramidate
  modified_base 4: mod_base = OTHER; note = 2-fluororibose adenine
  modified_base 5: mod_base = cm
  modified_base 6: mod_base = OTHER; note = 2-fluororibose uracil
  modified_base 7: mod_base = um
  modified_base 8: mod_base = OTHER; note = 2-fluororibose guanine
  modified_base 9: mod_base = um
  modified_base 10: mod_base = gm
  modified_base 10..11: mod_base = OTHER; note S-N-(1,3-dimethylimidazolidin-2-ylidene)phosphoramidate
  modified_base 11: mod_base = OTHER; note = 2-fluororibose uracil
  modified_base 12: mod_base = um
  modified_base 13: mod_base = OTHER; note = 2-O-methylribose adenine
  modified_base 13..14: mod_base = OTHER; note = S-phosphorothioate
  modified_base 14: mod_base = OTHER; note = 2-fluororibose cytosine
  modified_base 14..15: mod_base = OTHER; note = S-phosphorothioate
  modified_base 15: mod_base = OTHER; note = 2-O-methylribose adenine
  modified_base 15..16: mod_base = OTHER; note = S-phosphorothioate
  modified_base 16: mod_base = OTHER; note = 2-fluororibose guanine
  modified_base 16..17: mod_base = OTHER; note = S-phosphorothioate
  modified_base 17: mod_base = cm
  modified_base 17..18: mod_base = OTHER; note = S-phosphorothioate
  modified_base 18: mod_base = OTHER; note = 2-fluororibose adenine
  modified_base 18..19: mod_base = OTHER; note = S-phosphorothioate
  modified_base 19: mod_base = cm
  modified_base 19..20: mod_base = OTHER; note S-N-(1,3-dimethylimidazolidin-2-ylidene)phosphoramidate
  modified_base 20: mod_base = OTHER; note = 2-fluororibose adenine
  modified_base 20..21: mod_base = OTHER; note = S-phosphorothioate
  modified_base 21: mod_base = gm
  modified_base 21..22: mod_base = OTHER; note = S-phosphorothioate
  modified_base 22: mod_base = um
  modified_base 22..23: mod_base = OTHER; note = S-phosphorothioate
  modified_base 23: mod_base = um
  source 1..23: mol_type = other RNA
tctacttgtgttacagcacagtt

SEQ ID NO: 737 - RNA, 23 nt, synthetic construct
  misc_feature 1..23: note = Synthetic: SSR-0106173
  modified_base 1: mod_base = um
  modified_base 1..2: mod_base = OTHER; note = R-phosphorothioate
  modified_base 2: mod_base = OTHER; note = 2-fluororibose cytosine
  modified_base 2..3: mod_base = OTHER; note = S-phosphorothioate
  modified_base 3: mod_base = um
  modified_base 3..4: mod_base = OTHER; note S-N-(1,3-dimethylimidazolidin-2-ylidene)phosphoramidate
  modified_base 4: mod_base = OTHER; note = 2-fluororibose adenine
  modified_base 5: mod_base = cm
  modified_base 6: mod_base = OTHER; note = 2-fluororibose uracil
  modified_base 7: mod_base = um
  modified_base 8: mod_base = gm
  modified_base 9: mod_base = um
  modified_base 10: mod_base = gm
  modified_base 10..11: mod_base = OTHER; note S-N-(1,3-dimethylimidazolidin-2-ylidene)phosphoramidate
  modified_base 11: mod_base = OTHER; note = 2-fluororibose uracil
  modified_base 12: mod_base = um
  modified_base 13: mod_base = OTHER; note = 2-O-methylribose adenine
  modified_base 13..14: mod_base = OTHER; note = S-phosphorothioate
  modified_base 14: mod_base = OTHER; note = 2-fluororibose cytosine
  modified_base 14..15: mod_base = OTHER; note = S-phosphorothioate
  modified_base 15: mod_base = OTHER; note = 2-O-methylribose adenine
  modified_base 15..16: mod_base = OTHER; note = S-phosphorothioate
  modified_base 16: mod_base = OTHER; note = 2-fluororibose guanine
  modified_base 16..17: mod_base = OTHER; note = S-phosphorothioate
  modified_base 17: mod_base = cm
  modified_base 17..18: mod_base = OTHER; note = S-phosphorothioate
  modified_base 18: mod_base = OTHER; note = 2-O-methylribose adenine
  modified_base 18..19: mod_base = OTHER; note = S-phosphorothioate
  modified_base 19: mod_base = cm
  modified_base 19..20: mod_base = OTHER; note S-N-(1,3-dimethylimidazolidin-2-ylidene)phosphoramidate
  modified_base 20: mod_base = OTHER; note = 2-fluororibose adenine
  modified_base 20..21: mod_base = OTHER; note = S-phosphorothioate
  modified_base 21: mod_base = gm
  modified_base 21..22: mod_base = OTHER; note = S-phosphorothioate
  modified_base 22: mod_base = um
  modified_base 22..23: mod_base = OTHER; note = S-phosphorothioate
  modified_base 23: mod_base = um
  source 1..23: mol_type = other RNA
tctacttgtgttacagcacagtt

SEQ ID NO: 738 - RNA, 23 nt, synthetic construct
  misc_feature 1..23: note = Synthetic: SSR-0106174
  modified_base 1: mod_base = um
  modified_base 1..2: mod_base = OTHER; note = R-phosphorothioate
  modified_base 2: mod_base = OTHER; note = 2-fluororibose cytosine
  modified_base 2..3: mod_base = OTHER; note = S-phosphorothioate
  modified_base 3: mod_base = um
  modified_base 3..4: mod_base = OTHER; note S-N-(1,3-dimethylimidazolidin-2-ylidene)phosphoramidate
  modified_base 4: mod_base = OTHER; note = 2-fluororibose adenine
  modified_base 5: mod_base = cm
  modified_base 6: mod_base = OTHER; note = 2-fluororibose uracil
  modified_base 7: mod_base = um
  modified_base 7..8: mod_base = OTHER; note S-N-(1,3-dimethylimidazolidin-2-ylidene)phosphoramidate
  modified_base 8: mod_base = OTHER; note = 2-fluororibose guanine
  modified_base 9: mod_base = um
  modified_base 10: mod_base = OTHER; note = 2-fluororibose guanine
  modified_base 11: mod_base = um
  modified_base 12: mod_base = um
  modified_base 13: mod_base = OTHER; note = 2-O-methylribose adenine
  modified_base 13..14: mod_base = OTHER; note = S-phosphorothioate
  modified_base 14: mod_base = OTHER; note = 2-fluororibose cytosine
  modified_base 14..15: mod_base = OTHER; note = S-phosphorothioate
  modified_base 15: mod_base = OTHER; note = 2-O-methylribose adenine
  modified_base 15..16: mod_base = OTHER; note = S-phosphorothioate
  modified_base 16: mod_base = OTHER; note = 2-fluororibose guanine
  modified_base 16..17: mod_base = OTHER; note = S-phosphorothioate
  modified_base 17: mod_base = cm
  modified_base 17..18: mod_base = OTHER; note = S-phosphorothioate
  modified_base 18: mod_base = OTHER; note = 2-fluororibose adenine
  modified_base 18..19: mod_base = OTHER; note = S-phosphorothioate
  modified_base 19: mod_base = cm
  modified_base 19..20: mod_base = OTHER; note = S-phosphorothioate
  modified_base 20: mod_base = OTHER; note = 2-fluororibose adenine
  modified_base 20..21: mod_base = OTHER; note = S-phosphorothioate
  modified_base 21: mod_base = gm
  modified_base 21..22: mod_base = OTHER; note = S-phosphorothioate
  modified_base 22: mod_base = um
  modified_base 22..23: mod_base = OTHER; note = S-phosphorothioate
  modified_base 23: mod_base = um
  source 1..23: mol_type = other RNA
tctacttgtgttacagcacagtt

SEQ ID NO: 739 - RNA, 23 nt, synthetic construct
  misc_feature 1..23: note = Synthetic: SSR-0106175
  modified_base 1: mod_base = um
  modified_base 1..2: mod_base = OTHER; note = R-phosphorothioate
  modified_base 2: mod_base = OTHER; note = 2-fluororibose cytosine
  modified_base 2..3: mod_base = OTHER; note = S-phosphorothioate
  modified_base 3: mod_base = um
  modified_base 3..4: mod_base = OTHER; note S-N-(1,3-dimethylimidazolidin-2-ylidene)phosphoramidate
  modified_base 4: mod_base = OTHER; note = 2-fluororibose adenine
  modified_base 5: mod_base = cm
  modified_base 6: mod_base = OTHER; note = 2-fluororibose uracil
  modified_base 7: mod_base = um
  modified_base 8: mod_base = OTHER; note = 2-fluororibose guanine
  modified_base 9: mod_base = um
  modified_base 10: mod_base = OTHER; note = 2-fluororibose guanine
  modified_base 10..11: mod_base = OTHER; note S-N-(1,3-dimethylimidazolidin-2-ylidene)phosphoramidate
  modified_base 11: mod_base = um
  modified_base 12: mod_base = um
  modified_base 13: mod_base = OTHER; note = 2-O-methylribose adenine
  modified_base 13..14: mod_base = OTHER; note = S-phosphorothioate
  modified_base 14: mod_base = OTHER; note = 2-fluororibose cytosine
  modified_base 14..15: mod_base = OTHER; note = S-phosphorothioate
  modified_base 15: mod_base = OTHER; note = 2-O-methylribose adenine
  modified_base 15..16: mod_base = OTHER; note = S-phosphorothioate
  modified_base 16: mod_base = OTHER; note = 2-fluororibose guanine
  modified_base 16..17: mod_base = OTHER; note = S-phosphorothioate
  modified_base 17: mod_base = cm
  modified_base 17..18: mod_base = OTHER; note = S-phosphorothioate
  modified_base 18: mod_base = OTHER; note = 2-fluororibose adenine
  modified_base 18..19: mod_base = OTHER; note = S-phosphorothioate
  modified_base 19: mod_base = cm
  modified_base 19..20: mod_base = OTHER; note = S-phosphorothioate
  modified_base 20: mod_base = OTHER; note = 2-fluororibose adenine
  modified_base 20..21: mod_base = OTHER; note = S-phosphorothioate
  modified_base 21: mod_base = gm
  modified_base 21..22: mod_base = OTHER; note = S-phosphorothioate
  modified_base 22: mod_base = um
  modified_base 22..23: mod_base = OTHER; note = S-phosphorothioate
  modified_base 23: mod_base = um
  source 1..23: mol_type = other RNA
tctacttgtgttacagcacagtt

SEQ ID NO: 740 - RNA, 23 nt, synthetic construct
  misc_feature 1..23: note = Synthetic: SSR-0106176
  modified_base 1: mod_base = um
  modified_base 1..2: mod_base = OTHER; note = R-phosphorothioate
  modified_base 2: mod_base = OTHER; note = 2-fluororibose cytosine
  modified_base 2..3: mod_base = OTHER; note = S-phosphorothioate
  modified_base 3: mod_base = um
  modified_base 3..4: mod_base = OTHER; note S-N-(1,3-dimethylimidazolidin-2-ylidene)phosphoramidate
  modified_base 4: mod_base = OTHER; note = 2-fluororibose adenine
  modified_base 5: mod_base = cm
  modified_base 6: mod_base = OTHER; note = 2-fluororibose uracil
  modified_base 7: mod_base = um
  modified_base 8: mod_base = OTHER; note = 2-fluororibose guanine
  modified_base 9: mod_base = um
  modified_base 10: mod_base = gm
  modified_base 10..11: mod_base = OTHER; note S-N-(1,3-dimethylimidazolidin-2-ylidene)phosphoramidate
  modified_base 11: mod_base = OTHER; note = 2-fluororibose uracil
  modified_base 12: mod_base = um
  modified_base 13: mod_base = OTHER; note = 2-O-methylribose adenine
  modified_base 13..14: mod_base = OTHER; note = S-phosphorothioate
  modified_base 14: mod_base = OTHER; note = 2-fluororibose cytosine
  modified_base 14..15: mod_base = OTHER; note = S-phosphorothioate
  modified_base 15: mod_base = OTHER; note = 2-O-methylribose adenine
  modified_base 15..16: mod_base = OTHER; note = S-phosphorothioate
  modified_base 16: mod_base = OTHER; note = 2-fluororibose guanine
  modified_base 16..17: mod_base = OTHER; note = S-phosphorothioate
  modified_base 17: mod_base = cm
  modified_base 17..18: mod_base = OTHER; note = S-phosphorothioate
  modified_base 18: mod_base = OTHER; note = 2-fluororibose adenine
  modified_base 18..19: mod_base = OTHER; note = S-phosphorothioate
  modified_base 19: mod_base = cm
  modified_base 19..20: mod_base = OTHER; note = S-phosphorothioate
  modified_base 20: mod_base = OTHER; note = 2-fluororibose adenine
  modified_base 20..21: mod_base = OTHER; note = S-phosphorothioate
  modified_base 21: mod_base = gm
  modified_base 21..22: mod_base = OTHER; note = S-phosphorothioate
  modified_base 22: mod_base = um
  modified_base 22..23: mod_base = OTHER; note = S-phosphorothioate
  modified_base 23: mod_base = um
  source 1..23: mol_type = other RNA
tctacttgtgttacagcacagtt

SEQ ID NO: 741 - RNA, 23 nt, synthetic construct
  misc_feature 1..23: note = Synthetic: SSR-0106177
  modified_base 1: mod_base = um
  modified_base 1..2: mod_base = OTHER; note = R-phosphorothioate
  modified_base 2: mod_base = OTHER; note = 2-fluororibose cytosine
  modified_base 2..3: mod_base = OTHER; note = S-phosphorothioate
  modified_base 3: mod_base = um
  modified_base 3..4: mod_base = OTHER; note S-N-(1,3-dimethylimidazolidin-2-ylidene)phosphoramidate
  modified_base 4: mod_base = OTHER; note = 2-fluororibose adenine
  modified_base 5: mod_base = cm
  modified_base 6: mod_base = OTHER; note = 2-fluororibose uracil
  modified_base 7: mod_base = um
  modified_base 8: mod_base = gm
  modified_base 9: mod_base = um
  modified_base 10: mod_base = gm
  modified_base 10..11: mod_base = OTHER; note S-N-(1,3-dimethylimidazolidin-2-ylidene)phosphoramidate
  modified_base 11: mod_base = OTHER; note = 2-fluororibose uracil
  modified_base 12: mod_base = um
  modified_base 13: mod_base = OTHER; note = 2-O-methylribose adenine
  modified_base 13..14: mod_base = OTHER; note = S-phosphorothioate
  modified_base 14: mod_base = OTHER; note = 2-fluororibose cytosine
  modified_base 14..15: mod_base = OTHER; note = S-phosphorothioate
  modified_base 15: mod_base = OTHER; note = 2-O-methylribose adenine
  modified_base 15..16: mod_base = OTHER; note = S-phosphorothioate
  modified_base 16: mod_base = OTHER; note = 2-fluororibose guanine
  modified_base 16..17: mod_base = OTHER; note = S-phosphorothioate
  modified_base 17: mod_base = cm
  modified_base 17..18: mod_base = OTHER; note = S-phosphorothioate
  modified_base 18: mod_base = OTHER; note = 2-O-methylribose adenine
  modified_base 18..19: mod_base = OTHER; note = S-phosphorothioate
  modified_base 19: mod_base = cm
  modified_base 19..20: mod_base = OTHER; note = S-phosphorothioate
  modified_base 20: mod_base = OTHER; note = 2-fluororibose adenine
  modified_base 20..21: mod_base = OTHER; note = S-phosphorothioate
  modified_base 21: mod_base = gm
  modified_base 21..22: mod_base = OTHER; note = S-phosphorothioate
  modified_base 22: mod_base = um
  modified_base 22..23: mod_base = OTHER; note = S-phosphorothioate
  modified_base 23: mod_base = um
  source 1..23: mol_type = other RNA
tctacttgtgttacagcacagtt

SEQ ID NO: 742 - RNA, 23 nt, synthetic construct
  misc_feature 1..23: note = Synthetic: SSR-0106178
  modified_base 1: mod_base = um
  modified_base 1..2: mod_base = OTHER; note = R-phosphorothioate
  modified_base 2: mod_base = OTHER; note = 2-fluororibose cytosine
  modified_base 2..3: mod_base = OTHER; note = S-phosphorothioate
  modified_base 3: mod_base = um
  modified_base 3..4: mod_base = OTHER; note S-N-(1,3-dimethylimidazolidin-2-ylidene)phosphoramidate
  modified_base 4: mod_base = OTHER; note = 2-fluororibose adenine
  modified_base 5: mod_base = cm
  modified_base 6: mod_base = OTHER; note = 2-fluororibose uracil
  modified_base 7: mod_base = um
  modified_base 7..8: mod_base = OTHER; note S-N-(1,3-dimethylimidazolidin-2-ylidene)phosphoramidate
  modified_base 8: mod_base = OTHER; note = 2-fluororibose guanine
  modified_base 9: mod_base = um
  modified_base 10: mod_base = OTHER; note = 2-fluororibose guanine
  modified_base 11: mod_base = um
  modified_base 12: mod_base = um
  modified_base 13: mod_base = OTHER; note = 2-O-methylribose adenine
  modified_base 13..14: mod_base = OTHER; note = S-phosphorothioate
  modified_base 14: mod_base = OTHER; note = 2-fluororibose cytosine
  modified_base 14..15: mod_base = OTHER; note = S-phosphorothioate
  modified_base 15: mod_base = OTHER; note = 2-O-methylribose adenine
  modified_base 15..16: mod_base = OTHER; note S-N-(1,3-dimethylimidazolidin-2-ylidene)phosphoramidate
  modified_base 16: mod_base = OTHER; note = 2-fluororibose guanine
  modified_base 16..17: mod_base = OTHER; note = S-phosphorothioate
  modified_base 17: mod_base = cm
  modified_base 17..18: mod_base = OTHER; note = S-phosphorothioate
  modified_base 18: mod_base = OTHER; note = 2-fluororibose adenine
  modified_base 18..19: mod_base = OTHER; note S-N-(1,3-dimethylimidazolidin-2-ylidene)phosphoramidate
  modified_base 19: mod_base = cm
  modified_base 19..20: mod_base = OTHER; note = S-phosphorothioate
  modified_base 20: mod_base = OTHER; note = 2-fluororibose adenine
  modified_base 20..21: mod_base = OTHER; note = S-phosphorothioate
  modified_base 21: mod_base = gm
  modified_base 21..22: mod_base = OTHER; note = S-phosphorothioate
  modified_base 22: mod_base = um
  modified_base 22..23: mod_base = OTHER; note = S-phosphorothioate
  modified_base 23: mod_base = um
  source 1..23: mol_type = other RNA
tctacttgtgttacagcacagtt

SEQ ID NO: 743 - RNA, 23 nt, synthetic construct
  misc_feature 1..23: note = Synthetic: SSR-0106179
  modified_base 1: mod_base = um
  modified_base 1..2: mod_base = OTHER; note = R-phosphorothioate
  modified_base 2: mod_base = OTHER; note = 2-fluororibose cytosine
  modified_base 2..3: mod_base = OTHER; note = S-phosphorothioate
  modified_base 3: mod_base = um
  modified_base 3..4: mod_base = OTHER; note S-N-(1,3-dimethylimidazolidin-2-ylidene)phosphoramidate
  modified_base 4: mod_base = OTHER; note = 2-fluororibose adenine
  modified_base 5: mod_base = cm
  modified_base 6: mod_base = OTHER; note = 2-fluororibose uracil
  modified_base 7: mod_base = um
  modified_base 7..8: mod_base = OTHER; note S-N-(1,3-dimethylimidazolidin-2-ylidene)phosphoramidate
  modified_base 8: mod_base = OTHER; note = 2-fluororibose guanine
  modified_base 9: mod_base = um
  modified_base 10: mod_base = OTHER; note = 2-fluororibose guanine
  modified_base 11: mod_base = um
  modified_base 12: mod_base = um
  modified_base 13: mod_base = OTHER; note = 2-O-methylribose adenine
  modified_base 13..14: mod_base = OTHER; note = S-phosphorothioate
  modified_base 14: mod_base = OTHER; note = 2-fluororibose cytosine
  modified_base 14..15: mod_base = OTHER; note = S-phosphorothioate
  modified_base 15: mod_base = OTHER; note = 2-O-methylribose adenine
  modified_base 15..16: mod_base = OTHER; note S-N-(1,3-dimethylimidazolidin-2-ylidene)phosphoramidate
  modified_base 16: mod_base = OTHER; note = 2-fluororibose guanine
  modified_base 16..17: mod_base = OTHER; note = S-phosphorothioate
  modified_base 17: mod_base = cm
  modified_base 17..18: mod_base = OTHER; note = S-phosphorothioate
  modified_base 18: mod_base = OTHER; note = 2-fluororibose adenine
  modified_base 18..19: mod_base = OTHER; note = S-phosphorothioate
  modified_base 19: mod_base = cm
  modified_base 19..20: mod_base = OTHER; note S-N-(1,3-dimethylimidazolidin-2-ylidene)phosphoramidate
  modified_base 20: mod_base = OTHER; note = 2-fluororibose adenine
  modified_base 20..21: mod_base = OTHER; note = S-phosphorothioate
  modified_base 21: mod_base = gm
  modified_base 21..22: mod_base = OTHER; note = S-phosphorothioate
  modified_base 22: mod_base = um
  modified_base 22..23: mod_base = OTHER; note = S-phosphorothioate
  modified_base 23: mod_base = um
  source 1..23: mol_type = other RNA
tctacttgtgttacagcacagtt

SEQ ID NO: 744 - RNA, 23 nt, synthetic construct
  misc_feature 1..23: note = Synthetic: SSR-0106180
  modified_base 1: mod_base = um
  modified_base 1..2: mod_base = OTHER; note = R-phosphorothioate
  modified_base 2: mod_base = OTHER; note = 2-fluororibose cytosine
  modified_base 2..3: mod_base = OTHER; note = S-phosphorothioate
  modified_base 3: mod_base = um
  modified_base 3..4: mod_base = OTHER; note S-N-(1,3-dimethylimidazolidin-2-ylidene)phosphoramidate
  modified_base 4: mod_base = OTHER; note = 2-fluororibose adenine
  modified_base 5: mod_base = cm
  modified_base 6: mod_base = OTHER; note = 2-fluororibose uracil
  modified_base 7: mod_base = um
  modified_base 8: mod_base = OTHER; note = 2-fluororibose guanine
  modified_base 9: mod_base = um
  modified_base 10: mod_base = OTHER; note = 2-fluororibose guanine
  modified_base 10..11: mod_base = OTHER; note S-N-(1,3-dimethylimidazolidin-2-ylidene)phosphoramidate
  modified_base 11: mod_base = um
  modified_base 12: mod_base = um
  modified_base 13: mod_base = OTHER; note = 2-O-methylribose adenine
  modified_base 13..14: mod_base = OTHER; note = S-phosphorothioate
  modified_base 14: mod_base = OTHER; note = 2-fluororibose cytosine
  modified_base 14..15: mod_base = OTHER; note = S-phosphorothioate
  modified_base 15: mod_base = OTHER; note = 2-O-methylribose adenine
  modified_base 15..16: mod_base = OTHER; note S-N-(1,3-dimethylimidazolidin-2-ylidene)phosphoramidate
  modified_base 16: mod_base = OTHER; note = 2-fluororibose guanine
  modified_base 16..17: mod_base = OTHER; note = S-phosphorothioate
  modified_base 17: mod_base = cm
  modified_base 17..18: mod_base = OTHER; note = S-phosphorothioate
  modified_base 18: mod_base = OTHER; note = 2-fluororibose adenine
  modified_base 18..19: mod_base = OTHER; note = S-phosphorothioate
  modified_base 19: mod_base = cm
  modified_base 19..20: mod_base = OTHER; note S-N-(1,3-dimethylimidazolidin-2-ylidene)phosphoramidate
  modified_base 20: mod_base = OTHER; note = 2-fluororibose adenine
  modified_base 20..21: mod_base = OTHER; note = S-phosphorothioate
  modified_base 21: mod_base = gm
  modified_base 21..22: mod_base = OTHER; note = S-phosphorothioate
  modified_base 22: mod_base = um
  modified_base 22..23: mod_base = OTHER; note = S-phosphorothioate
  modified_base 23: mod_base = um
  source 1..23: mol_type = other RNA
tctacttgtgttacagcacagtt

SEQ ID NO: 745 - RNA, 23 nt, synthetic construct
  misc_feature 1..23: note = Synthetic: SSR-0106181
  modified_base 1: mod_base = um
  modified_base 1..2: mod_base = OTHER; note = R-phosphorothioate
  modified_base 2: mod_base = OTHER; note = 2-fluororibose cytosine
  modified_base 2..3: mod_base = OTHER; note = S-phosphorothioate
  modified_base 3: mod_base = um
  modified_base 3..4: mod_base = OTHER; note S-N-(1,3-dimethylimidazolidin-2-ylidene)phosphoramidate
  modified_base 4: mod_base = OTHER; note = 2-fluororibose adenine
  modified_base 5: mod_base = cm
  modified_base 6: mod_base = OTHER; note = 2-fluororibose uracil
  modified_base 7: mod_base = um
  modified_base 8: mod_base = OTHER; note = 2-fluororibose guanine
  modified_base 9: mod_base = um
  modified_base 10: mod_base = gm
  modified_base 10..11: mod_base = OTHER; note S-N-(1,3-dimethylimidazolidin-2-ylidene)phosphoramidate
  modified_base 11: mod_base = OTHER; note = 2-fluororibose uracil
  modified_base 12: mod_base = um
  modified_base 13: mod_base = OTHER; note = 2-O-methylribose adenine
  modified_base 13..14: mod_base = OTHER; note = S-phosphorothioate
  modified_base 14: mod_base = OTHER; note = 2-fluororibose cytosine
  modified_base 14..15: mod_base = OTHER; note = S-phosphorothioate
  modified_base 15: mod_base = OTHER; note = 2-O-methylribose adenine
  modified_base 15..16: mod_base = OTHER; note S-N-(1,3-dimethylimidazolidin-2-ylidene)phosphoramidate
  modified_base 16: mod_base = OTHER; note = 2-fluororibose guanine
  modified_base 16..17: mod_base = OTHER; note = S-phosphorothioate
  modified_base 17: mod_base = cm
  modified_base 17..18: mod_base = OTHER; note = S-phosphorothioate
  modified_base 18: mod_base = OTHER; note = 2-fluororibose adenine
  modified_base 18..19: mod_base = OTHER; note = S-phosphorothioate
  modified_base 19: mod_base = cm
  modified_base 19..20: mod_base = OTHER; note S-N-(1,3-dimethylimidazolidin-2-ylidene)phosphoramidate
  modified_base 20: mod_base = OTHER; note = 2-fluororibose adenine
  modified_base 20..21: mod_base = OTHER; note = S-phosphorothioate
  modified_base 21: mod_base = gm
  modified_base 21..22: mod_base = OTHER; note = S-phosphorothioate
  modified_base 22: mod_base = um
  modified_base 22..23: mod_base = OTHER; note = S-phosphorothioate
  modified_base 23: mod_base = um
  source 1..23: mol_type = other RNA
tctacttgtgttacagcacagtt

SEQ ID NO: 746 - RNA, 23 nt, synthetic construct
  misc_feature 1..23: note = Synthetic: SSR-0106182
  modified_base 1: mod_base = um
  modified_base 1..2: mod_base = OTHER; note = R-phosphorothioate
  modified_base 2: mod_base = OTHER; note = 2-fluororibose cytosine
  modified_base 2..3: mod_base = OTHER; note = S-phosphorothioate
  modified_base 3: mod_base = um
  modified_base 3..4: mod_base = OTHER; note S-N-(1,3-dimethylimidazolidin-2-ylidene)phosphoramidate
  modified_base 4: mod_base = OTHER; note = 2-fluororibose adenine
  modified_base 5: mod_base = cm
  modified_base 6: mod_base = OTHER; note = 2-fluororibose uracil
  modified_base 7: mod_base = um
  modified_base 8: mod_base = gm
  modified_base 9: mod_base = um
  modified_base 10: mod_base = gm
  modified_base 10..11: mod_base = OTHER; note S-N-(1,3-dimethylimidazolidin-2-ylidene)phosphoramidate
  modified_base 11: mod_base = OTHER; note = 2-fluororibose uracil
  modified_base 12: mod_base = um
  modified_base 13: mod_base = OTHER; note = 2-O-methylribose adenine
  modified_base 13..14: mod_base = OTHER; note = S-phosphorothioate
  modified_base 14: mod_base = OTHER; note = 2-fluororibose cytosine
  modified_base 14..15: mod_base = OTHER; note = S-phosphorothioate
  modified_base 15: mod_base = OTHER; note = 2-O-methylribose adenine
  modified_base 15..16: mod_base = OTHER; note S-N-(1,3-dimethylimidazolidin-2-ylidene)phosphoramidate
  modified_base 16: mod_base = OTHER; note = 2-fluororibose guanine
  modified_base 16..17: mod_base = OTHER; note = S-phosphorothioate
  modified_base 17: mod_base = cm
  modified_base 17..18: mod_base = OTHER; note = S-phosphorothioate
  modified_base 18: mod_base = OTHER; note = 2-O-methylribose adenine
  modified_base 18..19: mod_base = OTHER; note = S-phosphorothioate
  modified_base 19: mod_base = cm
  modified_base 19..20: mod_base = OTHER; note S-N-(1,3-dimethylimidazolidin-2-ylidene)phosphoramidate
  modified_base 20: mod_base = OTHER; note = 2-fluororibose adenine
  modified_base 20..21: mod_base = OTHER; note = S-phosphorothioate
  modified_base 21: mod_base = gm
  modified_base 21..22: mod_base = OTHER; note = S-phosphorothioate
  modified_base 22: mod_base = um
  modified_base 22..23: mod_base = OTHER; note = S-phosphorothioate
  modified_base 23: mod_base = um
  source 1..23: mol_type = other RNA
tctacttgtgttacagcacagtt

SEQ ID NO: 747 - RNA, 23 nt, synthetic construct
  misc_feature 1..23: note = Synthetic: SSR-0106183
  modified_base 1: mod_base = OTHER; note = phosphate linked to the 5' end of 5-(R)-methyl-5-deoxy-2-O-methylribose uracil
  modified_base 1..2: mod_base = OTHER; note = R-phosphorothioate
  modified_base 2: mod_base = OTHER; note = 2-fluororibose cytosine
  modified_base 2..3: mod_base = OTHER; note = S-phosphorothioate
  modified_base 3: mod_base = um
  modified_base 3..4: mod_base = OTHER; note S-N-(1,3-dimethylimidazolidin-2-ylidene)phosphoramidate
  modified_base 4: mod_base = OTHER; note = 2-fluororibose adenine
  modified_base 5: mod_base = cm
  modified_base 6: mod_base = OTHER; note = 2-fluororibose uracil
  modified_base 7: mod_base = um
  modified_base 7..8: mod_base = OTHER; note S-N-(1,3-dimethylimidazolidin-2-ylidene)phosphoramidate
  modified_base 8: mod_base = OTHER; note = 2-fluororibose guanine
  modified_base 9: mod_base = um
  modified_base 10: mod_base = OTHER; note = 2-fluororibose guanine
  modified_base 11: mod_base = um
  modified_base 12: mod_base = um
  modified_base 13: mod_base = OTHER; note = 2-O-methylribose adenine
  modified_base 13..14: mod_base = OTHER; note = S-phosphorothioate
  modified_base 14: mod_base = OTHER; note = 2-fluororibose cytosine
  modified_base 14..15: mod_base = OTHER; note = S-phosphorothioate
  modified_base 15: mod_base = OTHER; note = 2-O-methylribose adenine
  modified_base 15..16: mod_base = OTHER; note = S-phosphorothioate
  modified_base 16: mod_base = OTHER; note = 2-fluororibose guanine
  modified_base 16..17: mod_base = OTHER; note = S-phosphorothioate
  modified_base 17: mod_base = cm
  modified_base 17..18: mod_base = OTHER; note = S-phosphorothioate
  modified_base 18: mod_base = OTHER; note = 2-fluororibose adenine
  modified_base 18..19: mod_base = OTHER; note S-N-(1,3-dimethylimidazolidin-2-ylidene)phosphoramidate
  modified_base 19: mod_base = cm
  modified_base 19..20: mod_base = OTHER; note = S-phosphorothioate
  modified_base 20: mod_base = OTHER; note = 2-fluororibose adenine
  modified_base 20..21: mod_base = OTHER; note = S-phosphorothioate
  modified_base 21: mod_base = gm
  modified_base 21..22: mod_base = OTHER; note = S-phosphorothioate
  modified_base 22: mod_base = um
  modified_base 22..23: mod_base = OTHER; note = S-phosphorothioate
  modified_base 23: mod_base = um
  source 1..23: mol_type = other RNA
tctacttgtgttacagcacagtt

SEQ ID NO: 748 - RNA, 23 nt, synthetic construct
  misc_feature 1..23: note = Synthetic: SSR-0106184
  modified_base 1: mod_base = OTHER; note = phosphate linked to the 5' end of 5-(R)-methyl-5-deoxy-2-O-methylribose uracil
  modified_base 1..2: mod_base = OTHER; note = R-phosphorothioate
  modified_base 2: mod_base = OTHER; note = 2-fluororibose cytosine
  modified_base 2..3: mod_base = OTHER; note = S-phosphorothioate
  modified_base 3: mod_base = um
  modified_base 3..4: mod_base = OTHER; note S-N-(1,3-dimethylimidazolidin-2-ylidene)phosphoramidate
  modified_base 4: mod_base = OTHER; note = 2-fluororibose adenine
  modified_base 5: mod_base = cm
  modified_base 6: mod_base = OTHER; note = 2-fluororibose uracil
  modified_base 7: mod_base = um
  modified_base 7..8: mod_base = OTHER; note S-N-(1,3-dimethylimidazolidin-2-ylidene)phosphoramidate
  modified_base 8: mod_base = OTHER; note = 2-fluororibose guanine
  modified_base 9: mod_base = um
  modified_base 10: mod_base = OTHER; note = 2-fluororibose guanine
  modified_base 11: mod_base = um
  modified_base 12: mod_base = um
  modified_base 13: mod_base = OTHER; note = 2-O-methylribose adenine
  modified_base 13..14: mod_base = OTHER; note = S-phosphorothioate
  modified_base 14: mod_base = OTHER; note = 2-fluororibose cytosine
  modified_base 14..15: mod_base = OTHER; note = S-phosphorothioate
  modified_base 15: mod_base = OTHER; note = 2-O-methylribose adenine
  modified_base 15..16: mod_base = OTHER; note = S-phosphorothioate
  modified_base 16: mod_base = OTHER; note = 2-fluororibose guanine
  modified_base 16..17: mod_base = OTHER; note = S-phosphorothioate
  modified_base 17: mod_base = cm
  modified_base 17..18: mod_base = OTHER; note = S-phosphorothioate
  modified_base 18: mod_base = OTHER; note = 2-fluororibose adenine
  modified_base 18..19: mod_base = OTHER; note = S-phosphorothioate
  modified_base 19: mod_base = cm
  modified_base 19..20: mod_base = OTHER; note S-N-(1,3-dimethylimidazolidin-2-ylidene)phosphoramidate
  modified_base 20: mod_base = OTHER; note = 2-fluororibose adenine
  modified_base 20..21: mod_base = OTHER; note = S-phosphorothioate
  modified_base 21: mod_base = gm
  modified_base 21..22: mod_base = OTHER; note = S-phosphorothioate
  modified_base 22: mod_base = um
  modified_base 22..23: mod_base = OTHER; note = S-phosphorothioate
  modified_base 23: mod_base = um
  source 1..23: mol_type = other RNA
tctacttgtgttacagcacagtt

SEQ ID NO: 749 - RNA, 23 nt, synthetic construct
  misc_feature 1..23: note = Synthetic: SSR-0106185
  modified_base 1: mod_base = OTHER; note = phosphate linked to the 5' end of 5-(R)-methyl-5-deoxy-2-O-methylribose uracil
  modified_base 1..2: mod_base = OTHER; note = R-phosphorothioate
  modified_base 2: mod_base = OTHER; note = 2-fluororibose cytosine
  modified_base 2..3: mod_base = OTHER; note = S-phosphorothioate
  modified_base 3: mod_base = um
  modified_base 3..4: mod_base = OTHER; note S-N-(1,3-dimethylimidazolidin-2-ylidene)phosphoramidate
  modified_base 4: mod_base = OTHER; note = 2-fluororibose adenine
  modified_base 5: mod_base = cm
  modified_base 6: mod_base = OTHER; note = 2-fluororibose uracil
  modified_base 7: mod_base = um
  modified_base 8: mod_base = OTHER; note = 2-fluororibose guanine
  modified_base 9: mod_base = um
  modified_base 10: mod_base = OTHER; note = 2-fluororibose guanine
  modified_base 10..11: mod_base = OTHER; note S-N-(1,3-dimethylimidazolidin-2-ylidene)phosphoramidate
  modified_base 11: mod_base = um
  modified_base 12: mod_base = um
  modified_base 13: mod_base = OTHER; note = 2-O-methylribose adenine
  modified_base 13..14: mod_base = OTHER; note = S-phosphorothioate
  modified_base 14: mod_base = OTHER; note = 2-fluororibose cytosine
  modified_base 14..15: mod_base = OTHER; note = S-phosphorothioate
  modified_base 15: mod_base = OTHER; note = 2-O-methylribose adenine
  modified_base 15..16: mod_base = OTHER; note = S-phosphorothioate
  modified_base 16: mod_base = OTHER; note = 2-fluororibose guanine
  modified_base 16..17: mod_base = OTHER; note = S-phosphorothioate
  modified_base 17: mod_base = cm
  modified_base 17..18: mod_base = OTHER; note = S-phosphorothioate
  modified_base 18: mod_base = OTHER; note = 2-fluororibose adenine
  modified_base 18..19: mod_base = OTHER; note = S-phosphorothioate
  modified_base 19: mod_base = cm
  modified_base 19..20: mod_base = OTHER; note S-N-(1,3-dimethylimidazolidin-2-ylidene)phosphoramidate
  modified_base 20: mod_base = OTHER; note = 2-fluororibose adenine
  modified_base 20..21: mod_base = OTHER; note = S-phosphorothioate
  modified_base 21: mod_base = gm
  modified_base 21..22: mod_base = OTHER; note = S-phosphorothioate
  modified_base 22: mod_base = um
  modified_base 22..23: mod_base = OTHER; note = S-phosphorothioate
  modified_base 23: mod_base = um
  source 1..23: mol_type = other RNA
tctacttgtgttacagcacagtt

SEQ ID NO: 750 - RNA, 23 nt, synthetic construct
  misc_feature 1..23: note = Synthetic: SSR-0106186
  modified_base 1: mod_base = OTHER; note = phosphate linked to the 5' end of 5-(R)-methyl-5-deoxy-2-O-methylribose uracil
  modified_base 1..2: mod_base = OTHER; note = R-phosphorothioate
  modified_base 2: mod_base = OTHER; note = 2-fluororibose cytosine
  modified_base 2..3: mod_base = OTHER; note = S-phosphorothioate
  modified_base 3: mod_base = um
  modified_base 3..4: mod_base = OTHER; note S-N-(1,3-dimethylimidazolidin-2-ylidene)phosphoramidate
  modified_base 4: mod_base = OTHER; note = 2-fluororibose adenine
  modified_base 5: mod_base = cm
  modified_base 6: mod_base = OTHER; note = 2-fluororibose uracil
  modified_base 7: mod_base = um
  modified_base 8: mod_base = OTHER; note = 2-fluororibose guanine
  modified_base 9: mod_base = um
  modified_base 10: mod_base = gm
  modified_base 10..11: mod_base = OTHER; note S-N-(1,3-dimethylimidazolidin-2-ylidene)phosphoramidate
  modified_base 11: mod_base = OTHER; note = 2-fluororibose uracil
  modified_base 12: mod_base = um
  modified_base 13: mod_base = OTHER; note = 2-O-methylribose adenine
  modified_base 13..14: mod_base = OTHER; note = S-phosphorothioate
  modified_base 14: mod_base = OTHER; note = 2-fluororibose cytosine
  modified_base 14..15: mod_base = OTHER; note = S-phosphorothioate
  modified_base 15: mod_base = OTHER; note = 2-O-methylribose adenine
  modified_base 15..16: mod_base = OTHER; note = S-phosphorothioate
  modified_base 16: mod_base = OTHER; note = 2-fluororibose guanine
  modified_base 16..17: mod_base = OTHER; note = S-phosphorothioate
  modified_base 17: mod_base = cm
  modified_base 17..18: mod_base = OTHER; note = S-phosphorothioate
  modified_base 18: mod_base = OTHER; note = 2-fluororibose adenine
  modified_base 18..19: mod_base = OTHER; note = S-phosphorothioate
  modified_base 19: mod_base = cm
  modified_base 19..20: mod_base = OTHER; note S-N-(1,3-dimethylimidazolidin-2-ylidene)phosphoramidate
  modified_base 20: mod_base = OTHER; note = 2-fluororibose adenine
  modified_base 20..21: mod_base = OTHER; note = S-phosphorothioate
  modified_base 21: mod_base = gm
  modified_base 21..22: mod_base = OTHER; note = S-phosphorothioate
  modified_base 22: mod_base = um
  modified_base 22..23: mod_base = OTHER; note = S-phosphorothioate
  modified_base 23: mod_base = um
  source 1..23: mol_type = other RNA
tctacttgtgttacagcacagtt

SEQ ID NO: 751 - RNA, 23 nt, synthetic construct
  misc_feature 1..23: note = Synthetic: SSR-0106187
  modified_base 1: mod_base = OTHER; note = phosphate linked to the 5' end of 5-(R)-methyl-5-deoxy-2-O-methylribose uracil
  modified_base 1..2: mod_base = OTHER; note = R-phosphorothioate
  modified_base 2: mod_base = OTHER; note = 2-fluororibose cytosine
  modified_base 2..3: mod_base = OTHER; note = S-phosphorothioate
  modified_base 3: mod_base = um
  modified_base 3..4: mod_base = OTHER; note S-N-(1,3-dimethylimidazolidin-2-ylidene)phosphoramidate
  modified_base 4: mod_base = OTHER; note = 2-fluororibose adenine
  modified_base 5: mod_base = cm
  modified_base 6: mod_base = OTHER; note = 2-fluororibose uracil
  modified_base 7: mod_base = um
  modified_base 8: mod_base = gm
  modified_base 9: mod_base = um
  modified_base 10: mod_base = gm
  modified_base 10..11: mod_base = OTHER; note S-N-(1,3-dimethylimidazolidin-2-ylidene)phosphoramidate
  modified_base 11: mod_base = OTHER; note = 2-fluororibose uracil
  modified_base 12: mod_base = um
  modified_base 13: mod_base = OTHER; note = 2-O-methylribose adenine
  modified_base 13..14: mod_base = OTHER; note = S-phosphorothioate
  modified_base 14: mod_base = OTHER; note = 2-fluororibose cytosine
  modified_base 14..15: mod_base = OTHER; note = S-phosphorothioate
  modified_base 15: mod_base = OTHER; note = 2-O-methylribose adenine
  modified_base 15..16: mod_base = OTHER; note = S-phosphorothioate
  modified_base 16: mod_base = OTHER; note = 2-fluororibose guanine
  modified_base 16..17: mod_base = OTHER; note = S-phosphorothioate
  modified_base 17: mod_base = cm
  modified_base 17..18: mod_base = OTHER; note = S-phosphorothioate
  modified_base 18: mod_base = OTHER; note = 2-O-methylribose adenine
  modified_base 18..19: mod_base = OTHER; note = S-phosphorothioate
  modified_base 19: mod_base = cm
  modified_base 19..20: mod_base = OTHER; note S-N-(1,3-dimethylimidazolidin-2-ylidene)phosphoramidate
  modified_base 20: mod_base = OTHER; note = 2-fluororibose adenine
  modified_base 20..21: mod_base = OTHER; note = S-phosphorothioate
  modified_base 21: mod_base = gm
  modified_base 21..22: mod_base = OTHER; note = S-phosphorothioate
  modified_base 22: mod_base = um
  modified_base 22..23: mod_base = OTHER; note = S-phosphorothioate
  modified_base 23: mod_base = um
  source 1..23: mol_type = other RNA
tctacttgtgttacagcacagtt

SEQ ID NO: 752 - RNA, 23 nt, synthetic construct
  misc_feature 1..23: note = Synthetic: SSR-0106188
  modified_base 1: mod_base = OTHER; note = phosphate linked to the 5' end of 5-(R)-methyl-5-deoxy-2-O-methylribose uracil
  modified_base 1..2: mod_base = OTHER; note = R-phosphorothioate
  modified_base 2: mod_base = OTHER; note = 2-fluororibose cytosine
  modified_base 2..3: mod_base = OTHER; note = S-phosphorothioate
  modified_base 3: mod_base = um
  modified_base 3..4: mod_base = OTHER; note S-N-(1,3-dimethylimidazolidin-2-ylidene)phosphoramidate
  modified_base 4: mod_base = OTHER; note = 2-fluororibose adenine
  modified_base 5: mod_base = cm
  modified_base 6: mod_base = OTHER; note = 2-fluororibose uracil
  modified_base 7: mod_base = um
  modified_base 7..8: mod_base = OTHER; note S-N-(1,3-dimethylimidazolidin-2-ylidene)phosphoramidate
  modified_base 8: mod_base = OTHER; note = 2-fluororibose guanine
  modified_base 9: mod_base = um
  modified_base 10: mod_base = OTHER; note = 2-fluororibose guanine
  modified_base 11: mod_base = um
  modified_base 12: mod_base = um
  modified_base 13: mod_base = OTHER; note = 2-O-methylribose adenine
  modified_base 13..14: mod_base = OTHER; note = S-phosphorothioate
  modified_base 14: mod_base = OTHER; note = 2-fluororibose cytosine
  modified_base 14..15: mod_base = OTHER; note = S-phosphorothioate
  modified_base 15: mod_base = OTHER; note = 2-O-methylribose adenine
  modified_base 15..16: mod_base = OTHER; note = S-phosphorothioate
  modified_base 16: mod_base = OTHER; note = 2-fluororibose guanine
  modified_base 16..17: mod_base = OTHER; note = S-phosphorothioate
  modified_base 17: mod_base = cm
  modified_base 17..18: mod_base = OTHER; note = S-phosphorothioate
  modified_base 18: mod_base = OTHER; note = 2-fluororibose adenine
  modified_base 18..19: mod_base = OTHER; note = S-phosphorothioate
  modified_base 19: mod_base = cm
  modified_base 19..20: mod_base = OTHER; note = S-phosphorothioate
  modified_base 20: mod_base = OTHER; note = 2-fluororibose adenine
  modified_base 20..21: mod_base = OTHER; note = S-phosphorothioate
  modified_base 21: mod_base = gm
  modified_base 21..22: mod_base = OTHER; note = S-phosphorothioate
  modified_base 22: mod_base = um
  modified_base 22..23: mod_base = OTHER; note = S-phosphorothioate
  modified_base 23: mod_base = um
  source 1..23: mol_type = other RNA
tctacttgtgttacagcacagtt

SEQ ID NO: 753 - RNA, 23 nt, synthetic construct
  misc_feature 1..23: note = Synthetic: SSR-0106189
  modified_base 1: mod_base = OTHER; note = phosphate linked to the 5' end of 5-(R)-methyl-5-deoxy-2-O-methylribose uracil
  modified_base 1..2: mod_base = OTHER; note = R-phosphorothioate
  modified_base 2: mod_base = OTHER; note = 2-fluororibose cytosine
  modified_base 2..3: mod_base = OTHER; note = S-phosphorothioate
  modified_base 3: mod_base = um
  modified_base 3..4: mod_base = OTHER; note S-N-(1,3-dimethylimidazolidin-2-ylidene)phosphoramidate
  modified_base 4: mod_base = OTHER; note = 2-fluororibose adenine
  modified_base 5: mod_base = cm
  modified_base 6: mod_base = OTHER; note = 2-fluororibose uracil
  modified_base 7: mod_base = um
  modified_base 8: mod_base = OTHER; note = 2-fluororibose guanine
  modified_base 9: mod_base = um
  modified_base 10: mod_base = OTHER; note = 2-fluororibose guanine
  modified_base 10..11: mod_base = OTHER; note S-N-(1,3-dimethylimidazolidin-2-ylidene)phosphoramidate
  modified_base 11: mod_base = um
  modified_base 12: mod_base = um
  modified_base 13: mod_base = OTHER; note = 2-O-methylribose adenine
  modified_base 13..14: mod_base = OTHER; note = S-phosphorothioate
  modified_base 14: mod_base = OTHER; note = 2-fluororibose cytosine
  modified_base 14..15: mod_base = OTHER; note = S-phosphorothioate
  modified_base 15: mod_base = OTHER; note = 2-O-methylribose adenine
  modified_base 15..16: mod_base = OTHER; note = S-phosphorothioate
  modified_base 16: mod_base = OTHER; note = 2-fluororibose guanine
  modified_base 16..17: mod_base = OTHER; note = S-phosphorothioate
  modified_base 17: mod_base = cm
  modified_base 17..18: mod_base = OTHER; note = S-phosphorothioate
  modified_base 18: mod_base = OTHER; note = 2-fluororibose adenine
  modified_base 18..19: mod_base = OTHER; note = S-phosphorothioate
  modified_base 19: mod_base = cm
  modified_base 19..20: mod_base = OTHER; note = S-phosphorothioate
  modified_base 20: mod_base = OTHER; note = 2-fluororibose adenine
  modified_base 20..21: mod_base = OTHER; note = S-phosphorothioate
  modified_base 21: mod_base = gm
  modified_base 21..22: mod_base = OTHER; note = S-phosphorothioate
  modified_base 22: mod_base = um
  modified_base 22..23: mod_base = OTHER; note = S-phosphorothioate
  modified_base 23: mod_base = um
  source 1..23: mol_type = other RNA
tctacttgtgttacagcacagtt

SEQ ID NO: 754 - RNA, 23 nt, synthetic construct
  misc_feature 1..23: note = Synthetic: SSR-0106190
  modified_base 1: mod_base = OTHER; note = phosphate linked to the 5' end of 5-(R)-methyl-5-deoxy-2-O-methylribose uracil
  modified_base 1..2: mod_base = OTHER; note = R-phosphorothioate
  modified_base 2: mod_base = OTHER; note = 2-fluororibose cytosine
  modified_base 2..3: mod_base = OTHER; note = S-phosphorothioate
  modified_base 3: mod_base = um
  modified_base 3..4: mod_base = OTHER; note S-N-(1,3-dimethylimidazolidin-2-ylidene)phosphoramidate
  modified_base 4: mod_base = OTHER; note = 2-fluororibose adenine
  modified_base 5: mod_base = cm
  modified_base 6: mod_base = OTHER; note = 2-fluororibose uracil
  modified_base 7: mod_base = um
  modified_base 8: mod_base = OTHER; note = 2-fluororibose guanine
  modified_base 9: mod_base = um
  modified_base 10: mod_base = gm
  modified_base 10..11: mod_base = OTHER; note S-N-(1,3-dimethylimidazolidin-2-ylidene)phosphoramidate
  modified_base 11: mod_base = OTHER; note = 2-fluororibose uracil
  modified_base 12: mod_base = um
  modified_base 13: mod_base = OTHER; note = 2-O-methylribose adenine
  modified_base 13..14: mod_base = OTHER; note = S-phosphorothioate
  modified_base 14: mod_base = OTHER; note = 2-fluororibose cytosine
  modified_base 14..15: mod_base = OTHER; note = S-phosphorothioate
  modified_base 15: mod_base = OTHER; note = 2-O-methylribose adenine
  modified_base 15..16: mod_base = OTHER; note = S-phosphorothioate
  modified_base 16: mod_base = OTHER; note = 2-fluororibose guanine
  modified_base 16..17: mod_base = OTHER; note = S-phosphorothioate
  modified_base 17: mod_base = cm
  modified_base 17..18: mod_base = OTHER; note = S-phosphorothioate
  modified_base 18: mod_base = OTHER; note = 2-fluororibose adenine
  modified_base 18..19: mod_base = OTHER; note = S-phosphorothioate
  modified_base 19: mod_base = cm
  modified_base 19..20: mod_base = OTHER; note = S-phosphorothioate
  modified_base 20: mod_base = OTHER; note = 2-fluororibose adenine
  modified_base 20..21: mod_base = OTHER; note = S-phosphorothioate
  modified_base 21: mod_base = gm
  modified_base 21..22: mod_base = OTHER; note = S-phosphorothioate
  modified_base 22: mod_base = um
  modified_base 22..23: mod_base = OTHER; note = S-phosphorothioate
  modified_base 23: mod_base = um
  source 1..23: mol_type = other RNA
tctacttgtgttacagcacagtt

SEQ ID NO: 755 - RNA, 23 nt, synthetic construct
  misc_feature 1..23: note = Synthetic: SSR-0106191
  modified_base 1: mod_base = OTHER; note = phosphate linked to the 5' end of 5-(R)-methyl-5-deoxy-2-O-methylribose uracil
  modified_base 1..2: mod_base = OTHER; note = R-phosphorothioate
  modified_base 2: mod_base = OTHER; note = 2-fluororibose cytosine
  modified_base 2..3: mod_base = OTHER; note = S-phosphorothioate
  modified_base 3: mod_base = um
  modified_base 3..4: mod_base = OTHER; note S-N-(1,3-dimethylimidazolidin-2-ylidene)phosphoramidate
  modified_base 4: mod_base = OTHER; note = 2-fluororibose adenine
  modified_base 5: mod_base = cm
  modified_base 6: mod_base = OTHER; note = 2-fluororibose uracil
  modified_base 7: mod_base = um
  modified_base 8: mod_base = gm
  modified_base 9: mod_base = um
  modified_base 10: mod_base = gm
  modified_base 10..11: mod_base = OTHER; note S-N-(1,3-dimethylimidazolidin-2-ylidene)phosphoramidate
  modified_base 11: mod_base = OTHER; note = 2-fluororibose uracil
  modified_base 12: mod_base = um
  modified_base 13: mod_base = OTHER; note = 2-O-methylribose adenine
  modified_base 13..14: mod_base = OTHER; note = S-phosphorothioate
  modified_base 14: mod_base = OTHER; note = 2-fluororibose cytosine
  modified_base 14..15: mod_base = OTHER; note = S-phosphorothioate
  modified_base 15: mod_base = OTHER; note = 2-O-methylribose adenine
  modified_base 15..16: mod_base = OTHER; note = S-phosphorothioate
  modified_base 16: mod_base = OTHER; note = 2-fluororibose guanine
  modified_base 16..17: mod_base = OTHER; note = S-phosphorothioate
  modified_base 17: mod_base = cm
  modified_base 17..18: mod_base = OTHER; note = S-phosphorothioate
  modified_base 18: mod_base = OTHER; note = 2-O-methylribose adenine
  modified_base 18..19: mod_base = OTHER; note = S-phosphorothioate
  modified_base 19: mod_base = cm
  modified_base 19..20: mod_base = OTHER; note = S-phosphorothioate
  modified_base 20: mod_base = OTHER; note = 2-fluororibose adenine
  modified_base 20..21: mod_base = OTHER; note = S-phosphorothioate
  modified_base 21: mod_base = gm
  modified_base 21..22: mod_base = OTHER; note = S-phosphorothioate
  modified_base 22: mod_base = um
  modified_base 22..23: mod_base = OTHER; note = S-phosphorothioate
  modified_base 23: mod_base = um
  source 1..23: mol_type = other RNA
tctacttgtgttacagcacagtt

SEQ ID NO: 756 - RNA, 23 nt, synthetic construct
  misc_feature 1..23: note = Synthetic: SSR-0106192
  modified_base 1: mod_base = OTHER; note = phosphate linked to the 5' end of 5-(R)-methyl-5-deoxy-2-O-methylribose uracil
  modified_base 1..2: mod_base = OTHER; note = R-phosphorothioate
  modified_base 2: mod_base = OTHER; note = 2-fluororibose cytosine
  modified_base 2..3: mod_base = OTHER; note = S-phosphorothioate
  modified_base 3: mod_base = um
  modified_base 3..4: mod_base = OTHER; note S-N-(1,3-dimethylimidazolidin-2-ylidene)phosphoramidate
  modified_base 4: mod_base = OTHER; note = 2-fluororibose adenine
  modified_base 5: mod_base = cm
  modified_base 6: mod_base = OTHER; note = 2-fluororibose uracil
  modified_base 7: mod_base = um
  modified_base 8: mod_base = gm
  modified_base 9: mod_base = um
  modified_base 10: mod_base = gm
  modified_base 10..11: mod_base = OTHER; note S-N-(1,3-dimethylimidazolidin-2-ylidene)phosphoramidate
  modified_base 11: mod_base = OTHER; note = 2-fluororibose uracil
  modified_base 12: mod_base = um
  modified_base 13: mod_base = OTHER; note = 2-O-methylribose adenine
  modified_base 13..14: mod_base = OTHER; note = S-phosphorothioate
  modified_base 14: mod_base = OTHER; note = 2-fluororibose cytosine
  modified_base 14..15: mod_base = OTHER; note = S-phosphorothioate
  modified_base 15: mod_base = OTHER; note = 2-O-methylribose adenine
  modified_base 15..16: mod_base = OTHER; note = S-phosphorothioate
  modified_base 16: mod_base = OTHER; note = 2-fluororibose guanine
  modified_base 16..17: mod_base = OTHER; note = S-phosphorothioate
  modified_base 17: mod_base = cm
  modified_base 17..18: mod_base = OTHER; note = S-phosphorothioate
  modified_base 18: mod_base = OTHER; note = 2-O-methylribose adenine
  modified_base 18..19: mod_base = OTHER; note = S-phosphorothioate
  modified_base 19: mod_base = cm
  modified_base 19..20: mod_base = OTHER; note = S-phosphorothioate
  modified_base 20: mod_base = OTHER; note = 2-O-methylribose adenine
  modified_base 20..21: mod_base = OTHER; note = S-phosphorothioate
  modified_base 21: mod_base = gm
  modified_base 21..22: mod_base = OTHER; note = S-phosphorothioate
  modified_base 22: mod_base = um
  modified_base 22..23: mod_base = OTHER; note = S-phosphorothioate
  modified_base 23: mod_base = um
  source 1..23: mol_type = other RNA
tctacttgtgttacagcacagtt

SEQ ID NO: 757 - RNA, 23 nt, synthetic construct
  misc_feature 1..23: note = Synthetic: SSR-0106193
  modified_base 1: mod_base = OTHER; note = phosphate linked to the 5' end of 5-(R)-methyl-5-deoxy-2-O-methylribose uracil
  modified_base 1..2: mod_base = OTHER; note = R-phosphorothioate
  modified_base 2: mod_base = OTHER; note = 2-fluororibose cytosine
  modified_base 2..3: mod_base = OTHER; note = S-phosphorothioate
  modified_base 3: mod_base = um
  modified_base 3..4: mod_base = OTHER; note S-N-(1,3-dimethylimidazolidin-2-ylidene)phosphoramidate
  modified_base 4: mod_base = OTHER; note = 2-fluororibose adenine
  modified_base 5: mod_base = cm
  modified_base 6: mod_base = OTHER; note = 2-fluororibose uracil
  modified_base 7: mod_base = um
  modified_base 7..8: mod_base = OTHER; note S-N-(1,3-dimethylimidazolidin-2-ylidene)phosphoramidate
  modified_base 8: mod_base = OTHER; note = 2-fluororibose guanine
  modified_base 9: mod_base = um
  modified_base 10: mod_base = OTHER; note = 2-fluororibose guanine
  modified_base 11: mod_base = um
  modified_base 12: mod_base = um
  modified_base 13: mod_base = OTHER; note = 2-O-methylribose adenine
  modified_base 13..14: mod_base = OTHER; note = S-phosphorothioate
  modified_base 14: mod_base = OTHER; note = 2-fluororibose cytosine
  modified_base 14..15: mod_base = OTHER; note = S-phosphorothioate
  modified_base 15: mod_base = OTHER; note = 2-O-methylribose adenine
  modified_base 15..16: mod_base = OTHER; note S-N-(1,3-dimethylimidazolidin-2-ylidene)phosphoramidate
  modified_base 16: mod_base = OTHER; note = 2-fluororibose guanine
  modified_base 16..17: mod_base = OTHER; note = S-phosphorothioate
  modified_base 17: mod_base = cm
  modified_base 17..18: mod_base = OTHER; note = S-phosphorothioate
  modified_base 18: mod_base = OTHER; note = 2-fluororibose adenine
  modified_base 18..19: mod_base = OTHER; note S-N-(1,3-dimethylimidazolidin-2-ylidene)phosphoramidate
  modified_base 19: mod_base = cm
  modified_base 19..20: mod_base = OTHER; note = S-phosphorothioate
  modified_base 20: mod_base = OTHER; note = 2-fluororibose adenine
  modified_base 20..21: mod_base = OTHER; note = S-phosphorothioate
  modified_base 21: mod_base = gm
  modified_base 21..22: mod_base = OTHER; note = S-phosphorothioate
  modified_base 22: mod_base = um
  modified_base 22..23: mod_base = OTHER; note = S-phosphorothioate
  modified_base 23: mod_base = um
  source 1..23: mol_type = other RNA
tctacttgtgttacagcacagtt

SEQ ID NO: 758 - RNA, 23 nt, synthetic construct
  misc_feature 1..23: note = Synthetic: SSR-0106194
  modified_base 1: mod_base = OTHER; note = phosphate linked to the 5' end of 5-(R)-methyl-5-deoxy-2-O-methylribose uracil
  modified_base 1..2: mod_base = OTHER; note = R-phosphorothioate
  modified_base 2: mod_base = OTHER; note = 2-fluororibose cytosine
  modified_base 2..3: mod_base = OTHER; note = S-phosphorothioate
  modified_base 3: mod_base = um
  modified_base 3..4: mod_base = OTHER; note S-N-(1,3-dimethylimidazolidin-2-ylidene)phosphoramidate
  modified_base 4: mod_base = OTHER; note = 2-fluororibose adenine
  modified_base 5: mod_base = cm
  modified_base 6: mod_base = OTHER; note = 2-fluororibose uracil
  modified_base 7: mod_base = um
  modified_base 7..8: mod_base = OTHER; note S-N-(1,3-dimethylimidazolidin-2-ylidene)phosphoramidate
  modified_base 8: mod_base = OTHER; note = 2-fluororibose guanine
  modified_base 9: mod_base = um
  modified_base 10: mod_base = OTHER; note = 2-fluororibose guanine
  modified_base 11: mod_base = um
  modified_base 12: mod_base = um
  modified_base 13: mod_base = OTHER; note = 2-O-methylribose adenine
  modified_base 13..14: mod_base = OTHER; note = S-phosphorothioate
  modified_base 14: mod_base = OTHER; note = 2-fluororibose cytosine
  modified_base 14..15: mod_base = OTHER; note = S-phosphorothioate
  modified_base 15: mod_base = OTHER; note = 2-O-methylribose adenine
  modified_base 15..16: mod_base = OTHER; note S-N-(1,3-dimethylimidazolidin-2-ylidene)phosphoramidate
  modified_base 16: mod_base = OTHER; note = 2-fluororibose guanine
  modified_base 16..17: mod_base = OTHER; note = S-phosphorothioate
  modified_base 17: mod_base = cm
  modified_base 17..18: mod_base = OTHER; note = S-phosphorothioate
  modified_base 18: mod_base = OTHER; note = 2-fluororibose adenine
  modified_base 18..19: mod_base = OTHER; note = S-phosphorothioate
  modified_base 19: mod_base = cm
  modified_base 19..20: mod_base = OTHER; note S-N-(1,3-dimethylimidazolidin-2-ylidene)phosphoramidate
  modified_base 20: mod_base = OTHER; note = 2-fluororibose adenine
  modified_base 20..21: mod_base = OTHER; note = S-phosphorothioate
  modified_base 21: mod_base = gm
  modified_base 21..22: mod_base = OTHER; note = S-phosphorothioate
  modified_base 22: mod_base = um
  modified_base 22..23: mod_base = OTHER; note = S-phosphorothioate
  modified_base 23: mod_base = um
  source 1..23: mol_type = other RNA
tctacttgtgttacagcacagtt

SEQ ID NO: 759 - RNA, 23 nt, synthetic construct
  misc_feature 1..23: note = Synthetic: SSR-0106195
  modified_base 1: mod_base = OTHER; note = phosphate linked to the 5' end of 5-(R)-methyl-5-deoxy-2-O-methylribose uracil
  modified_base 1..2: mod_base = OTHER; note = R-phosphorothioate
  modified_base 2: mod_base = OTHER; note = 2-fluororibose cytosine
  modified_base 2..3: mod_base = OTHER; note = S-phosphorothioate
  modified_base 3: mod_base = um
  modified_base 3..4: mod_base = OTHER; note S-N-(1,3-dimethylimidazolidin-2-ylidene)phosphoramidate
  modified_base 4: mod_base = OTHER; note = 2-fluororibose adenine
  modified_base 5: mod_base = cm
  modified_base 6: mod_base = OTHER; note = 2-fluororibose uracil
  modified_base 7: mod_base = um
  modified_base 8: mod_base = OTHER; note = 2-fluororibose guanine
  modified_base 9: mod_base = um
  modified_base 10: mod_base = OTHER; note = 2-fluororibose guanine
  modified_base 10..11: mod_base = OTHER; note S-N-(1,3-dimethylimidazolidin-2-ylidene)phosphoramidate
  modified_base 11: mod_base = um
  modified_base 12: mod_base = um
  modified_base 13: mod_base = OTHER; note = 2-O-methylribose adenine
  modified_base 13..14: mod_base = OTHER; note = S-phosphorothioate
  modified_base 14: mod_base = OTHER; note = 2-fluororibose cytosine
  modified_base 14..15: mod_base = OTHER; note = S-phosphorothioate
  modified_base 15: mod_base = OTHER; note = 2-O-methylribose adenine
  modified_base 15..16: mod_base = OTHER; note S-N-(1,3-dimethylimidazolidin-2-ylidene)phosphoramidate
  modified_base 16: mod_base = OTHER; note = 2-fluororibose guanine
  modified_base 16..17: mod_base = OTHER; note = S-phosphorothioate
  modified_base 17: mod_base = cm
  modified_base 17..18: mod_base = OTHER; note = S-phosphorothioate
  modified_base 18: mod_base = OTHER; note = 2-fluororibose adenine
  modified_base 18..19: mod_base = OTHER; note = S-phosphorothioate
  modified_base 19: mod_base = cm
  modified_base 19..20: mod_base = OTHER; note S-N-(1,3-dimethylimidazolidin-2-ylidene)phosphoramidate
  modified_base 20: mod_base = OTHER; note = 2-fluororibose adenine
  modified_base 20..21: mod_base = OTHER; note = S-phosphorothioate
  modified_base 21: mod_base = gm
  modified_base 21..22: mod_base = OTHER; note = S-phosphorothioate
  modified_base 22: mod_base = um
  modified_base 22..23: mod_base = OTHER; note = S-phosphorothioate
  modified_base 23: mod_base = um
  source 1..23: mol_type = other RNA
tctacttgtgttacagcacagtt

SEQ ID NO: 760 - RNA, 23 nt, synthetic construct
  misc_feature 1..23: note = Synthetic: SSR-0106196
  modified_base 1: mod_base = OTHER; note = phosphate linked to the 5' end of 5-(R)-methyl-5-deoxy-2-O-methylribose uracil
  modified_base 1..2: mod_base = OTHER; note = R-phosphorothioate
  modified_base 2: mod_base = OTHER; note = 2-fluororibose cytosine
  modified_base 2..3: mod_base = OTHER; note = S-phosphorothioate
  modified_base 3: mod_base = um
  modified_base 3..4: mod_base = OTHER; note S-N-(1,3-dimethylimidazolidin-2-ylidene)phosphoramidate
  modified_base 4: mod_base = OTHER; note = 2-fluororibose adenine
  modified_base 5: mod_base = cm
  modified_base 6: mod_base = OTHER; note = 2-fluororibose uracil
  modified_base 7: mod_base = um
  modified_base 8: mod_base = OTHER; note = 2-fluororibose guanine
  modified_base 9: mod_base = um
  modified_base 10: mod_base = gm
  modified_base 10..11: mod_base = OTHER; note S-N-(1,3-dimethylimidazolidin-2-ylidene)phosphoramidate
  modified_base 11: mod_base = OTHER; note = 2-fluororibose uracil
  modified_base 12: mod_base = um
  modified_base 13: mod_base = OTHER; note = 2-O-methylribose adenine
  modified_base 13..14: mod_base = OTHER; note = S-phosphorothioate
  modified_base 14: mod_base = OTHER; note = 2-fluororibose cytosine
  modified_base 14..15: mod_base = OTHER; note = S-phosphorothioate
  modified_base 15: mod_base = OTHER; note = 2-O-methylribose adenine
  modified_base 15..16: mod_base = OTHER; note S-N-(1,3-dimethylimidazolidin-2-ylidene)phosphoramidate
  modified_base 16: mod_base = OTHER; note = 2-fluororibose guanine
  modified_base 16..17: mod_base = OTHER; note = S-phosphorothioate
  modified_base 17: mod_base = cm
  modified_base 17..18: mod_base = OTHER; note = S-phosphorothioate
  modified_base 18: mod_base = OTHER; note = 2-fluororibose adenine
  modified_base 18..19: mod_base = OTHER; note = S-phosphorothioate
  modified_base 19: mod_base = cm
  modified_base 19..20: mod_base = OTHER; note S-N-(1,3-dimethylimidazolidin-2-ylidene)phosphoramidate
  modified_base 20: mod_base = OTHER; note = 2-fluororibose adenine
  modified_base 20..21: mod_base = OTHER; note = S-phosphorothioate
  modified_base 21: mod_base = gm
  modified_base 21..22: mod_base = OTHER; note = S-phosphorothioate
  modified_base 22: mod_base = um
  modified_base 22..23: mod_base = OTHER; note = S-phosphorothioate
  modified_base 23: mod_base = um
  source 1..23: mol_type = other RNA
tctacttgtgttacagcacagtt

SEQ ID NO: 761 - RNA, 23 nt, synthetic construct
  misc_feature 1..23: note = Synthetic: SSR-0106197
  modified_base 1: mod_base = OTHER; note = phosphate linked to the 5' end of 5-(R)-methyl-5-deoxy-2-O-methylribose uracil
  modified_base 1..2: mod_base = OTHER; note = R-phosphorothioate
  modified_base 2: mod_base = OTHER; note = 2-fluororibose cytosine
  modified_base 2..3: mod_base = OTHER; note = S-phosphorothioate
  modified_base 3: mod_base = um
  modified_base 3..4: mod_base = OTHER; note S-N-(1,3-dimethylimidazolidin-2-ylidene)phosphoramidate
  modified_base 4: mod_base = OTHER; note = 2-fluororibose adenine
  modified_base 5: mod_base = cm
  modified_base 6: mod_base = OTHER; note = 2-fluororibose uracil
  modified_base 7: mod_base = um
  modified_base 8: mod_base = gm
  modified_base 9: mod_base = um
  modified_base 10: mod_base = gm
  modified_base 10..11: mod_base = OTHER; note S-N-(1,3-dimethylimidazolidin-2-ylidene)phosphoramidate
  modified_base 11: mod_base = OTHER; note = 2-fluororibose uracil
  modified_base 12: mod_base = um
  modified_base 13: mod_base = OTHER; note = 2-O-methylribose adenine
  modified_base 13..14: mod_base = OTHER; note = S-phosphorothioate
  modified_base 14: mod_base = OTHER; note = 2-fluororibose cytosine
  modified_base 14..15: mod_base = OTHER; note = S-phosphorothioate
  modified_base 15: mod_base = OTHER; note = 2-O-methylribose adenine
  modified_base 15..16: mod_base = OTHER; note S-N-(1,3-dimethylimidazolidin-2-ylidene)phosphoramidate
  modified_base 16: mod_base = OTHER; note = 2-fluororibose guanine
  modified_base 16..17: mod_base = OTHER; note = S-phosphorothioate
  modified_base 17: mod_base = cm
  modified_base 17..18: mod_base = OTHER; note = S-phosphorothioate
  modified_base 18: mod_base = OTHER; note = 2-O-methylribose adenine
  modified_base 18..19: mod_base = OTHER; note = S-phosphorothioate
  modified_base 19: mod_base = cm
  modified_base 19..20: mod_base = OTHER; note S-N-(1,3-dimethylimidazolidin-2-ylidene)phosphoramidate
  modified_base 20: mod_base = OTHER; note = 2-fluororibose adenine
  modified_base 20..21: mod_base = OTHER; note = S-phosphorothioate
  modified_base 21: mod_base = gm
  modified_base 21..22: mod_base = OTHER; note = S-phosphorothioate
  modified_base 22: mod_base = um
  modified_base 22..23: mod_base = OTHER; note = S-phosphorothioate
  modified_base 23: mod_base = um
  source 1..23: mol_type = other RNA
tctacttgtgttacagcacagtt

SEQ ID NO: 762 - RNA, 21 nt, synthetic construct
  misc_feature 1..21: note = Synthetic: SSR-0106206
  modified_base 1: mod_base = cm
  modified_base 1..2: mod_base = OTHER; note = S-phosphorothioate
  modified_base 2: mod_base = um
  modified_base 3: mod_base = OTHER; note = 2-fluororibose guanine
  modified_base 4: mod_base = um
  modified_base 5: mod_base = OTHER; note = 2-fluororibose guanine
  modified_base 6: mod_base = cm
  modified_base 7: mod_base = OTHER; note = 2-fluororibose uracil
  modified_base 7..8: mod_base = OTHER; note R-N-(1,3-dimethylimidazolidin-2-ylidene)phosphoramidate
  modified_base 8: mod_base = gm
  modified_base 9: mod_base = OTHER; note = 2-fluororibose uracil
  modified_base 10: mod_base = OTHER; note = 2-fluororibose adenine
  modified_base 11: mod_base = OTHER; note = 2-fluororibose adenine
  modified_base 12: mod_base = cm
  modified_base 13: mod_base = OTHER; note = 2-fluororibose adenine
  modified_base 14: mod_base = cm
  modified_base 15: mod_base = OTHER; note = 2-fluororibose adenine
  modified_base 15..16: mod_base = OTHER; note R-N-(1,3-dimethylimidazolidin-2-ylidene)phosphoramidate
  modified_base 16: mod_base = OTHER; note = 2-O-methylribose adenine
  modified_base 17: mod_base = OTHER; note = 2-fluororibose guanine
  modified_base 18: mod_base = um
  modified_base 19: mod_base = OTHER; note = 2-fluororibose adenine
  modified_base 20: mod_base = gm
  modified_base 20..21: mod_base = OTHER; note = S-phosphorothioate
  modified_base 21: mod_base = OTHER; note = 2-O-methylribose adenine
  source 1..21: mol_type = other RNA
ctgtgctgtaacacaagtaga

SEQ ID NO: 763 - RNA, 21 nt, synthetic construct
  misc_feature 1..21: note = Synthetic: SSR-0106207
  modified_base 1: mod_base = cm
  modified_base 1..2: mod_base = OTHER; note = S-phosphorothioate
  modified_base 2: mod_base = um
  modified_base 3: mod_base = OTHER; note = 2-fluororibose guanine
  modified_base 4: mod_base = um
  modified_base 5: mod_base = OTHER; note = 2-fluororibose guanine
  modified_base 6: mod_base = cm
  modified_base 7: mod_base = OTHER; note = 2-fluororibose uracil
  modified_base 7..8: mod_base = OTHER; note R-N-(1,3-dimethylimidazolidin-2-ylidene)phosphoramidate
  modified_base 8: mod_base = gm
  modified_base 9: mod_base = OTHER; note = 2-fluororibose uracil
  modified_base 10: mod_base = OTHER; note = 2-fluororibose adenine
  modified_base 11: mod_base = OTHER; note = 2-fluororibose adenine
  modified_base 12: mod_base = cm
  modified_base 13: mod_base = OTHER; note = 2-fluororibose adenine
  modified_base 14: mod_base = cm
  modified_base 15: mod_base = OTHER; note = 2-fluororibose adenine
  modified_base 15..16: mod_base = OTHER; note R-N-(1,3-dimethylimidazolidin-2-ylidene)phosphoramidate
  modified_base 16: mod_base = OTHER; note = 2-O-methylribose adenine
  modified_base 16..17: mod_base = OTHER; note = S-phosphorothioate
  modified_base 17: mod_base = OTHER; note = 2-fluororibose guanine
  modified_base 17..18: mod_base = OTHER; note = S-phosphorothioate
  modified_base 18: mod_base = um
  modified_base 18..19: mod_base = OTHER; note = S-phosphorothioate
  modified_base 19: mod_base = OTHER; note = 2-fluororibose adenine
  modified_base 19..20: mod_base = OTHER; note = S-phosphorothioate
  modified_base 20: mod_base = gm
  modified_base 20..21: mod_base = OTHER; note = S-phosphorothioate
  modified_base 21: mod_base = OTHER; note = 2-O-methylribose adenine
  source 1..21: mol_type = other RNA
ctgtgctgtaacacaagtaga

SEQ ID NO: 764 - RNA, 21 nt, synthetic construct
  misc_feature 1..21: note = Synthetic: SSR-0106208
  modified_base 1: mod_base = cm
  modified_base 1..2: mod_base = OTHER; note = S-phosphorothioate
  modified_base 2: mod_base = um
  modified_base 2..3: mod_base = OTHER; note = S-phosphorothioate
  modified_base 3: mod_base = OTHER; note = 2-fluororibose guanine
  modified_base 3..4: mod_base = OTHER; note = S-phosphorothioate
  modified_base 4: mod_base = um
  modified_base 4..5: mod_base = OTHER; note = S-phosphorothioate
  modified_base 5: mod_base = OTHER; note = 2-fluororibose guanine
  modified_base 5..6: mod_base = OTHER; note = S-phosphorothioate
  modified_base 6: mod_base = cm
  modified_base 6..7: mod_base = OTHER; note = S-phosphorothioate
  modified_base 7: mod_base = OTHER; note = 2-fluororibose uracil
  modified_base 7..8: mod_base = OTHER; note R-N-(1,3-dimethylimidazolidin-2-ylidene)phosphoramidate
  modified_base 8: mod_base = gm
  modified_base 9: mod_base = OTHER; note = 2-fluororibose uracil
  modified_base 10: mod_base = OTHER; note = 2-fluororibose adenine
  modified_base 11: mod_base = OTHER; note = 2-fluororibose adenine
  modified_base 12: mod_base = cm
  modified_base 13: mod_base = OTHER; note = 2-fluororibose adenine
  modified_base 14: mod_base = cm
  modified_base 15: mod_base = OTHER; note = 2-fluororibose adenine
  modified_base 15..16: mod_base = OTHER; note R-N-(1,3-dimethylimidazolidin-2-ylidene)phosphoramidate
  modified_base 16: mod_base = OTHER; note = 2-O-methylribose adenine
  modified_base 17: mod_base = OTHER; note = 2-fluororibose guanine
  modified_base 18: mod_base = um
  modified_base 19: mod_base = OTHER; note = 2-fluororibose adenine
  modified_base 20: mod_base = gm
  modified_base 20..21: mod_base = OTHER; note = S-phosphorothioate
  modified_base 21: mod_base = OTHER; note = 2-O-methylribose adenine
  source 1..21: mol_type = other RNA
ctgtgctgtaacacaagtaga

SEQ ID NO: 765 - RNA, 21 nt, synthetic construct
  misc_feature 1..21: note = Synthetic: SSR-0106209
  modified_base 1: mod_base = cm
  modified_base 1..2: mod_base = OTHER; note = S-phosphorothioate
  modified_base 2: mod_base = um
  modified_base 3: mod_base = OTHER; note = 2-fluororibose guanine
  modified_base 4: mod_base = um
  modified_base 5: mod_base = OTHER; note = 2-fluororibose guanine
  modified_base 6: mod_base = cm
  modified_base 7: mod_base = OTHER; note = 2-fluororibose uracil
  modified_base 7..8: mod_base = OTHER; note R-N-(1,3-dimethylimidazolidin-2-ylidene)phosphoramidate
  modified_base 8: mod_base = gm
  modified_base 9: mod_base = OTHER; note = 2-fluororibose uracil
  modified_base 10: mod_base = OTHER; note = 2-fluororibose adenine
  modified_base 11: mod_base = OTHER; note = 2-fluororibose adenine
  modified_base 12: mod_base = cm
  modified_base 12..13: mod_base = OTHER; note = S-phosphorothioate
  modified_base 13: mod_base = OTHER; note = 2-fluororibose adenine
  modified_base 13..14: mod_base = OTHER; note = S-phosphorothioate
  modified_base 14: mod_base = cm
  modified_base 14..15: mod_base = OTHER; note = S-phosphorothioate
  modified_base 15: mod_base = OTHER; note = 2-fluororibose adenine
  modified_base 15..16: mod_base = OTHER; note R-N-(1,3-dimethylimidazolidin-2-ylidene)phosphoramidate
  modified_base 16: mod_base = OTHER; note = 2-O-methylribose adenine
  modified_base 16..17: mod_base = OTHER; note = S-phosphorothioate
  modified_base 17: mod_base = OTHER; note = 2-fluororibose guanine
  modified_base 17..18: mod_base = OTHER; note = S-phosphorothioate
  modified_base 18: mod_base = um
  modified_base 18..19: mod_base = OTHER; note = S-phosphorothioate
  modified_base 19: mod_base = OTHER; note = 2-fluororibose adenine
  modified_base 19..20: mod_base = OTHER; note = S-phosphorothioate
  modified_base 20: mod_base = gm
  modified_base 20..21: mod_base = OTHER; note = S-phosphorothioate
  modified_base 21: mod_base = OTHER; note = 2-O-methylribose adenine
  source 1..21: mol_type = other RNA
ctgtgctgtaacacaagtaga

SEQ ID NO: 766 - RNA, 21 nt, synthetic construct
  misc_feature 1..21: note = Synthetic: SSR-0106210
  modified_base 1: mod_base = cm
  modified_base 1..2: mod_base = OTHER; note = S-phosphorothioate
  modified_base 2: mod_base = um
  modified_base 2..3: mod_base = OTHER; note = S-phosphorothioate
  modified_base 3: mod_base = OTHER; note = 2-fluororibose guanine
  modified_base 3..4: mod_base = OTHER; note = S-phosphorothioate
  modified_base 4: mod_base = um
  modified_base 4..5: mod_base = OTHER; note = S-phosphorothioate
  modified_base 5: mod_base = OTHER; note = 2-fluororibose guanine
  modified_base 5..6: mod_base = OTHER; note = S-phosphorothioate
  modified_base 6: mod_base = cm
  modified_base 6..7: mod_base = OTHER; note = S-phosphorothioate
  modified_base 7: mod_base = OTHER; note = 2-fluororibose uracil
  modified_base 7..8: mod_base = OTHER; note R-N-(1,3-dimethylimidazolidin-2-ylidene)phosphoramidate
  modified_base 8: mod_base = gm
  modified_base 8..9: mod_base = OTHER; note = S-phosphorothioate
  modified_base 9: mod_base = OTHER; note = 2-fluororibose uracil
  modified_base 9..10: mod_base = OTHER; note = S-phosphorothioate
  modified_base 10: mod_base = OTHER; note = 2-fluororibose adenine
  modified_base 10..11: mod_base = OTHER; note = S-phosphorothioate
  modified_base 11: mod_base = OTHER; note = 2-fluororibose adenine
  modified_base 12: mod_base = cm
  modified_base 13: mod_base = OTHER; note = 2-fluororibose adenine
  modified_base 14: mod_base = cm
  modified_base 15: mod_base = OTHER; note = 2-fluororibose adenine
  modified_base 15..16: mod_base = OTHER; note R-N-(1,3-dimethylimidazolidin-2-ylidene)phosphoramidate
  modified_base 16: mod_base = OTHER; note = 2-O-methylribose adenine
  modified_base 17: mod_base = OTHER; note = 2-fluororibose guanine
  modified_base 18: mod_base = um
  modified_base 19: mod_base = OTHER; note = 2-fluororibose adenine
  modified_base 20: mod_base = gm
  modified_base 20..21: mod_base = OTHER; note = S-phosphorothioate
  modified_base 21: mod_base = OTHER; note = 2-O-methylribose adenine
  source 1..21: mol_type = other RNA
ctgtgctgtaacacaagtaga

SEQ ID NO: 767 - RNA, 21 nt, synthetic construct
  misc_feature 1..21: note = Synthetic: SSR-0106211
  modified_base 1: mod_base = cm
  modified_base 1..2: mod_base = OTHER; note = S-phosphorothioate
  modified_base 2: mod_base = um
  modified_base 2..3: mod_base = OTHER; note = S-phosphorothioate
  modified_base 3: mod_base = OTHER; note = 2-fluororibose guanine
  modified_base 3..4: mod_base = OTHER; note = S-phosphorothioate
  modified_base 4: mod_base = um
  modified_base 4..5: mod_base = OTHER; note = S-phosphorothioate
  modified_base 5: mod_base = OTHER; note = 2-fluororibose guanine
  modified_base 5..6: mod_base = OTHER; note = S-phosphorothioate
  modified_base 6: mod_base = cm
  modified_base 6..7: mod_base = OTHER; note = S-phosphorothioate
  modified_base 7: mod_base = OTHER; note = 2-fluororibose uracil
  modified_base 7..8: mod_base = OTHER; note R-N-(1,3-dimethylimidazolidin-2-ylidene)phosphoramidate
  modified_base 8: mod_base = gm
  modified_base 8..9: mod_base = OTHER; note = S-phosphorothioate
  modified_base 9: mod_base = OTHER; note = 2-fluororibose uracil
  modified_base 9..10: mod_base = OTHER; note = S-phosphorothioate
  modified_base 10: mod_base = OTHER; note = 2-fluororibose adenine
  modified_base 10..11: mod_base = OTHER; note = S-phosphorothioate
  modified_base 11: mod_base = OTHER; note = 2-fluororibose adenine
  modified_base 12: mod_base = cm
  modified_base 12..13: mod_base = OTHER; note = S-phosphorothioate
  modified_base 13: mod_base = OTHER; note = 2-fluororibose adenine
  modified_base 13..14: mod_base = OTHER; note = S-phosphorothioate
  modified_base 14: mod_base = cm
  modified_base 14..15: mod_base = OTHER; note = S-phosphorothioate
  modified_base 15: mod_base = OTHER; note = 2-fluororibose adenine
  modified_base 15..16: mod_base = OTHER; note R-N-(1,3-dimethylimidazolidin-2-ylidene)phosphoramidate
  modified_base 16: mod_base = OTHER; note = 2-O-methylribose adenine
  modified_base 16..17: mod_base = OTHER; note = S-phosphorothioate
  modified_base 17: mod_base = OTHER; note = 2-fluororibose guanine
  modified_base 17..18: mod_base = OTHER; note = S-phosphorothioate
  modified_base 18: mod_base = um
  modified_base 18..19: mod_base = OTHER; note = S-phosphorothioate
  modified_base 19: mod_base = OTHER; note = 2-fluororibose adenine
  modified_base 19..20: mod_base = OTHER; note = S-phosphorothioate
  modified_base 20: mod_base = gm
  modified_base 20..21: mod_base = OTHER; note = S-phosphorothioate
  modified_base 21: mod_base = OTHER; note = 2-O-methylribose adenine
  source 1..21: mol_type = other RNA
ctgtgctgtaacacaagtaga

SEQ ID NO: 768 - RNA, 21 nt, synthetic construct
  misc_feature 1..21: note = Synthetic: SSR-0106212
  modified_base 1: mod_base = cm
  modified_base 1..2: mod_base = OTHER; note = S-phosphorothioate
  modified_base 2: mod_base = um
  modified_base 2..3: mod_base = OTHER; note = S-phosphorothioate
  modified_base 3: mod_base = OTHER; note = 2-fluororibose guanine
  modified_base 3..4: mod_base = OTHER; note = S-phosphorothioate
  modified_base 4: mod_base = um
  modified_base 4..5: mod_base = OTHER; note = S-phosphorothioate
  modified_base 5: mod_base = OTHER; note = 2-fluororibose guanine
  modified_base 5..6: mod_base = OTHER; note = S-phosphorothioate
  modified_base 6: mod_base = cm
  modified_base 6..7: mod_base = OTHER; note = S-phosphorothioate
  modified_base 7: mod_base = OTHER; note = 2-fluororibose uracil
  modified_base 7..8: mod_base = OTHER; note R-N-(1,3-dimethylimidazolidin-2-ylidene)phosphoramidate
  modified_base 8: mod_base = gm
  modified_base 8..9: mod_base = OTHER; note = S-phosphorothioate
  modified_base 9: mod_base = OTHER; note = 2-fluororibose uracil
  modified_base 9..10: mod_base = OTHER; note = S-phosphorothioate
  modified_base 10: mod_base = OTHER; note = 2-fluororibose adenine
  modified_base 10..11: mod_base = OTHER; note = S-phosphorothioate
  modified_base 11: mod_base = OTHER; note = 2-fluororibose adenine
  modified_base 11..12: mod_base = OTHER; note = S-phosphorothioate
  modified_base 12: mod_base = cm
  modified_base 12..13: mod_base = OTHER; note = S-phosphorothioate
  modified_base 13: mod_base = OTHER; note = 2-fluororibose adenine
  modified_base 13..14: mod_base = OTHER; note = S-phosphorothioate
  modified_base 14: mod_base = cm
  modified_base 14..15: mod_base = OTHER; note = S-phosphorothioate
  modified_base 15: mod_base = OTHER; note = 2-fluororibose adenine
  modified_base 15..16: mod_base = OTHER; note R-N-(1,3-dimethylimidazolidin-2-ylidene)phosphoramidate
  modified_base 16: mod_base = OTHER; note = 2-O-methylribose adenine
  modified_base 16..17: mod_base = OTHER; note = S-phosphorothioate
  modified_base 17: mod_base = OTHER; note = 2-fluororibose guanine
  modified_base 17..18: mod_base = OTHER; note = S-phosphorothioate
  modified_base 18: mod_base = um
  modified_base 18..19: mod_base = OTHER; note = S-phosphorothioate
  modified_base 19: mod_base = OTHER; note = 2-fluororibose adenine
  modified_base 19..20: mod_base = OTHER; note = S-phosphorothioate
  modified_base 20: mod_base = gm
  modified_base 20..21: mod_base = OTHER; note = S-phosphorothioate
  modified_base 21: mod_base = OTHER; note = 2-O-methylribose adenine
  source 1..21: mol_type = other RNA
ctgtgctgtaacacaagtaga

SEQ ID NO: 769 - RNA, 21 nt, synthetic construct
  misc_feature 1..21: note = Synthetic: SSR-0106213
  modified_base 1: mod_base = cm
  modified_base 1..2: mod_base = OTHER; note = S-phosphorothioate
  modified_base 2: mod_base = um
  modified_base 3: mod_base = gm
  modified_base 4: mod_base = um
  modified_base 5: mod_base = gm
  modified_base 6: mod_base = cm
  modified_base 7: mod_base = OTHER; note = 2-fluororibose uracil
  modified_base 7..8: mod_base = OTHER; note R-N-(1,3-dimethylimidazolidin-2-ylidene)phosphoramidate
  modified_base 8: mod_base = gm
  modified_base 9: mod_base = OTHER; note = 2-fluororibose uracil
  modified_base 10: mod_base = OTHER; note = 2-fluororibose adenine
  modified_base 11: mod_base = OTHER; note = 2-fluororibose adenine
  modified_base 12: mod_base = cm
  modified_base 13: mod_base = OTHER; note = 2-O-methylribose adenine
  modified_base 14: mod_base = cm
  modified_base 15: mod_base = OTHER; note = 2-O-methylribose adenine
  modified_base 15..16: mod_base = OTHER; note R-N-(1,3-dimethylimidazolidin-2-ylidene)phosphoramidate
  modified_base 16: mod_base = OTHER; note = 2-O-methylribose adenine
  modified_base 17: mod_base = gm
  modified_base 18: mod_base = um
  modified_base 19: mod_base = OTHER; note = 2-O-methylribose adenine
  modified_base 20: mod_base = gm
  modified_base 20..21: mod_base = OTHER; note = S-phosphorothioate
  modified_base 21: mod_base = OTHER; note = 2-O-methylribose adenine
  source 1..21: mol_type = other RNA
ctgtgctgtaacacaagtaga

SEQ ID NO: 770 - RNA, 21 nt, synthetic construct
  misc_feature 1..21: note = Synthetic: SSR-0106214
  modified_base 1: mod_base = cm
  modified_base 1..2: mod_base = OTHER; note = S-phosphorothioate
  modified_base 2: mod_base = um
  modified_base 3: mod_base = gm
  modified_base 4: mod_base = um
  modified_base 5: mod_base = gm
  modified_base 6: mod_base = cm
  modified_base 7: mod_base = OTHER; note = 2-fluororibose uracil
  modified_base 7..8: mod_base = OTHER; note R-N-(1,3-dimethylimidazolidin-2-ylidene)phosphoramidate
  modified_base 8: mod_base = gm
  modified_base 9: mod_base = OTHER; note = 2-fluororibose uracil
  modified_base 10: mod_base = OTHER; note = 2-fluororibose adenine
  modified_base 11: mod_base = OTHER; note = 2-fluororibose adenine
  modified_base 12: mod_base = cm
  modified_base 13: mod_base = OTHER; note = 2-O-methylribose adenine
  modified_base 14: mod_base = cm
  modified_base 15: mod_base = OTHER; note = 2-O-methylribose adenine
  modified_base 15..16: mod_base = OTHER; note R-N-(1,3-dimethylimidazolidin-2-ylidene)phosphoramidate
  modified_base 16: mod_base = OTHER; note = 2-O-methylribose adenine
  modified_base 16..17: mod_base = OTHER; note = S-phosphorothioate
  modified_base 17: mod_base = gm
  modified_base 17..18: mod_base = OTHER; note = S-phosphorothioate
  modified_base 18: mod_base = um
  modified_base 18..19: mod_base = OTHER; note = S-phosphorothioate
  modified_base 19: mod_base = OTHER; note = 2-O-methylribose adenine
  modified_base 19..20: mod_base = OTHER; note = S-phosphorothioate
  modified_base 20: mod_base = gm
  modified_base 20..21: mod_base = OTHER; note = S-phosphorothioate
  modified_base 21: mod_base = OTHER; note = 2-O-methylribose adenine
  source 1..21: mol_type = other RNA
ctgtgctgtaacacaagtaga

SEQ ID NO: 771 - RNA, 21 nt, synthetic construct
  misc_feature 1..21: note = Synthetic: SSR-0106215
  modified_base 1: mod_base = cm
  modified_base 1..2: mod_base = OTHER; note = S-phosphorothioate
  modified_base 2: mod_base = um
  modified_base 2..3: mod_base = OTHER; note = S-phosphorothioate
  modified_base 3: mod_base = gm
  modified_base 3..4: mod_base = OTHER; note = S-phosphorothioate
  modified_base 4: mod_base = um
  modified_base 4..5: mod_base = OTHER; note = S-phosphorothioate
  modified_base 5: mod_base = gm
  modified_base 5..6: mod_base = OTHER; note = S-phosphorothioate
  modified_base 6: mod_base = cm
  modified_base 6..7: mod_base = OTHER; note = S-phosphorothioate
  modified_base 7: mod_base = OTHER; note = 2-fluororibose uracil
  modified_base 7..8: mod_base = OTHER; note R-N-(1,3-dimethylimidazolidin-2-ylidene)phosphoramidate
  modified_base 8: mod_base = gm
  modified_base 9: mod_base = OTHER; note = 2-fluororibose uracil
  modified_base 10: mod_base = OTHER; note = 2-fluororibose adenine
  modified_base 11: mod_base = OTHER; note = 2-fluororibose adenine
  modified_base 12: mod_base = cm
  modified_base 13: mod_base = OTHER; note = 2-O-methylribose adenine
  modified_base 14: mod_base = cm
  modified_base 15: mod_base = OTHER; note = 2-O-methylribose adenine
  modified_base 15..16: mod_base = OTHER; note R-N-(1,3-dimethylimidazolidin-2-ylidene)phosphoramidate
  modified_base 16: mod_base = OTHER; note = 2-O-methylribose adenine
  modified_base 17: mod_base = gm
  modified_base 18: mod_base = um
  modified_base 19: mod_base = OTHER; note = 2-O-methylribose adenine
  modified_base 20: mod_base = gm
  modified_base 20..21: mod_base = OTHER; note = S-phosphorothioate
  modified_base 21: mod_base = OTHER; note = 2-O-methylribose adenine
  source 1..21: mol_type = other RNA
ctgtgctgtaacacaagtaga

SEQ ID NO: 772 - RNA, 21 nt, synthetic construct
  misc_feature 1..21: note = Synthetic: SSR-0106216
  modified_base 1: mod_base = cm
  modified_base 1..2: mod_base = OTHER; note = S-phosphorothioate
  modified_base 2: mod_base = um
  modified_base 3: mod_base = gm
  modified_base 4: mod_base = um
  modified_base 5: mod_base = gm
  modified_base 6: mod_base = cm
  modified_base 7: mod_base = OTHER; note = 2-fluororibose uracil
  modified_base 7..8: mod_base = OTHER; note R-N-(1,3-dimethylimidazolidin-2-ylidene)phosphoramidate
  modified_base 8: mod_base = gm
  modified_base 9: mod_base = OTHER; note = 2-fluororibose uracil
  modified_base 10: mod_base = OTHER; note = 2-fluororibose adenine
  modified_base 11: mod_base = OTHER; note = 2-fluororibose adenine
  modified_base 12: mod_base = cm
  modified_base 12..13: mod_base = OTHER; note = S-phosphorothioate
  modified_base 13: mod_base = OTHER; note = 2-O-methylribose adenine
  modified_base 13..14: mod_base = OTHER; note = S-phosphorothioate
  modified_base 14: mod_base = cm
  modified_base 14..15: mod_base = OTHER; note = S-phosphorothioate
  modified_base 15: mod_base = OTHER; note = 2-O-methylribose adenine
  modified_base 15..16: mod_base = OTHER; note R-N-(1,3-dimethylimidazolidin-2-ylidene)phosphoramidate
  modified_base 16: mod_base = OTHER; note = 2-O-methylribose adenine
  modified_base 16..17: mod_base = OTHER; note = S-phosphorothioate
  modified_base 17: mod_base = gm
  modified_base 17..18: mod_base = OTHER; note = S-phosphorothioate
  modified_base 18: mod_base = um
  modified_base 18..19: mod_base = OTHER; note = S-phosphorothioate
  modified_base 19: mod_base = OTHER; note = 2-O-methylribose adenine
  modified_base 19..20: mod_base = OTHER; note = S-phosphorothioate
  modified_base 20: mod_base = gm
  modified_base 20..21: mod_base = OTHER; note = S-phosphorothioate
  modified_base 21: mod_base = OTHER; note = 2-O-methylribose adenine
  source 1..21: mol_type = other RNA
ctgtgctgtaacacaagtaga

SEQ ID NO: 773 - RNA, 21 nt, synthetic construct
  misc_feature 1..21: note = Synthetic: SSR-0106217
  modified_base 1: mod_base = cm
  modified_base 1..2: mod_base = OTHER; note = S-phosphorothioate
  modified_base 2: mod_base = um
  modified_base 2..3: mod_base = OTHER; note = S-phosphorothioate
  modified_base 3: mod_base = gm
  modified_base 3..4: mod_base = OTHER; note = S-phosphorothioate
  modified_base 4: mod_base = um
  modified_base 4..5: mod_base = OTHER; note = S-phosphorothioate
  modified_base 5: mod_base = gm
  modified_base 5..6: mod_base = OTHER; note = S-phosphorothioate
  modified_base 6: mod_base = cm
  modified_base 6..7: mod_base = OTHER; note = S-phosphorothioate
  modified_base 7: mod_base = OTHER; note = 2-fluororibose uracil
  modified_base 7..8: mod_base = OTHER; note R-N-(1,3-dimethylimidazolidin-2-ylidene)phosphoramidate
  modified_base 8: mod_base = gm
  modified_base 8..9: mod_base = OTHER; note = S-phosphorothioate
  modified_base 9: mod_base = OTHER; note = 2-fluororibose uracil
  modified_base 9..10: mod_base = OTHER; note = S-phosphorothioate
  modified_base 10: mod_base = OTHER; note = 2-fluororibose adenine
  modified_base 10..11: mod_base = OTHER; note = S-phosphorothioate
  modified_base 11: mod_base = OTHER; note = 2-fluororibose adenine
  modified_base 12: mod_base = cm
  modified_base 13: mod_base = OTHER; note = 2-O-methylribose adenine
  modified_base 14: mod_base = cm
  modified_base 15: mod_base = OTHER; note = 2-O-methylribose adenine
  modified_base 15..16: mod_base = OTHER; note R-N-(1,3-dimethylimidazolidin-2-ylidene)phosphoramidate
  modified_base 16: mod_base = OTHER; note = 2-O-methylribose adenine
  modified_base 17: mod_base = gm
  modified_base 18: mod_base = um
  modified_base 19: mod_base = OTHER; note = 2-O-methylribose adenine
  modified_base 20: mod_base = gm
  modified_base 20..21: mod_base = OTHER; note = S-phosphorothioate
  modified_base 21: mod_base = OTHER; note = 2-O-methylribose adenine
  source 1..21: mol_type = other RNA
ctgtgctgtaacacaagtaga

SEQ ID NO: 774 - RNA, 21 nt, synthetic construct
  misc_feature 1..21: note = Synthetic: SSR-0106218
  modified_base 1: mod_base = cm
  modified_base 1..2: mod_base = OTHER; note = S-phosphorothioate
  modified_base 2: mod_base = um
  modified_base 2..3: mod_base = OTHER; note = S-phosphorothioate
  modified_base 3: mod_base = gm
  modified_base 3..4: mod_base = OTHER; note = S-phosphorothioate
  modified_base 4: mod_base = um
  modified_base 4..5: mod_base = OTHER; note = S-phosphorothioate
  modified_base 5: mod_base = gm
  modified_base 5..6: mod_base = OTHER; note = S-phosphorothioate
  modified_base 6: mod_base = cm
  modified_base 6..7: mod_base = OTHER; note = S-phosphorothioate
  modified_base 7: mod_base = OTHER; note = 2-fluororibose uracil
  modified_base 7..8: mod_base = OTHER; note R-N-(1,3-dimethylimidazolidin-2-ylidene)phosphoramidate
  modified_base 8: mod_base = gm
  modified_base 8..9: mod_base = OTHER; note = S-phosphorothioate
  modified_base 9: mod_base = OTHER; note = 2-fluororibose uracil
  modified_base 9..10: mod_base = OTHER; note = S-phosphorothioate
  modified_base 10: mod_base = OTHER; note = 2-fluororibose adenine
  modified_base 10..11: mod_base = OTHER; note = S-phosphorothioate
  modified_base 11: mod_base = OTHER; note = 2-fluororibose adenine
  modified_base 12: mod_base = cm
  modified_base 12..13: mod_base = OTHER; note = S-phosphorothioate
  modified_base 13: mod_base = OTHER; note = 2-O-methylribose adenine
  modified_base 13..14: mod_base = OTHER; note = S-phosphorothioate
  modified_base 14: mod_base = cm
  modified_base 14..15: mod_base = OTHER; note = S-phosphorothioate
  modified_base 15: mod_base = OTHER; note = 2-O-methylribose adenine
  modified_base 15..16: mod_base = OTHER; note R-N-(1,3-dimethylimidazolidin-2-ylidene)phosphoramidate
  modified_base 16: mod_base = OTHER; note = 2-O-methylribose adenine
  modified_base 16..17: mod_base = OTHER; note = S-phosphorothioate
  modified_base 17: mod_base = gm
  modified_base 17..18: mod_base = OTHER; note = S-phosphorothioate
  modified_base 18: mod_base = um
  modified_base 18..19: mod_base = OTHER; note = S-phosphorothioate
  modified_base 19: mod_base = OTHER; note = 2-O-methylribose adenine
  modified_base 19..20: mod_base = OTHER; note = S-phosphorothioate
  modified_base 20: mod_base = gm
  modified_base 20..21: mod_base = OTHER; note = S-phosphorothioate
  modified_base 21: mod_base = OTHER; note = 2-O-methylribose adenine
  source 1..21: mol_type = other RNA
ctgtgctgtaacacaagtaga

SEQ ID NO: 775 - RNA, 21 nt, synthetic construct
  misc_feature 1..21: note = Synthetic: SSR-0106219
  modified_base 1: mod_base = cm
  modified_base 1..2: mod_base = OTHER; note = S-phosphorothioate
  modified_base 2: mod_base = um
  modified_base 2..3: mod_base = OTHER; note = S-phosphorothioate
  modified_base 3: mod_base = gm
  modified_base 3..4: mod_base = OTHER; note = S-phosphorothioate
  modified_base 4: mod_base = um
  modified_base 4..5: mod_base = OTHER; note = S-phosphorothioate
  modified_base 5: mod_base = gm
  modified_base 5..6: mod_base = OTHER; note = S-phosphorothioate
  modified_base 6: mod_base = cm
  modified_base 6..7: mod_base = OTHER; note = S-phosphorothioate
  modified_base 7: mod_base = OTHER; note = 2-fluororibose uracil
  modified_base 7..8: mod_base = OTHER; note R-N-(1,3-dimethylimidazolidin-2-ylidene)phosphoramidate
  modified_base 8: mod_base = gm
  modified_base 8..9: mod_base = OTHER; note = S-phosphorothioate
  modified_base 9: mod_base = OTHER; note = 2-fluororibose uracil
  modified_base 9..10: mod_base = OTHER; note = S-phosphorothioate
  modified_base 10: mod_base = OTHER; note = 2-fluororibose adenine
  modified_base 10..11: mod_base = OTHER; note = S-phosphorothioate
  modified_base 11: mod_base = OTHER; note = 2-fluororibose adenine
  modified_base 11..12: mod_base = OTHER; note = S-phosphorothioate
  modified_base 12: mod_base = cm
  modified_base 12..13: mod_base = OTHER; note = S-phosphorothioate
  modified_base 13: mod_base = OTHER; note = 2-O-methylribose adenine
  modified_base 13..14: mod_base = OTHER; note = S-phosphorothioate
  modified_base 14: mod_base = cm
  modified_base 14..15: mod_base = OTHER; note = S-phosphorothioate
  modified_base 15: mod_base = OTHER; note = 2-O-methylribose adenine
  modified_base 15..16: mod_base = OTHER; note R-N-(1,3-dimethylimidazolidin-2-ylidene)phosphoramidate
  modified_base 16: mod_base = OTHER; note = 2-O-methylribose adenine
  modified_base 16..17: mod_base = OTHER; note = S-phosphorothioate
  modified_base 17: mod_base = gm
  modified_base 17..18: mod_base = OTHER; note = S-phosphorothioate
  modified_base 18: mod_base = um
  modified_base 18..19: mod_base = OTHER; note = S-phosphorothioate
  modified_base 19: mod_base = OTHER; note = 2-O-methylribose adenine
  modified_base 19..20: mod_base = OTHER; note = S-phosphorothioate
  modified_base 20: mod_base = gm
  modified_base 20..21: mod_base = OTHER; note = S-phosphorothioate
  modified_base 21: mod_base = OTHER; note = 2-O-methylribose adenine
  source 1..21: mol_type = other RNA
ctgtgctgtaacacaagtaga

SEQ ID NO: 776 - RNA, 23 nt, synthetic construct
  misc_feature 1..23: note = Synthetic: SSR-0106220
  modified_base 1: mod_base = OTHER; note = phosphate linked to the 5' end of 5-(R)-methyl-5-deoxy-2-O-methylribose uracil
  modified_base 1..2: mod_base = OTHER; note = S-phosphorothioate
  modified_base 2: mod_base = OTHER; note = 2-fluororibose cytosine
  modified_base 2..3: mod_base = OTHER; note = R-phosphorothioate
  modified_base 3: mod_base = um
  modified_base 3..4: mod_base = OTHER; note S-N-(1,3-dimethylimidazolidin-2-ylidene)phosphoramidate
  modified_base 4: mod_base = OTHER; note = 2-fluororibose adenine
  modified_base 5: mod_base = cm
  modified_base 6: mod_base = OTHER; note = 2-fluororibose uracil
  modified_base 7: mod_base = um
  modified_base 7..8: mod_base = OTHER; note S-N-(1,3-dimethylimidazolidin-2-ylidene)phosphoramidate
  modified_base 8: mod_base = OTHER; note = 2-fluororibose guanine
  modified_base 9: mod_base = um
  modified_base 10: mod_base = OTHER; note = 2-fluororibose guanine
  modified_base 11: mod_base = um
  modified_base 12: mod_base = um
  modified_base 13: mod_base = OTHER; note = 2-O-methylribose adenine
  modified_base 13..14: mod_base = OTHER; note = S-phosphorothioate
  modified_base 14: mod_base = OTHER; note = 2-fluororibose cytosine
  modified_base 14..15: mod_base = OTHER; note = S-phosphorothioate
  modified_base 15: mod_base = OTHER; note = 2-O-methylribose adenine
  modified_base 15..16: mod_base = OTHER; note = S-phosphorothioate
  modified_base 16: mod_base = OTHER; note = 2-fluororibose guanine
  modified_base 16..17: mod_base = OTHER; note = S-phosphorothioate
  modified_base 17: mod_base = cm
  modified_base 17..18: mod_base = OTHER; note = S-phosphorothioate
  modified_base 18: mod_base = OTHER; note = 2-fluororibose adenine
  modified_base 18..19: mod_base = OTHER; note S-N-(1,3-dimethylimidazolidin-2-ylidene)phosphoramidate
  modified_base 19: mod_base = cm
  modified_base 19..20: mod_base = OTHER; note = S-phosphorothioate
  modified_base 20: mod_base = OTHER; note = 2-fluororibose adenine
  modified_base 20..21: mod_base = OTHER; note = S-phosphorothioate
  modified_base 21: mod_base = gm
  modified_base 21..22: mod_base = OTHER; note = S-phosphorothioate
  modified_base 22: mod_base = um
  modified_base 22..23: mod_base = OTHER; note = S-phosphorothioate
  modified_base 23: mod_base = um
  source 1..23: mol_type = other RNA
tctacttgtgttacagcacagtt

SEQ ID NO: 777 - RNA, 23 nt, synthetic construct
  misc_feature 1..23: note = Synthetic: SSR-0106221
  modified_base 1: mod_base = OTHER; note = phosphate linked to the 5' end of 5-(R)-methyl-5-deoxy-2-O-methylribose uracil
  modified_base 1..2: mod_base = OTHER; note = S-phosphorothioate
  modified_base 2: mod_base = OTHER; note = 2-fluororibose cytosine
  modified_base 2..3: mod_base = OTHER; note = R-phosphorothioate
  modified_base 3: mod_base = um
  modified_base 3..4: mod_base = OTHER; note S-N-(1,3-dimethylimidazolidin-2-ylidene)phosphoramidate
  modified_base 4: mod_base = OTHER; note = 2-fluororibose adenine
  modified_base 5: mod_base = cm
  modified_base 6: mod_base = OTHER; note = 2-fluororibose uracil
  modified_base 7: mod_base = um
  modified_base 7..8: mod_base = OTHER; note S-N-(1,3-dimethylimidazolidin-2-ylidene)phosphoramidate
  modified_base 8: mod_base = OTHER; note = 2-fluororibose guanine
  modified_base 9: mod_base = um
  modified_base 10: mod_base = OTHER; note = 2-fluororibose guanine
  modified_base 11: mod_base = um
  modified_base 12: mod_base = um
  modified_base 13: mod_base = OTHER; note = 2-O-methylribose adenine
  modified_base 13..14: mod_base = OTHER; note = S-phosphorothioate
  modified_base 14: mod_base = OTHER; note = 2-fluororibose cytosine
  modified_base 14..15: mod_base = OTHER; note = S-phosphorothioate
  modified_base 15: mod_base = OTHER; note = 2-O-methylribose adenine
  modified_base 15..16: mod_base = OTHER; note = S-phosphorothioate
  modified_base 16: mod_base = OTHER; note = 2-fluororibose guanine
  modified_base 16..17: mod_base = OTHER; note = S-phosphorothioate
  modified_base 17: mod_base = cm
  modified_base 17..18: mod_base = OTHER; note = S-phosphorothioate
  modified_base 18: mod_base = OTHER; note = 2-fluororibose adenine
  modified_base 18..19: mod_base = OTHER; note = S-phosphorothioate
  modified_base 19: mod_base = cm
  modified_base 19..20: mod_base = OTHER; note = S-phosphorothioate
  modified_base 20: mod_base = OTHER; note = 2-fluororibose adenine
  modified_base 20..21: mod_base = OTHER; note = S-phosphorothioate
  modified_base 21: mod_base = gm
  modified_base 21..22: mod_base = OTHER; note = S-phosphorothioate
  modified_base 22: mod_base = um
  modified_base 22..23: mod_base = OTHER; note = S-phosphorothioate
  modified_base 23: mod_base = um
  source 1..23: mol_type = other RNA
tctacttgtgttacagcacagtt

SEQ ID NO: 778 - RNA, 23 nt, synthetic construct
  misc_feature 1..23: note = Synthetic: SSR-0106222
  modified_base 1: mod_base = OTHER; note = phosphate linked to the 5' end of 5-(R)-methyl-5-deoxy-2-O-methylribose uracil
  modified_base 1..2: mod_base = OTHER; note = R-phosphorothioate
  modified_base 2: mod_base = OTHER; note = 2-fluororibose cytosine
  modified_base 2..3: mod_base = OTHER; note = R-phosphorothioate
  modified_base 3: mod_base = um
  modified_base 3..4: mod_base = OTHER; note S-N-(1,3-dimethylimidazolidin-2-ylidene)phosphoramidate
  modified_base 4: mod_base = OTHER; note = 2-fluororibose adenine
  modified_base 5: mod_base = cm
  modified_base 6: mod_base = OTHER; note = 2-fluororibose uracil
  modified_base 7: mod_base = um
  modified_base 7..8: mod_base = OTHER; note S-N-(1,3-dimethylimidazolidin-2-ylidene)phosphoramidate
  modified_base 8: mod_base = OTHER; note = 2-fluororibose guanine
  modified_base 9: mod_base = um
  modified_base 10: mod_base = OTHER; note = 2-fluororibose guanine
  modified_base 11: mod_base = um
  modified_base 12: mod_base = um
  modified_base 13: mod_base = OTHER; note = 2-O-methylribose adenine
  modified_base 13..14: mod_base = OTHER; note = S-phosphorothioate
  modified_base 14: mod_base = OTHER; note = 2-fluororibose cytosine
  modified_base 14..15: mod_base = OTHER; note = S-phosphorothioate
  modified_base 15: mod_base = OTHER; note = 2-O-methylribose adenine
  modified_base 15..16: mod_base = OTHER; note = S-phosphorothioate
  modified_base 16: mod_base = OTHER; note = 2-fluororibose guanine
  modified_base 16..17: mod_base = OTHER; note = S-phosphorothioate
  modified_base 17: mod_base = cm
  modified_base 17..18: mod_base = OTHER; note = S-phosphorothioate
  modified_base 18: mod_base = OTHER; note = 2-fluororibose adenine
  modified_base 18..19: mod_base = OTHER; note S-N-(1,3-dimethylimidazolidin-2-ylidene)phosphoramidate
  modified_base 19: mod_base = cm
  modified_base 19..20: mod_base = OTHER; note = S-phosphorothioate
  modified_base 20: mod_base = OTHER; note = 2-fluororibose adenine
  modified_base 20..21: mod_base = OTHER; note = S-phosphorothioate
  modified_base 21: mod_base = gm
  modified_base 21..22: mod_base = OTHER; note = S-phosphorothioate
  modified_base 22: mod_base = um
  modified_base 22..23: mod_base = OTHER; note = S-phosphorothioate
  modified_base 23: mod_base = um
  source 1..23: mol_type = other RNA
tctacttgtgttacagcacagtt

SEQ ID NO: 779 - RNA, 23 nt, synthetic construct
  misc_feature 1..23: note = Synthetic: SSR-0106223
  modified_base 1: mod_base = OTHER; note = phosphate linked to the 5' end of 5-(R)-methyl-5-deoxy-2-O-methylribose uracil
  modified_base 1..2: mod_base = OTHER; note = R-phosphorothioate
  modified_base 2: mod_base = OTHER; note = 2-fluororibose cytosine
  modified_base 2..3: mod_base = OTHER; note = R-phosphorothioate
  modified_base 3: mod_base = um
  modified_base 3..4: mod_base = OTHER; note S-N-(1,3-dimethylimidazolidin-2-ylidene)phosphoramidate
  modified_base 4: mod_base = OTHER; note = 2-fluororibose adenine
  modified_base 5: mod_base = cm
  modified_base 6: mod_base = OTHER; note = 2-fluororibose uracil
  modified_base 7: mod_base = um
  modified_base 7..8: mod_base = OTHER; note S-N-(1,3-dimethylimidazolidin-2-ylidene)phosphoramidate
  modified_base 8: mod_base = OTHER; note = 2-fluororibose guanine
  modified_base 9: mod_base = um
  modified_base 10: mod_base = OTHER; note = 2-fluororibose guanine
  modified_base 11: mod_base = um
  modified_base 12: mod_base = um
  modified_base 13: mod_base = OTHER; note = 2-O-methylribose adenine
  modified_base 13..14: mod_base = OTHER; note = S-phosphorothioate
  modified_base 14: mod_base = OTHER; note = 2-fluororibose cytosine
  modified_base 14..15: mod_base = OTHER; note = S-phosphorothioate
  modified_base 15: mod_base = OTHER; note = 2-O-methylribose adenine
  modified_base 15..16: mod_base = OTHER; note = S-phosphorothioate
  modified_base 16: mod_base = OTHER; note = 2-fluororibose guanine
  modified_base 16..17: mod_base = OTHER; note = S-phosphorothioate
  modified_base 17: mod_base = cm
  modified_base 17..18: mod_base = OTHER; note = S-phosphorothioate
  modified_base 18: mod_base = OTHER; note = 2-fluororibose adenine
  modified_base 18..19: mod_base = OTHER; note = S-phosphorothioate
  modified_base 19: mod_base = cm
  modified_base 19..20: mod_base = OTHER; note = S-phosphorothioate
  modified_base 20: mod_base = OTHER; note = 2-fluororibose adenine
  modified_base 20..21: mod_base = OTHER; note = S-phosphorothioate
  modified_base 21: mod_base = gm
  modified_base 21..22: mod_base = OTHER; note = S-phosphorothioate
  modified_base 22: mod_base = um
  modified_base 22..23: mod_base = OTHER; note = S-phosphorothioate
  modified_base 23: mod_base = um
  source 1..23: mol_type = other RNA
tctacttgtgttacagcacagtt

SEQ ID NO: 780 - RNA, 23 nt, synthetic construct
  misc_feature 1..23: note = Synthetic: SSR-0106224
  modified_base 1: mod_base = OTHER; note = phosphate linked to the 5' end of 5-(R)-methyl-5-deoxy-2-O-methylribose uracil
  modified_base 1..2: mod_base = OTHER; note = S-phosphorothioate
  modified_base 2: mod_base = OTHER; note = 2-fluororibose cytosine
  modified_base 2..3: mod_base = OTHER; note = S-phosphorothioate
  modified_base 3: mod_base = um
  modified_base 3..4: mod_base = OTHER; note S-N-(1,3-dimethylimidazolidin-2-ylidene)phosphoramidate
  modified_base 4: mod_base = OTHER; note = 2-fluororibose adenine
  modified_base 5: mod_base = cm
  modified_base 6: mod_base = OTHER; note = 2-fluororibose uracil
  modified_base 7: mod_base = um
  modified_base 7..8: mod_base = OTHER; note S-N-(1,3-dimethylimidazolidin-2-ylidene)phosphoramidate
  modified_base 8: mod_base = OTHER; note = 2-fluororibose guanine
  modified_base 9: mod_base = um
  modified_base 10: mod_base = OTHER; note = 2-fluororibose guanine
  modified_base 11: mod_base = um
  modified_base 12: mod_base = um
  modified_base 13: mod_base = OTHER; note = 2-O-methylribose adenine
  modified_base 13..14: mod_base = OTHER; note = S-phosphorothioate
  modified_base 14: mod_base = OTHER; note = 2-fluororibose cytosine
  modified_base 14..15: mod_base = OTHER; note = S-phosphorothioate
  modified_base 15: mod_base = OTHER; note = 2-O-methylribose adenine
  modified_base 15..16: mod_base = OTHER; note = S-phosphorothioate
  modified_base 16: mod_base = OTHER; note = 2-fluororibose guanine
  modified_base 16..17: mod_base = OTHER; note = S-phosphorothioate
  modified_base 17: mod_base = cm
  modified_base 17..18: mod_base = OTHER; note = S-phosphorothioate
  modified_base 18: mod_base = OTHER; note = 2-fluororibose adenine
  modified_base 18..19: mod_base = OTHER; note S-N-(1,3-dimethylimidazolidin-2-ylidene)phosphoramidate
  modified_base 19: mod_base = cm
  modified_base 19..20: mod_base = OTHER; note = S-phosphorothioate
  modified_base 20: mod_base = OTHER; note = 2-fluororibose adenine
  modified_base 20..21: mod_base = OTHER; note = S-phosphorothioate
  modified_base 21: mod_base = gm
  modified_base 21..22: mod_base = OTHER; note = S-phosphorothioate
  modified_base 22: mod_base = um
  modified_base 22..23: mod_base = OTHER; note = S-phosphorothioate
  modified_base 23: mod_base = um
  source 1..23: mol_type = other RNA
tctacttgtgttacagcacagtt

SEQ ID NO: 781 - RNA, 23 nt, synthetic construct
  misc_feature 1..23: note = Synthetic: SSR-0106225
  modified_base 1: mod_base = OTHER; note = phosphate linked to the 5' end of 5-(R)-methyl-5-deoxy-2-O-methylribose uracil
  modified_base 1..2: mod_base = OTHER; note = S-phosphorothioate
  modified_base 2: mod_base = OTHER; note = 2-fluororibose cytosine
  modified_base 2..3: mod_base = OTHER; note = S-phosphorothioate
  modified_base 3: mod_base = um
  modified_base 3..4: mod_base = OTHER; note S-N-(1,3-dimethylimidazolidin-2-ylidene)phosphoramidate
  modified_base 4: mod_base = OTHER; note = 2-fluororibose adenine
  modified_base 5: mod_base = cm
  modified_base 6: mod_base = OTHER; note = 2-fluororibose uracil
  modified_base 7: mod_base = um
  modified_base 7..8: mod_base = OTHER; note S-N-(1,3-dimethylimidazolidin-2-ylidene)phosphoramidate
  modified_base 8: mod_base = OTHER; note = 2-fluororibose guanine
  modified_base 9: mod_base = um
  modified_base 10: mod_base = OTHER; note = 2-fluororibose guanine
  modified_base 11: mod_base = um
  modified_base 12: mod_base = um
  modified_base 13: mod_base = OTHER; note = 2-O-methylribose adenine
  modified_base 13..14: mod_base = OTHER; note = S-phosphorothioate
  modified_base 14: mod_base = OTHER; note = 2-fluororibose cytosine
  modified_base 14..15: mod_base = OTHER; note = S-phosphorothioate
  modified_base 15: mod_base = OTHER; note = 2-O-methylribose adenine
  modified_base 15..16: mod_base = OTHER; note = S-phosphorothioate
  modified_base 16: mod_base = OTHER; note = 2-fluororibose guanine
  modified_base 16..17: mod_base = OTHER; note = S-phosphorothioate
  modified_base 17: mod_base = cm
  modified_base 17..18: mod_base = OTHER; note = S-phosphorothioate
  modified_base 18: mod_base = OTHER; note = 2-fluororibose adenine
  modified_base 18..19: mod_base = OTHER; note = S-phosphorothioate
  modified_base 19: mod_base = cm
  modified_base 19..20: mod_base = OTHER; note = S-phosphorothioate
  modified_base 20: mod_base = OTHER; note = 2-fluororibose adenine
  modified_base 20..21: mod_base = OTHER; note = S-phosphorothioate
  modified_base 21: mod_base = gm
  modified_base 21..22: mod_base = OTHER; note = S-phosphorothioate
  modified_base 22: mod_base = um
  modified_base 22..23: mod_base = OTHER; note = S-phosphorothioate
  modified_base 23: mod_base = um
  source 1..23: mol_type = other RNA
tctacttgtgttacagcacagtt

SEQ ID NO: 782 - RNA, 23 nt, synthetic construct
  misc_feature 1..23: note = Synthetic: SSR-0106266
  modified_base 1: mod_base = um
  modified_base 1..2: mod_base = OTHER; note = S-phosphorothioate
  modified_base 2: mod_base = OTHER; note = 2-fluororibose uracil
  modified_base 2..3: mod_base = OTHER; note = R-phosphorothioate
  modified_base 3: mod_base = OTHER; note = 2-O-methylribose adenine
  modified_base 3..4: mod_base = OTHER; note S-N-(1,3-dimethylimidazolidin-2-ylidene)phosphoramidate
  modified_base 4: mod_base = OTHER; note = 2-fluororibose uracil
  modified_base 5: mod_base = OTHER; note = 2-O-methylribose adenine
  modified_base 6: mod_base = OTHER; note = 2-fluororibose guanine
  modified_base 7: mod_base = OTHER; note = 2-O-methylribose adenine
  modified_base 8: mod_base = gm
  modified_base 9: mod_base = cm
  modified_base 10: mod_base = OTHER; note = 2-O-methylribose adenine
  modified_base 10..11: mod_base = OTHER; note S-N-(1,3-dimethylimidazolidin-2-ylidene)phosphoramidate
  modified_base 11: mod_base = OTHER; note = 2-fluororibose adenine
  modified_base 12: mod_base = gm
  modified_base 12..13: mod_base = OTHER; note S-N-(1,3-dimethylimidazolidin-2-ylidene)phosphoramidate
  modified_base 13: mod_base = OTHER; note = 2-O-methylribose adenine
  modified_base 13..14: mod_base = OTHER; note S-N-(1,3-dimethylimidazolidin-2-ylidene)phosphoramidate
  modified_base 14: mod_base = OTHER; note = 2-fluororibose adenine
  modified_base 15: mod_base = cm
  modified_base 16: mod_base = OTHER; note = 2-fluororibose adenine
  modified_base 17: mod_base = cm
  modified_base 18: mod_base = um
  modified_base 19: mod_base = gm
  modified_base 20: mod_base = um
  modified_base 21: mod_base = um
  modified_base 21..22: mod_base = OTHER; note = S-phosphorothioate
  modified_base 22: mod_base = um
  modified_base 22..23: mod_base = OTHER; note = S-phosphorothioate
  modified_base 23: mod_base = um
  source 1..23: mol_type = other RNA
ttatagagcaagaacactgtttt

SEQ ID NO: 783 - RNA, 23 nt, synthetic construct
  misc_feature 1..23: note = Synthetic: SSR-0106267
  modified_base 1: mod_base = um
  modified_base 1..2: mod_base = OTHER; note = S-phosphorothioate
  modified_base 2: mod_base = OTHER; note = 2-fluororibose uracil
  modified_base 2..3: mod_base = OTHER; note = R-phosphorothioate
  modified_base 3: mod_base = OTHER; note = 2-O-methylribose adenine
  modified_base 3..4: mod_base = OTHER; note S-N-(1,3-dimethylimidazolidin-2-ylidene)phosphoramidate
  modified_base 4: mod_base = OTHER; note = 2-fluororibose uracil
  modified_base 5: mod_base = OTHER; note = 2-O-methylribose adenine
  modified_base 6: mod_base = OTHER; note = 2-fluororibose guanine
  modified_base 7: mod_base = OTHER; note = 2-O-methylribose adenine
  modified_base 8: mod_base = gm
  modified_base 9: mod_base = cm
  modified_base 10: mod_base = OTHER; note = 2-O-methylribose adenine
  modified_base 10..11: mod_base = OTHER; note S-N-(1,3-dimethylimidazolidin-2-ylidene)phosphoramidate
  modified_base 11: mod_base = OTHER; note = 2-fluororibose adenine
  modified_base 12: mod_base = gm
  modified_base 13: mod_base = OTHER; note = 2-O-methylribose adenine
  modified_base 13..14: mod_base = OTHER; note S-N-(1,3-dimethylimidazolidin-2-ylidene)phosphoramidate
  modified_base 14: mod_base = OTHER; note = 2-fluororibose adenine
  modified_base 14..15: mod_base = OTHER; note S-N-(1,3-dimethylimidazolidin-2-ylidene)phosphoramidate
  modified_base 15: mod_base = cm
  modified_base 16: mod_base = OTHER; note = 2-fluororibose adenine
  modified_base 17: mod_base = cm
  modified_base 18: mod_base = um
  modified_base 19: mod_base = gm
  modified_base 20: mod_base = um
  modified_base 21: mod_base = um
  modified_base 21..22: mod_base = OTHER; note = S-phosphorothioate
  modified_base 22: mod_base = um
  modified_base 22..23: mod_base = OTHER; note = S-phosphorothioate
  modified_base 23: mod_base = um
  source 1..23: mol_type = other RNA
ttatagagcaagaacactgtttt

SEQ ID NO: 784 - RNA, 23 nt, synthetic construct
  misc_feature 1..23: note = Synthetic: SSR-0106268
  modified_base 1: mod_base = um
  modified_base 1..2: mod_base = OTHER; note = S-phosphorothioate
  modified_base 2: mod_base = OTHER; note = 2-fluororibose uracil
  modified_base 2..3: mod_base = OTHER; note = R-phosphorothioate
  modified_base 3: mod_base = OTHER; note = 2-O-methylribose adenine
  modified_base 3..4: mod_base = OTHER; note S-N-(1,3-dimethylimidazolidin-2-ylidene)phosphoramidate
  modified_base 4: mod_base = OTHER; note = 2-fluororibose uracil
  modified_base 5: mod_base = OTHER; note = 2-O-methylribose adenine
  modified_base 6: mod_base = OTHER; note = 2-fluororibose guanine
  modified_base 7: mod_base = OTHER; note = 2-O-methylribose adenine
  modified_base 8: mod_base = gm
  modified_base 9: mod_base = cm
  modified_base 10: mod_base = OTHER; note = 2-O-methylribose adenine
  modified_base 10..11: mod_base = OTHER; note S-N-(1,3-dimethylimidazolidin-2-ylidene)phosphoramidate
  modified_base 11: mod_base = OTHER; note = 2-fluororibose adenine
  modified_base 12: mod_base = gm
  modified_base 13: mod_base = OTHER; note = 2-O-methylribose adenine
  modified_base 14: mod_base = OTHER; note = 2-fluororibose adenine
  modified_base 14..15: mod_base = OTHER; note S-N-(1,3-dimethylimidazolidin-2-ylidene)phosphoramidate
  modified_base 15: mod_base = cm
  modified_base 15..16: mod_base = OTHER; note S-N-(1,3-dimethylimidazolidin-2-ylidene)phosphoramidate
  modified_base 16: mod_base = OTHER; note = 2-fluororibose adenine
  modified_base 17: mod_base = cm
  modified_base 18: mod_base = um
  modified_base 19: mod_base = gm
  modified_base 20: mod_base = um
  modified_base 21: mod_base = um
  modified_base 21..22: mod_base = OTHER; note = S-phosphorothioate
  modified_base 22: mod_base = um
  modified_base 22..23: mod_base = OTHER; note = S-phosphorothioate
  modified_base 23: mod_base = um
  source 1..23: mol_type = other RNA
ttatagagcaagaacactgtttt

SEQ ID NO: 785 - RNA, 23 nt, synthetic construct
  misc_feature 1..23: note = Synthetic: SSR-0106269
  modified_base 1: mod_base = um
  modified_base 1..2: mod_base = OTHER; note = S-phosphorothioate
  modified_base 2: mod_base = OTHER; note = 2-fluororibose uracil
  modified_base 2..3: mod_base = OTHER; note = R-phosphorothioate
  modified_base 3: mod_base = OTHER; note = 2-O-methylribose adenine
  modified_base 3..4: mod_base = OTHER; note S-N-(1,3-dimethylimidazolidin-2-ylidene)phosphoramidate
  modified_base 4: mod_base = OTHER; note = 2-fluororibose uracil
  modified_base 5: mod_base = OTHER; note = 2-O-methylribose adenine
  modified_base 6: mod_base = OTHER; note = 2-fluororibose guanine
  modified_base 7: mod_base = OTHER; note = 2-O-methylribose adenine
  modified_base 8: mod_base = gm
  modified_base 9: mod_base = cm
  modified_base 10: mod_base = OTHER; note = 2-O-methylribose adenine
  modified_base 10..11: mod_base = OTHER; note S-N-(1,3-dimethylimidazolidin-2-ylidene)phosphoramidate
  modified_base 11: mod_base = OTHER; note = 2-fluororibose adenine
  modified_base 12: mod_base = gm
  modified_base 13: mod_base = OTHER; note = 2-O-methylribose adenine
  modified_base 14: mod_base = OTHER; note = 2-fluororibose adenine
  modified_base 15: mod_base = cm
  modified_base 15..16: mod_base = OTHER; note S-N-(1,3-dimethylimidazolidin-2-ylidene)phosphoramidate
  modified_base 16: mod_base = OTHER; note = 2-fluororibose adenine
  modified_base 16..17: mod_base = OTHER; note S-N-(1,3-dimethylimidazolidin-2-ylidene)phosphoramidate
  modified_base 17: mod_base = cm
  modified_base 18: mod_base = um
  modified_base 19: mod_base = gm
  modified_base 20: mod_base = um
  modified_base 21: mod_base = um
  modified_base 21..22: mod_base = OTHER; note = S-phosphorothioate
  modified_base 22: mod_base = um
  modified_base 22..23: mod_base = OTHER; note = S-phosphorothioate
  modified_base 23: mod_base = um
  source 1..23: mol_type = other RNA
ttatagagcaagaacactgtttt

SEQ ID NO: 786 - RNA, 23 nt, synthetic construct
  misc_feature 1..23: note = Synthetic: SSR-0106270
  modified_base 1: mod_base = um
  modified_base 1..2: mod_base = OTHER; note = S-phosphorothioate
  modified_base 2: mod_base = OTHER; note = 2-fluororibose uracil
  modified_base 2..3: mod_base = OTHER; note = R-phosphorothioate
  modified_base 3: mod_base = OTHER; note = 2-O-methylribose adenine
  modified_base 3..4: mod_base = OTHER; note S-N-(1,3-dimethylimidazolidin-2-ylidene)phosphoramidate
  modified_base 4: mod_base = OTHER; note = 2-fluororibose uracil
  modified_base 5: mod_base = OTHER; note = 2-O-methylribose adenine
  modified_base 6: mod_base = OTHER; note = 2-fluororibose guanine
  modified_base 7: mod_base = OTHER; note = 2-O-methylribose adenine
  modified_base 8: mod_base = gm
  modified_base 9: mod_base = cm
  modified_base 10: mod_base = OTHER; note = 2-O-methylribose adenine
  modified_base 10..11: mod_base = OTHER; note S-N-(1,3-dimethylimidazolidin-2-ylidene)phosphoramidate
  modified_base 11: mod_base = OTHER; note = 2-fluororibose adenine
  modified_base 12: mod_base = gm
  modified_base 13: mod_base = OTHER; note = 2-O-methylribose adenine
  modified_base 14: mod_base = OTHER; note = 2-fluororibose adenine
  modified_base 15: mod_base = cm
  modified_base 16: mod_base = OTHER; note = 2-fluororibose adenine
  modified_base 16..17: mod_base = OTHER; note S-N-(1,3-dimethylimidazolidin-2-ylidene)phosphoramidate
  modified_base 17: mod_base = cm
  modified_base 17..18: mod_base = OTHER; note S-N-(1,3-dimethylimidazolidin-2-ylidene)phosphoramidate
  modified_base 18: mod_base = um
  modified_base 19: mod_base = gm
  modified_base 20: mod_base = um
  modified_base 21: mod_base = um
  modified_base 21..22: mod_base = OTHER; note = S-phosphorothioate
  modified_base 22: mod_base = um
  modified_base 22..23: mod_base = OTHER; note = S-phosphorothioate
  modified_base 23: mod_base = um
  source 1..23: mol_type = other RNA
ttatagagcaagaacactgtttt

SEQ ID NO: 787 - RNA, 23 nt, synthetic construct
  misc_feature 1..23: note = Synthetic: SSR-0106271
  modified_base 1: mod_base = um
  modified_base 1..2: mod_base = OTHER; note = S-phosphorothioate
  modified_base 2: mod_base = OTHER; note = 2-fluororibose uracil
  modified_base 2..3: mod_base = OTHER; note = R-phosphorothioate
  modified_base 3: mod_base = OTHER; note = 2-O-methylribose adenine
  modified_base 3..4: mod_base = OTHER; note S-N-(1,3-dimethylimidazolidin-2-ylidene)phosphoramidate
  modified_base 4: mod_base = OTHER; note = 2-fluororibose uracil
  modified_base 5: mod_base = OTHER; note = 2-O-methylribose adenine
  modified_base 6: mod_base = OTHER; note = 2-fluororibose guanine
  modified_base 7: mod_base = OTHER; note = 2-O-methylribose adenine
  modified_base 8: mod_base = gm
  modified_base 9: mod_base = cm
  modified_base 10: mod_base = OTHER; note = 2-O-methylribose adenine
  modified_base 10..11: mod_base = OTHER; note S-N-(1,3-dimethylimidazolidin-2-ylidene)phosphoramidate
  modified_base 11: mod_base = OTHER; note = 2-fluororibose adenine
  modified_base 12: mod_base = gm
  modified_base 13: mod_base = OTHER; note = 2-O-methylribose adenine
  modified_base 14: mod_base = OTHER; note = 2-fluororibose adenine
  modified_base 15: mod_base = cm
  modified_base 16: mod_base = OTHER; note = 2-fluororibose adenine
  modified_base 17: mod_base = cm
  modified_base 17..18: mod_base = OTHER; note S-N-(1,3-dimethylimidazolidin-2-ylidene)phosphoramidate
  modified_base 18: mod_base = um
  modified_base 18..19: mod_base = OTHER; note S-N-(1,3-dimethylimidazolidin-2-ylidene)phosphoramidate
  modified_base 19: mod_base = gm
  modified_base 20: mod_base = um
  modified_base 21: mod_base = um
  modified_base 21..22: mod_base = OTHER; note = S-phosphorothioate
  modified_base 22: mod_base = um
  modified_base 22..23: mod_base = OTHER; note = S-phosphorothioate
  modified_base 23: mod_base = um
  source 1..23: mol_type = other RNA
ttatagagcaagaacactgtttt

SEQ ID NO: 788 - RNA, 23 nt, synthetic construct
  misc_feature 1..23: note = Synthetic: SSR-0106272
  modified_base 1: mod_base = um
  modified_base 1..2: mod_base = OTHER; note = S-phosphorothioate
  modified_base 2: mod_base = OTHER; note = 2-fluororibose uracil
  modified_base 2..3: mod_base = OTHER; note = R-phosphorothioate
  modified_base 3: mod_base = OTHER; note = 2-O-methylribose adenine
  modified_base 3..4: mod_base = OTHER; note S-N-(1,3-dimethylimidazolidin-2-ylidene)phosphoramidate
  modified_base 4: mod_base = OTHER; note = 2-fluororibose uracil
  modified_base 5: mod_base = OTHER; note = 2-O-methylribose adenine
  modified_base 6: mod_base = OTHER; note = 2-fluororibose guanine
  modified_base 7: mod_base = OTHER; note = 2-O-methylribose adenine
  modified_base 8: mod_base = gm
  modified_base 9: mod_base = cm
  modified_base 10: mod_base = OTHER; note = 2-O-methylribose adenine
  modified_base 10..11: mod_base = OTHER; note S-N-(1,3-dimethylimidazolidin-2-ylidene)phosphoramidate
  modified_base 11: mod_base = OTHER; note = 2-fluororibose adenine
  modified_base 12: mod_base = gm
  modified_base 13: mod_base = OTHER; note = 2-O-methylribose adenine
  modified_base 14: mod_base = OTHER; note = 2-fluororibose adenine
  modified_base 15: mod_base = cm
  modified_base 16: mod_base = OTHER; note = 2-fluororibose adenine
  modified_base 17: mod_base = cm
  modified_base 18: mod_base = um
  modified_base 18..19: mod_base = OTHER; note S-N-(1,3-dimethylimidazolidin-2-ylidene)phosphoramidate
  modified_base 19: mod_base = gm
  modified_base 19..20: mod_base = OTHER; note S-N-(1,3-dimethylimidazolidin-2-ylidene)phosphoramidate
  modified_base 20: mod_base = um
  modified_base 21: mod_base = um
  modified_base 21..22: mod_base = OTHER; note = S-phosphorothioate
  modified_base 22: mod_base = um
  modified_base 22..23: mod_base = OTHER; note = S-phosphorothioate
  modified_base 23: mod_base = um
  source 1..23: mol_type = other RNA
ttatagagcaagaacactgtttt

SEQ ID NO: 789 - RNA, 23 nt, synthetic construct
  misc_feature 1..23: note = Synthetic: SSR-0106273
  modified_base 1: mod_base = um
  modified_base 1..2: mod_base = OTHER; note = S-phosphorothioate
  modified_base 2: mod_base = OTHER; note = 2-fluororibose uracil
  modified_base 2..3: mod_base = OTHER; note = R-phosphorothioate
  modified_base 3: mod_base = OTHER; note = 2-O-methylribose adenine
  modified_base 3..4: mod_base = OTHER; note S-N-(1,3-dimethylimidazolidin-2-ylidene)phosphoramidate
  modified_base 4: mod_base = OTHER; note = 2-fluororibose uracil
  modified_base 5: mod_base = OTHER; note = 2-O-methylribose adenine
  modified_base 6: mod_base = OTHER; note = 2-fluororibose guanine
  modified_base 7: mod_base = OTHER; note = 2-O-methylribose adenine
  modified_base 8: mod_base = gm
  modified_base 9: mod_base = cm
  modified_base 10: mod_base = OTHER; note = 2-O-methylribose adenine
  modified_base 10..11: mod_base = OTHER; note S-N-(1,3-dimethylimidazolidin-2-ylidene)phosphoramidate
  modified_base 11: mod_base = OTHER; note = 2-fluororibose adenine
  modified_base 12: mod_base = gm
  modified_base 13: mod_base = OTHER; note = 2-O-methylribose adenine
  modified_base 14: mod_base = OTHER; note = 2-fluororibose adenine
  modified_base 15: mod_base = cm
  modified_base 16: mod_base = OTHER; note = 2-fluororibose adenine
  modified_base 17: mod_base = cm
  modified_base 18: mod_base = um
  modified_base 19: mod_base = gm
  modified_base 19..20: mod_base = OTHER; note S-N-(1,3-dimethylimidazolidin-2-ylidene)phosphoramidate
  modified_base 20: mod_base = um
  modified_base 20..21: mod_base = OTHER; note S-N-(1,3-dimethylimidazolidin-2-ylidene)phosphoramidate
  modified_base 21: mod_base = um
  modified_base 21..22: mod_base = OTHER; note = S-phosphorothioate
  modified_base 22: mod_base = um
  modified_base 22..23: mod_base = OTHER; note = S-phosphorothioate
  modified_base 23: mod_base = um
  source 1..23: mol_type = other RNA
ttatagagcaagaacactgtttt

SEQ ID NO: 790 - RNA, 23 nt, synthetic construct
  misc_feature 1..23: note = Synthetic: SSR-0106274
  modified_base 1: mod_base = um
  modified_base 1..2: mod_base = OTHER; note = S-phosphorothioate
  modified_base 2: mod_base = OTHER; note = 2-fluororibose uracil
  modified_base 2..3: mod_base = OTHER; note = R-phosphorothioate
  modified_base 3: mod_base = OTHER; note = 2-O-methylribose adenine
  modified_base 3..4: mod_base = OTHER; note S-N-(1,3-dimethylimidazolidin-2-ylidene)phosphoramidate
  modified_base 4: mod_base = OTHER; note = 2-fluororibose uracil
  modified_base 5: mod_base = OTHER; note = 2-O-methylribose adenine
  modified_base 6: mod_base = OTHER; note = 2-fluororibose guanine
  modified_base 7: mod_base = OTHER; note = 2-O-methylribose adenine
  modified_base 8: mod_base = gm
  modified_base 9: mod_base = cm
  modified_base 10: mod_base = OTHER; note = 2-O-methylribose adenine
  modified_base 10..11: mod_base = OTHER; note S-N-(1,3-dimethylimidazolidin-2-ylidene)phosphoramidate
  modified_base 11: mod_base = OTHER; note = 2-fluororibose adenine
  modified_base 12: mod_base = gm
  modified_base 12..13: mod_base = OTHER; note S-N-(1,3-dimethylimidazolidin-2-ylidene)phosphoramidate
  modified_base 13: mod_base = OTHER; note = 2-O-methylribose adenine
  modified_base 13..14: mod_base = OTHER; note S-N-(1,3-dimethylimidazolidin-2-ylidene)phosphoramidate
  modified_base 14: mod_base = OTHER; note = 2-fluororibose adenine
  modified_base 14..15: mod_base = OTHER; note S-N-(1,3-dimethylimidazolidin-2-ylidene)phosphoramidate
  modified_base 15: mod_base = cm
  modified_base 16: mod_base = OTHER; note = 2-fluororibose adenine
  modified_base 17: mod_base = cm
  modified_base 18: mod_base = um
  modified_base 19: mod_base = gm
  modified_base 20: mod_base = um
  modified_base 21: mod_base = um
  modified_base 21..22: mod_base = OTHER; note = S-phosphorothioate
  modified_base 22: mod_base = um
  modified_base 22..23: mod_base = OTHER; note = S-phosphorothioate
  modified_base 23: mod_base = um
  source 1..23: mol_type = other RNA
ttatagagcaagaacactgtttt

SEQ ID NO: 791 - RNA, 23 nt, synthetic construct
  misc_feature 1..23: note = Synthetic: SSR-0106275
  modified_base 1: mod_base = um
  modified_base 1..2: mod_base = OTHER; note = S-phosphorothioate
  modified_base 2: mod_base = OTHER; note = 2-fluororibose uracil
  modified_base 2..3: mod_base = OTHER; note = R-phosphorothioate
  modified_base 3: mod_base = OTHER; note = 2-O-methylribose adenine
  modified_base 3..4: mod_base = OTHER; note S-N-(1,3-dimethylimidazolidin-2-ylidene)phosphoramidate
  modified_base 4: mod_base = OTHER; note = 2-fluororibose uracil
  modified_base 5: mod_base = OTHER; note = 2-O-methylribose adenine
  modified_base 6: mod_base = OTHER; note = 2-fluororibose guanine
  modified_base 7: mod_base = OTHER; note = 2-O-methylribose adenine
  modified_base 8: mod_base = gm
  modified_base 9: mod_base = cm
  modified_base 10: mod_base = OTHER; note = 2-O-methylribose adenine
  modified_base 10..11: mod_base = OTHER; note S-N-(1,3-dimethylimidazolidin-2-ylidene)phosphoramidate
  modified_base 11: mod_base = OTHER; note = 2-fluororibose adenine
  modified_base 12: mod_base = gm
  modified_base 13: mod_base = OTHER; note = 2-O-methylribose adenine
  modified_base 13..14: mod_base = OTHER; note S-N-(1,3-dimethylimidazolidin-2-ylidene)phosphoramidate
  modified_base 14: mod_base = OTHER; note = 2-fluororibose adenine
  modified_base 14..15: mod_base = OTHER; note S-N-(1,3-dimethylimidazolidin-2-ylidene)phosphoramidate
  modified_base 15: mod_base = cm
  modified_base 15..16: mod_base = OTHER; note S-N-(1,3-dimethylimidazolidin-2-ylidene)phosphoramidate
  modified_base 16: mod_base = OTHER; note = 2-fluororibose adenine
  modified_base 17: mod_base = cm
  modified_base 18: mod_base = um
  modified_base 19: mod_base = gm
  modified_base 20: mod_base = um
  modified_base 21: mod_base = um
  modified_base 21..22: mod_base = OTHER; note = S-phosphorothioate
  modified_base 22: mod_base = um
  modified_base 22..23: mod_base = OTHER; note = S-phosphorothioate
  modified_base 23: mod_base = um
  source 1..23: mol_type = other RNA
ttatagagcaagaacactgtttt

SEQ ID NO: 792 - RNA, 23 nt, synthetic construct
  misc_feature 1..23: note = Synthetic: SSR-0106276
  modified_base 1: mod_base = um
  modified_base 1..2: mod_base = OTHER; note = S-phosphorothioate
  modified_base 2: mod_base = OTHER; note = 2-fluororibose uracil
  modified_base 2..3: mod_base = OTHER; note = R-phosphorothioate
  modified_base 3: mod_base = OTHER; note = 2-O-methylribose adenine
  modified_base 3..4: mod_base = OTHER; note S-N-(1,3-dimethylimidazolidin-2-ylidene)phosphoramidate
  modified_base 4: mod_base = OTHER; note = 2-fluororibose uracil
  modified_base 5: mod_base = OTHER; note = 2-O-methylribose adenine
  modified_base 6: mod_base = OTHER; note = 2-fluororibose guanine
  modified_base 7: mod_base = OTHER; note = 2-O-methylribose adenine
  modified_base 8: mod_base = gm
  modified_base 9: mod_base = cm
  modified_base 10: mod_base = OTHER; note = 2-O-methylribose adenine
  modified_base 10..11: mod_base = OTHER; note S-N-(1,3-dimethylimidazolidin-2-ylidene)phosphoramidate
  modified_base 11: mod_base = OTHER; note = 2-fluororibose adenine
  modified_base 12: mod_base = gm
  modified_base 13: mod_base = OTHER; note = 2-O-methylribose adenine
  modified_base 14: mod_base = OTHER; note = 2-fluororibose adenine
  modified_base 14..15: mod_base = OTHER; note S-N-(1,3-dimethylimidazolidin-2-ylidene)phosphoramidate
  modified_base 15: mod_base = cm
  modified_base 15..16: mod_base = OTHER; note S-N-(1,3-dimethylimidazolidin-2-ylidene)phosphoramidate
  modified_base 16: mod_base = OTHER; note = 2-fluororibose adenine
  modified_base 16..17: mod_base = OTHER; note S-N-(1,3-dimethylimidazolidin-2-ylidene)phosphoramidate
  modified_base 17: mod_base = cm
  modified_base 18: mod_base = um
  modified_base 19: mod_base = gm
  modified_base 20: mod_base = um
  modified_base 21: mod_base = um
  modified_base 21..22: mod_base = OTHER; note = S-phosphorothioate
  modified_base 22: mod_base = um
  modified_base 22..23: mod_base = OTHER; note = S-phosphorothioate
  modified_base 23: mod_base = um
  source 1..23: mol_type = other RNA
ttatagagcaagaacactgtttt

SEQ ID NO: 793 - RNA, 23 nt, synthetic construct
  misc_feature 1..23: note = Synthetic: SSR-0106277
  modified_base 1: mod_base = um
  modified_base 1..2: mod_base = OTHER; note = S-phosphorothioate
  modified_base 2: mod_base = OTHER; note = 2-fluororibose uracil
  modified_base 2..3: mod_base = OTHER; note = R-phosphorothioate
  modified_base 3: mod_base = OTHER; note = 2-O-methylribose adenine
  modified_base 3..4: mod_base = OTHER; note S-N-(1,3-dimethylimidazolidin-2-ylidene)phosphoramidate
  modified_base 4: mod_base = OTHER; note = 2-fluororibose uracil
  modified_base 5: mod_base = OTHER; note = 2-O-methylribose adenine
  modified_base 6: mod_base = OTHER; note = 2-fluororibose guanine
  modified_base 7: mod_base = OTHER; note = 2-O-methylribose adenine
  modified_base 8: mod_base = gm
  modified_base 9: mod_base = cm
  modified_base 10: mod_base = OTHER; note = 2-O-methylribose adenine
  modified_base 10..11: mod_base = OTHER; note S-N-(1,3-dimethylimidazolidin-2-ylidene)phosphoramidate
  modified_base 11: mod_base = OTHER; note = 2-fluororibose adenine
  modified_base 12: mod_base = gm
  modified_base 13: mod_base = OTHER; note = 2-O-methylribose adenine
  modified_base 14: mod_base = OTHER; note = 2-fluororibose adenine
  modified_base 15: mod_base = cm
  modified_base 15..16: mod_base = OTHER; note S-N-(1,3-dimethylimidazolidin-2-ylidene)phosphoramidate
  modified_base 16: mod_base = OTHER; note = 2-fluororibose adenine
  modified_base 16..17: mod_base = OTHER; note S-N-(1,3-dimethylimidazolidin-2-ylidene)phosphoramidate
  modified_base 17: mod_base = cm
  modified_base 17..18: mod_base = OTHER; note S-N-(1,3-dimethylimidazolidin-2-ylidene)phosphoramidate
  modified_base 18: mod_base = um
  modified_base 19: mod_base = gm
  modified_base 20: mod_base = um
  modified_base 21: mod_base = um
  modified_base 21..22: mod_base = OTHER; note = S-phosphorothioate
  modified_base 22: mod_base = um
  modified_base 22..23: mod_base = OTHER; note = S-phosphorothioate
  modified_base 23: mod_base = um
  source 1..23: mol_type = other RNA
ttatagagcaagaacactgtttt

SEQ ID NO: 794 - RNA, 23 nt, synthetic construct
  misc_feature 1..23: note = Synthetic: SSR-0106278
  modified_base 1: mod_base = um
  modified_base 1..2: mod_base = OTHER; note = S-phosphorothioate
  modified_base 2: mod_base = OTHER; note = 2-fluororibose uracil
  modified_base 2..3: mod_base = OTHER; note = R-phosphorothioate
  modified_base 3: mod_base = OTHER; note = 2-O-methylribose adenine
  modified_base 3..4: mod_base = OTHER; note S-N-(1,3-dimethylimidazolidin-2-ylidene)phosphoramidate
  modified_base 4: mod_base = OTHER; note = 2-fluororibose uracil
  modified_base 5: mod_base = OTHER; note = 2-O-methylribose adenine
  modified_base 6: mod_base = OTHER; note = 2-fluororibose guanine
  modified_base 7: mod_base = OTHER; note = 2-O-methylribose adenine
  modified_base 8: mod_base = gm
  modified_base 9: mod_base = cm
  modified_base 10: mod_base = OTHER; note = 2-O-methylribose adenine
  modified_base 10..11: mod_base = OTHER; note S-N-(1,3-dimethylimidazolidin-2-ylidene)phosphoramidate
  modified_base 11: mod_base = OTHER; note = 2-fluororibose adenine
  modified_base 12: mod_base = gm
  modified_base 13: mod_base = OTHER; note = 2-O-methylribose adenine
  modified_base 14: mod_base = OTHER; note = 2-fluororibose adenine
  modified_base 15: mod_base = cm
  modified_base 16: mod_base = OTHER; note = 2-fluororibose adenine
  modified_base 16..17: mod_base = OTHER; note S-N-(1,3-dimethylimidazolidin-2-ylidene)phosphoramidate
  modified_base 17: mod_base = cm
  modified_base 17..18: mod_base = OTHER; note S-N-(1,3-dimethylimidazolidin-2-ylidene)phosphoramidate
  modified_base 18: mod_base = um
  modified_base 18..19: mod_base = OTHER; note S-N-(1,3-dimethylimidazolidin-2-ylidene)phosphoramidate
  modified_base 19: mod_base = gm
  modified_base 20: mod_base = um
  modified_base 21: mod_base = um
  modified_base 21..22: mod_base = OTHER; note = S-phosphorothioate
  modified_base 22: mod_base = um
  modified_base 22..23: mod_base = OTHER; note = S-phosphorothioate
  modified_base 23: mod_base = um
  source 1..23: mol_type = other RNA
ttatagagcaagaacactgtttt

SEQ ID NO: 795 - RNA, 23 nt, synthetic construct
  misc_feature 1..23: note = Synthetic: SSR-0106279
  modified_base 1: mod_base = um
  modified_base 1..2: mod_base = OTHER; note = S-phosphorothioate
  modified_base 2: mod_base = OTHER; note = 2-fluororibose uracil
  modified_base 2..3: mod_base = OTHER; note = R-phosphorothioate
  modified_base 3: mod_base = OTHER; note = 2-O-methylribose adenine
  modified_base 3..4: mod_base = OTHER; note S-N-(1,3-dimethylimidazolidin-2-ylidene)phosphoramidate
  modified_base 4: mod_base = OTHER; note = 2-fluororibose uracil
  modified_base 5: mod_base = OTHER; note = 2-O-methylribose adenine
  modified_base 6: mod_base = OTHER; note = 2-fluororibose guanine
  modified_base 7: mod_base = OTHER; note = 2-O-methylribose adenine
  modified_base 8: mod_base = gm
  modified_base 9: mod_base = cm
  modified_base 10: mod_base = OTHER; note = 2-O-methylribose adenine
  modified_base 10..11: mod_base = OTHER; note S-N-(1,3-dimethylimidazolidin-2-ylidene)phosphoramidate
  modified_base 11: mod_base = OTHER; note = 2-fluororibose adenine
  modified_base 12: mod_base = gm
  modified_base 13: mod_base = OTHER; note = 2-O-methylribose adenine
  modified_base 14: mod_base = OTHER; note = 2-fluororibose adenine
  modified_base 15: mod_base = cm
  modified_base 16: mod_base = OTHER; note = 2-fluororibose adenine
  modified_base 17: mod_base = cm
  modified_base 17..18: mod_base = OTHER; note S-N-(1,3-dimethylimidazolidin-2-ylidene)phosphoramidate
  modified_base 18: mod_base = um
  modified_base 18..19: mod_base = OTHER; note S-N-(1,3-dimethylimidazolidin-2-ylidene)phosphoramidate
  modified_base 19: mod_base = gm
  modified_base 19..20: mod_base = OTHER; note S-N-(1,3-dimethylimidazolidin-2-ylidene)phosphoramidate
  modified_base 20: mod_base = um
  modified_base 21: mod_base = um
  modified_base 21..22: mod_base = OTHER; note = S-phosphorothioate
  modified_base 22: mod_base = um
  modified_base 22..23: mod_base = OTHER; note = S-phosphorothioate
  modified_base 23: mod_base = um
  source 1..23: mol_type = other RNA
ttatagagcaagaacactgtttt

SEQ ID NO: 796 - RNA, 23 nt, synthetic construct
  misc_feature 1..23: note = Synthetic: SSR-0106280
  modified_base 1: mod_base = um
  modified_base 1..2: mod_base = OTHER; note = S-phosphorothioate
  modified_base 2: mod_base = OTHER; note = 2-fluororibose uracil
  modified_base 2..3: mod_base = OTHER; note = R-phosphorothioate
  modified_base 3: mod_base = OTHER; note = 2-O-methylribose adenine
  modified_base 3..4: mod_base = OTHER; note S-N-(1,3-dimethylimidazolidin-2-ylidene)phosphoramidate
  modified_base 4: mod_base = OTHER; note = 2-fluororibose uracil
  modified_base 5: mod_base = OTHER; note = 2-O-methylribose adenine
  modified_base 6: mod_base = OTHER; note = 2-fluororibose guanine
  modified_base 7: mod_base = OTHER; note = 2-O-methylribose adenine
  modified_base 8: mod_base = gm
  modified_base 9: mod_base = cm
  modified_base 10: mod_base = OTHER; note = 2-O-methylribose adenine
  modified_base 10..11: mod_base = OTHER; note S-N-(1,3-dimethylimidazolidin-2-ylidene)phosphoramidate
  modified_base 11: mod_base = OTHER; note = 2-fluororibose adenine
  modified_base 12: mod_base = gm
  modified_base 13: mod_base = OTHER; note = 2-O-methylribose adenine
  modified_base 14: mod_base = OTHER; note = 2-fluororibose adenine
  modified_base 15: mod_base = cm
  modified_base 16: mod_base = OTHER; note = 2-fluororibose adenine
  modified_base 17: mod_base = cm
  modified_base 18: mod_base = um
  modified_base 18..19: mod_base = OTHER; note S-N-(1,3-dimethylimidazolidin-2-ylidene)phosphoramidate
  modified_base 19: mod_base = gm
  modified_base 19..20: mod_base = OTHER; note S-N-(1,3-dimethylimidazolidin-2-ylidene)phosphoramidate
  modified_base 20: mod_base = um
  modified_base 20..21: mod_base = OTHER; note S-N-(1,3-dimethylimidazolidin-2-ylidene)phosphoramidate
  modified_base 21: mod_base = um
  modified_base 21..22: mod_base = OTHER; note = S-phosphorothioate
  modified_base 22: mod_base = um
  modified_base 22..23: mod_base = OTHER; note = S-phosphorothioate
  modified_base 23: mod_base = um
  source 1..23: mol_type = other RNA
ttatagagcaagaacactgtttt

SEQ ID NO: 797 - RNA, 23 nt, synthetic construct
  misc_feature 1..23: note = Synthetic: SSR-0106281
  modified_base 1: mod_base = um
  modified_base 1..2: mod_base = OTHER; note = S-phosphorothioate
  modified_base 2: mod_base = OTHER; note = 2-fluororibose uracil
  modified_base 2..3: mod_base = OTHER; note = R-phosphorothioate
  modified_base 3: mod_base = OTHER; note = 2-O-methylribose adenine
  modified_base 3..4: mod_base = OTHER; note S-N-(1,3-dimethylimidazolidin-2-ylidene)phosphoramidate
  modified_base 4: mod_base = OTHER; note = 2-fluororibose uracil
  modified_base 5: mod_base = OTHER; note = 2-O-methylribose adenine
  modified_base 6: mod_base = OTHER; note = 2-fluororibose guanine
  modified_base 7: mod_base = OTHER; note = 2-O-methylribose adenine
  modified_base 8: mod_base = gm
  modified_base 9: mod_base = cm
  modified_base 10: mod_base = OTHER; note = 2-O-methylribose adenine
  modified_base 10..11: mod_base = OTHER; note S-N-(1,3-dimethylimidazolidin-2-ylidene)phosphoramidate
  modified_base 11: mod_base = OTHER; note = 2-fluororibose adenine
  modified_base 12: mod_base = gm
  modified_base 12..13: mod_base = OTHER; note S-N-(1,3-dimethylimidazolidin-2-ylidene)phosphoramidate
  modified_base 13: mod_base = OTHER; note = 2-O-methylribose adenine
  modified_base 13..14: mod_base = OTHER; note S-N-(1,3-dimethylimidazolidin-2-ylidene)phosphoramidate
  modified_base 14: mod_base = OTHER; note = 2-fluororibose adenine
  modified_base 14..15: mod_base = OTHER; note S-N-(1,3-dimethylimidazolidin-2-ylidene)phosphoramidate
  modified_base 15: mod_base = cm
  modified_base 15..16: mod_base = OTHER; note S-N-(1,3-dimethylimidazolidin-2-ylidene)phosphoramidate
  modified_base 16: mod_base = OTHER; note = 2-fluororibose adenine
  modified_base 17: mod_base = cm
  modified_base 18: mod_base = um
  modified_base 19: mod_base = gm
  modified_base 20: mod_base = um
  modified_base 21: mod_base = um
  modified_base 21..22: mod_base = OTHER; note = S-phosphorothioate
  modified_base 22: mod_base = um
  modified_base 22..23: mod_base = OTHER; note = S-phosphorothioate
  modified_base 23: mod_base = um
  source 1..23: mol_type = other RNA
ttatagagcaagaacactgtttt

SEQ ID NO: 798 - RNA, 23 nt, synthetic construct
  misc_feature 1..23: note = Synthetic: SSR-0106282
  modified_base 1: mod_base = um
  modified_base 1..2: mod_base = OTHER; note = S-phosphorothioate
  modified_base 2: mod_base = OTHER; note = 2-fluororibose uracil
  modified_base 2..3: mod_base = OTHER; note = R-phosphorothioate
  modified_base 3: mod_base = OTHER; note = 2-O-methylribose adenine
  modified_base 3..4: mod_base = OTHER; note S-N-(1,3-dimethylimidazolidin-2-ylidene)phosphoramidate
  modified_base 4: mod_base = OTHER; note = 2-fluororibose uracil
  modified_base 5: mod_base = OTHER; note = 2-O-methylribose adenine
  modified_base 6: mod_base = OTHER; note = 2-fluororibose guanine
  modified_base 7: mod_base = OTHER; note = 2-O-methylribose adenine
  modified_base 8: mod_base = gm
  modified_base 9: mod_base = cm
  modified_base 10: mod_base = OTHER; note = 2-O-methylribose adenine
  modified_base 10..11: mod_base = OTHER; note S-N-(1,3-dimethylimidazolidin-2-ylidene)phosphoramidate
  modified_base 11: mod_base = OTHER; note = 2-fluororibose adenine
  modified_base 12: mod_base = gm
  modified_base 13: mod_base = OTHER; note = 2-O-methylribose adenine
  modified_base 13..14: mod_base = OTHER; note S-N-(1,3-dimethylimidazolidin-2-ylidene)phosphoramidate
  modified_base 14: mod_base = OTHER; note = 2-fluororibose adenine
  modified_base 14..15: mod_base = OTHER; note S-N-(1,3-dimethylimidazolidin-2-ylidene)phosphoramidate
  modified_base 15: mod_base = cm
  modified_base 15..16: mod_base = OTHER; note S-N-(1,3-dimethylimidazolidin-2-ylidene)phosphoramidate
  modified_base 16: mod_base = OTHER; note = 2-fluororibose adenine
  modified_base 16..17: mod_base = OTHER; note S-N-(1,3-dimethylimidazolidin-2-ylidene)phosphoramidate
  modified_base 17: mod_base = cm
  modified_base 18: mod_base = um
  modified_base 19: mod_base = gm
  modified_base 20: mod_base = um
  modified_base 21: mod_base = um
  modified_base 21..22: mod_base = OTHER; note = S-phosphorothioate
  modified_base 22: mod_base = um
  modified_base 22..23: mod_base = OTHER; note = S-phosphorothioate
  modified_base 23: mod_base = um
  source 1..23: mol_type = other RNA
ttatagagcaagaacactgtttt

SEQ ID NO: 799 - RNA, 23 nt, synthetic construct
  misc_feature 1..23: note = Synthetic: SSR-0106283
  modified_base 1: mod_base = um
  modified_base 1..2: mod_base = OTHER; note = S-phosphorothioate
  modified_base 2: mod_base = OTHER; note = 2-fluororibose uracil
  modified_base 2..3: mod_base = OTHER; note = R-phosphorothioate
  modified_base 3: mod_base = OTHER; note = 2-O-methylribose adenine
  modified_base 3..4: mod_base = OTHER; note S-N-(1,3-dimethylimidazolidin-2-ylidene)phosphoramidate
  modified_base 4: mod_base = OTHER; note = 2-fluororibose uracil
  modified_base 5: mod_base = OTHER; note = 2-O-methylribose adenine
  modified_base 6: mod_base = OTHER; note = 2-fluororibose guanine
  modified_base 7: mod_base = OTHER; note = 2-O-methylribose adenine
  modified_base 8: mod_base = gm
  modified_base 9: mod_base = cm
  modified_base 10: mod_base = OTHER; note = 2-O-methylribose adenine
  modified_base 10..11: mod_base = OTHER; note S-N-(1,3-dimethylimidazolidin-2-ylidene)phosphoramidate
  modified_base 11: mod_base = OTHER; note = 2-fluororibose adenine
  modified_base 12: mod_base = gm
  modified_base 13: mod_base = OTHER; note = 2-O-methylribose adenine
  modified_base 14: mod_base = OTHER; note = 2-fluororibose adenine
  modified_base 14..15: mod_base = OTHER; note S-N-(1,3-dimethylimidazolidin-2-ylidene)phosphoramidate
  modified_base 15: mod_base = cm
  modified_base 15..16: mod_base = OTHER; note S-N-(1,3-dimethylimidazolidin-2-ylidene)phosphoramidate
  modified_base 16: mod_base = OTHER; note = 2-fluororibose adenine
  modified_base 16..17: mod_base = OTHER; note S-N-(1,3-dimethylimidazolidin-2-ylidene)phosphoramidate
  modified_base 17: mod_base = cm
  modified_base 17..18: mod_base = OTHER; note S-N-(1,3-dimethylimidazolidin-2-ylidene)phosphoramidate
  modified_base 18: mod_base = um
  modified_base 19: mod_base = gm
  modified_base 20: mod_base = um
  modified_base 21: mod_base = um
  modified_base 21..22: mod_base = OTHER; note = S-phosphorothioate
  modified_base 22: mod_base = um
  modified_base 22..23: mod_base = OTHER; note = S-phosphorothioate
  modified_base 23: mod_base = um
  source 1..23: mol_type = other RNA
ttatagagcaagaacactgtttt

SEQ ID NO: 800 - RNA, 23 nt, synthetic construct
  misc_feature 1..23: note = Synthetic: SSR-0106284
  modified_base 1: mod_base = um
  modified_base 1..2: mod_base = OTHER; note = S-phosphorothioate
  modified_base 2: mod_base = OTHER; note = 2-fluororibose uracil
  modified_base 2..3: mod_base = OTHER; note = R-phosphorothioate
  modified_base 3: mod_base = OTHER; note = 2-O-methylribose adenine
  modified_base 3..4: mod_base = OTHER; note S-N-(1,3-dimethylimidazolidin-2-ylidene)phosphoramidate
  modified_base 4: mod_base = OTHER; note = 2-fluororibose uracil
  modified_base 5: mod_base = OTHER; note = 2-O-methylribose adenine
  modified_base 6: mod_base = OTHER; note = 2-fluororibose guanine
  modified_base 7: mod_base = OTHER; note = 2-O-methylribose adenine
  modified_base 8: mod_base = gm
  modified_base 9: mod_base = cm
  modified_base 10: mod_base = OTHER; note = 2-O-methylribose adenine
  modified_base 10..11: mod_base = OTHER; note S-N-(1,3-dimethylimidazolidin-2-ylidene)phosphoramidate
  modified_base 11: mod_base = OTHER; note = 2-fluororibose adenine
  modified_base 12: mod_base = gm
  modified_base 13: mod_base = OTHER; note = 2-O-methylribose adenine
  modified_base 14: mod_base = OTHER; note = 2-fluororibose adenine
  modified_base 15: mod_base = cm
  modified_base 15..16: mod_base = OTHER; note S-N-(1,3-dimethylimidazolidin-2-ylidene)phosphoramidate
  modified_base 16: mod_base = OTHER; note = 2-fluororibose adenine
  modified_base 16..17: mod_base = OTHER; note S-N-(1,3-dimethylimidazolidin-2-ylidene)phosphoramidate
  modified_base 17: mod_base = cm
  modified_base 17..18: mod_base = OTHER; note S-N-(1,3-dimethylimidazolidin-2-ylidene)phosphoramidate
  modified_base 18: mod_base = um
  modified_base 18..19: mod_base = OTHER; note S-N-(1,3-dimethylimidazolidin-2-ylidene)phosphoramidate
  modified_base 19: mod_base = gm
  modified_base 20: mod_base = um
  modified_base 21: mod_base = um
  modified_base 21..22: mod_base = OTHER; note = S-phosphorothioate
  modified_base 22: mod_base = um
  modified_base 22..23: mod_base = OTHER; note = S-phosphorothioate
  modified_base 23: mod_base = um
  source 1..23: mol_type = other RNA
ttatagagcaagaacactgtttt

SEQ ID NO: 801 - RNA, 23 nt, synthetic construct
  misc_feature 1..23: note = Synthetic: SSR-0106285
  modified_base 1: mod_base = um
  modified_base 1..2: mod_base = OTHER; note = S-phosphorothioate
  modified_base 2: mod_base = OTHER; note = 2-fluororibose uracil
  modified_base 2..3: mod_base = OTHER; note = R-phosphorothioate
  modified_base 3: mod_base = OTHER; note = 2-O-methylribose adenine
  modified_base 3..4: mod_base = OTHER; note S-N-(1,3-dimethylimidazolidin-2-ylidene)phosphoramidate
  modified_base 4: mod_base = OTHER; note = 2-fluororibose uracil
  modified_base 5: mod_base = OTHER; note = 2-O-methylribose adenine
  modified_base 6: mod_base = OTHER; note = 2-fluororibose guanine
  modified_base 7: mod_base = OTHER; note = 2-O-methylribose adenine
  modified_base 8: mod_base = gm
  modified_base 9: mod_base = cm
  modified_base 10: mod_base = OTHER; note = 2-O-methylribose adenine
  modified_base 10..11: mod_base = OTHER; note S-N-(1,3-dimethylimidazolidin-2-ylidene)phosphoramidate
  modified_base 11: mod_base = OTHER; note = 2-fluororibose adenine
  modified_base 12: mod_base = gm
  modified_base 13: mod_base = OTHER; note = 2-O-methylribose adenine
  modified_base 14: mod_base = OTHER; note = 2-fluororibose adenine
  modified_base 15: mod_base = cm
  modified_base 16: mod_base = OTHER; note = 2-fluororibose adenine
  modified_base 16..17: mod_base = OTHER; note S-N-(1,3-dimethylimidazolidin-2-ylidene)phosphoramidate
  modified_base 17: mod_base = cm
  modified_base 17..18: mod_base = OTHER; note S-N-(1,3-dimethylimidazolidin-2-ylidene)phosphoramidate
  modified_base 18: mod_base = um
  modified_base 18..19: mod_base = OTHER; note S-N-(1,3-dimethylimidazolidin-2-ylidene)phosphoramidate
  modified_base 19: mod_base = gm
  modified_base 19..20: mod_base = OTHER; note S-N-(1,3-dimethylimidazolidin-2-ylidene)phosphoramidate
  modified_base 20: mod_base = um
  modified_base 21: mod_base = um
  modified_base 21..22: mod_base = OTHER; note = S-phosphorothioate
  modified_base 22: mod_base = um
  modified_base 22..23: mod_base = OTHER; note = S-phosphorothioate
  modified_base 23: mod_base = um
  source 1..23: mol_type = other RNA
ttatagagcaagaacactgtttt

SEQ ID NO: 802 - RNA, 23 nt, synthetic construct
  misc_feature 1..23: note = Synthetic: SSR-0106286
  modified_base 1: mod_base = um
  modified_base 1..2: mod_base = OTHER; note = S-phosphorothioate
  modified_base 2: mod_base = OTHER; note = 2-fluororibose uracil
  modified_base 2..3: mod_base = OTHER; note = R-phosphorothioate
  modified_base 3: mod_base = OTHER; note = 2-O-methylribose adenine
  modified_base 3..4: mod_base = OTHER; note S-N-(1,3-dimethylimidazolidin-2-ylidene)phosphoramidate
  modified_base 4: mod_base = OTHER; note = 2-fluororibose uracil
  modified_base 5: mod_base = OTHER; note = 2-O-methylribose adenine
  modified_base 6: mod_base = OTHER; note = 2-fluororibose guanine
  modified_base 7: mod_base = OTHER; note = 2-O-methylribose adenine
  modified_base 8: mod_base = gm
  modified_base 9: mod_base = cm
  modified_base 10: mod_base = OTHER; note = 2-O-methylribose adenine
  modified_base 10..11: mod_base = OTHER; note S-N-(1,3-dimethylimidazolidin-2-ylidene)phosphoramidate
  modified_base 11: mod_base = OTHER; note = 2-fluororibose adenine
  modified_base 12: mod_base = gm
  modified_base 13: mod_base = OTHER; note = 2-O-methylribose adenine
  modified_base 14: mod_base = OTHER; note = 2-fluororibose adenine
  modified_base 15: mod_base = cm
  modified_base 16: mod_base = OTHER; note = 2-fluororibose adenine
  modified_base 17: mod_base = cm
  modified_base 17..18: mod_base = OTHER; note S-N-(1,3-dimethylimidazolidin-2-ylidene)phosphoramidate
  modified_base 18: mod_base = um
  modified_base 18..19: mod_base = OTHER; note S-N-(1,3-dimethylimidazolidin-2-ylidene)phosphoramidate
  modified_base 19: mod_base = gm
  modified_base 19..20: mod_base = OTHER; note S-N-(1,3-dimethylimidazolidin-2-ylidene)phosphoramidate
  modified_base 20: mod_base = um
  modified_base 20..21: mod_base = OTHER; note S-N-(1,3-dimethylimidazolidin-2-ylidene)phosphoramidate
  modified_base 21: mod_base = um
  modified_base 21..22: mod_base = OTHER; note = S-phosphorothioate
  modified_base 22: mod_base = um
  modified_base 22..23: mod_base = OTHER; note = S-phosphorothioate
  modified_base 23: mod_base = um
  source 1..23: mol_type = other RNA
ttatagagcaagaacactgtttt

SEQ ID NO: 803 - RNA, 23 nt, synthetic construct
  misc_feature 1..23: note = Synthetic: SSR-0106287
  modified_base 1: mod_base = um
  modified_base 1..2: mod_base = OTHER; note = S-phosphorothioate
  modified_base 2: mod_base = OTHER; note = 2-fluororibose uracil
  modified_base 2..3: mod_base = OTHER; note = R-phosphorothioate
  modified_base 3: mod_base = OTHER; note = 2-O-methylribose adenine
  modified_base 3..4: mod_base = OTHER; note S-N-(1,3-dimethylimidazolidin-2-ylidene)phosphoramidate
  modified_base 4: mod_base = OTHER; note = 2-fluororibose uracil
  modified_base 5: mod_base = OTHER; note = 2-O-methylribose adenine
  modified_base 6: mod_base = OTHER; note = 2-fluororibose guanine
  modified_base 7: mod_base = OTHER; note = 2-O-methylribose adenine
  modified_base 8: mod_base = gm
  modified_base 9: mod_base = cm
  modified_base 10: mod_base = OTHER; note = 2-O-methylribose adenine
  modified_base 10..11: mod_base = OTHER; note S-N-(1,3-dimethylimidazolidin-2-ylidene)phosphoramidate
  modified_base 11: mod_base = OTHER; note = 2-fluororibose adenine
  modified_base 12: mod_base = gm
  modified_base 12..13: mod_base = OTHER; note S-N-(1,3-dimethylimidazolidin-2-ylidene)phosphoramidate
  modified_base 13: mod_base = OTHER; note = 2-O-methylribose adenine
  modified_base 14: mod_base = OTHER; note = 2-fluororibose adenine
  modified_base 14..15: mod_base = OTHER; note S-N-(1,3-dimethylimidazolidin-2-ylidene)phosphoramidate
  modified_base 15: mod_base = cm
  modified_base 16: mod_base = OTHER; note = 2-fluororibose adenine
  modified_base 16..17: mod_base = OTHER; note S-N-(1,3-dimethylimidazolidin-2-ylidene)phosphoramidate
  modified_base 17: mod_base = cm
  modified_base 18: mod_base = um
  modified_base 18..19: mod_base = OTHER; note S-N-(1,3-dimethylimidazolidin-2-ylidene)phosphoramidate
  modified_base 19: mod_base = gm
  modified_base 20: mod_base = um
  modified_base 20..21: mod_base = OTHER; note S-N-(1,3-dimethylimidazolidin-2-ylidene)phosphoramidate
  modified_base 21: mod_base = um
  modified_base 21..22: mod_base = OTHER; note = S-phosphorothioate
  modified_base 22: mod_base = um
  modified_base 22..23: mod_base = OTHER; note = S-phosphorothioate
  modified_base 23: mod_base = um
  source 1..23: mol_type = other RNA
ttatagagcaagaacactgtttt

SEQ ID NO: 804 - RNA, 23 nt, synthetic construct
  misc_feature 1..23: note = Synthetic: SSR-0106288
  modified_base 1: mod_base = um
  modified_base 1..2: mod_base = OTHER; note = S-phosphorothioate
  modified_base 2: mod_base = OTHER; note = 2-fluororibose uracil
  modified_base 2..3: mod_base = OTHER; note = R-phosphorothioate
  modified_base 3: mod_base = OTHER; note = 2-O-methylribose adenine
  modified_base 3..4: mod_base = OTHER; note S-N-(1,3-dimethylimidazolidin-2-ylidene)phosphoramidate
  modified_base 4: mod_base = OTHER; note = 2-fluororibose uracil
  modified_base 5: mod_base = OTHER; note = 2-O-methylribose adenine
  modified_base 6: mod_base = OTHER; note = 2-fluororibose guanine
  modified_base 7: mod_base = OTHER; note = 2-O-methylribose adenine
  modified_base 8: mod_base = gm
  modified_base 9: mod_base = cm
  modified_base 10: mod_base = OTHER; note = 2-O-methylribose adenine
  modified_base 10..11: mod_base = OTHER; note S-N-(1,3-dimethylimidazolidin-2-ylidene)phosphoramidate
  modified_base 11: mod_base = OTHER; note = 2-fluororibose adenine
  modified_base 12: mod_base = gm
  modified_base 13: mod_base = OTHER; note = 2-O-methylribose adenine
  modified_base 13..14: mod_base = OTHER; note S-N-(1,3-dimethylimidazolidin-2-ylidene)phosphoramidate
  modified_base 14: mod_base = OTHER; note = 2-fluororibose adenine
  modified_base 15: mod_base = cm
  modified_base 15..16: mod_base = OTHER; note S-N-(1,3-dimethylimidazolidin-2-ylidene)phosphoramidate
  modified_base 16: mod_base = OTHER; note = 2-fluororibose adenine
  modified_base 17: mod_base = cm
  modified_base 17..18: mod_base = OTHER; note S-N-(1,3-dimethylimidazolidin-2-ylidene)phosphoramidate
  modified_base 18: mod_base = um
  modified_base 19: mod_base = gm
  modified_base 19..20: mod_base = OTHER; note S-N-(1,3-dimethylimidazolidin-2-ylidene)phosphoramidate
  modified_base 20: mod_base = um
  modified_base 21: mod_base = um
  modified_base 21..22: mod_base = OTHER; note = S-phosphorothioate
  modified_base 22: mod_base = um
  modified_base 22..23: mod_base = OTHER; note = S-phosphorothioate
  modified_base 23: mod_base = um
  source 1..23: mol_type = other RNA
ttatagagcaagaacactgtttt

SEQ ID NO: 805 - RNA, 23 nt, synthetic construct
  misc_feature 1..23: note = Synthetic: SSR-0106289
  modified_base 1: mod_base = um
  modified_base 1..2: mod_base = OTHER; note = S-phosphorothioate
  modified_base 2: mod_base = OTHER; note = 2-fluororibose uracil
  modified_base 2..3: mod_base = OTHER; note = R-phosphorothioate
  modified_base 3: mod_base = OTHER; note = 2-O-methylribose adenine
  modified_base 3..4: mod_base = OTHER; note S-N-(1,3-dimethylimidazolidin-2-ylidene)phosphoramidate
  modified_base 4: mod_base = OTHER; note = 2-fluororibose uracil
  modified_base 5: mod_base = OTHER; note = 2-O-methylribose adenine
  modified_base 6: mod_base = OTHER; note = 2-fluororibose guanine
  modified_base 7: mod_base = OTHER; note = 2-O-methylribose adenine
  modified_base 8: mod_base = gm
  modified_base 9: mod_base = cm
  modified_base 10: mod_base = OTHER; note = 2-O-methylribose adenine
  modified_base 10..11: mod_base = OTHER; note S-N-(1,3-dimethylimidazolidin-2-ylidene)phosphoramidate
  modified_base 11: mod_base = OTHER; note = 2-fluororibose adenine
  modified_base 12: mod_base = gm
  modified_base 12..13: mod_base = OTHER; note S-N-(1,3-dimethylimidazolidin-2-ylidene)phosphoramidate
  modified_base 13: mod_base = OTHER; note = 2-fluororibose adenine
  modified_base 14: mod_base = OTHER; note = 2-fluororibose adenine
  modified_base 14..15: mod_base = OTHER; note S-N-(1,3-dimethylimidazolidin-2-ylidene)phosphoramidate
  modified_base 15: mod_base = OTHER; note = 2-fluororibose cytosine
  modified_base 16: mod_base = OTHER; note = 2-fluororibose adenine
  modified_base 16..17: mod_base = OTHER; note S-N-(1,3-dimethylimidazolidin-2-ylidene)phosphoramidate
  modified_base 17: mod_base = OTHER; note = 2-fluororibose cytosine
  modified_base 18: mod_base = um
  modified_base 18..19: mod_base = OTHER; note S-N-(1,3-dimethylimidazolidin-2-ylidene)phosphoramidate
  modified_base 19: mod_base = OTHER; note = 2-fluororibose guanine
  modified_base 20: mod_base = um
  modified_base 20..21: mod_base = OTHER; note S-N-(1,3-dimethylimidazolidin-2-ylidene)phosphoramidate
  modified_base 21: mod_base = OTHER; note = 2-fluororibose uracil
  modified_base 21..22: mod_base = OTHER; note = S-phosphorothioate
  modified_base 22: mod_base = um
  modified_base 22..23: mod_base = OTHER; note = S-phosphorothioate
  modified_base 23: mod_base = um
  source 1..23: mol_type = other RNA
ttatagagcaagaacactgtttt

SEQ ID NO: 806 - RNA, 23 nt, synthetic construct
  misc_feature 1..23: note = Synthetic: SSR-0106290
  modified_base 1: mod_base = um
  modified_base 1..2: mod_base = OTHER; note = S-phosphorothioate
  modified_base 2: mod_base = OTHER; note = 2-fluororibose uracil
  modified_base 2..3: mod_base = OTHER; note = R-phosphorothioate
  modified_base 3: mod_base = OTHER; note = 2-O-methylribose adenine
  modified_base 3..4: mod_base = OTHER; note S-N-(1,3-dimethylimidazolidin-2-ylidene)phosphoramidate
  modified_base 4: mod_base = OTHER; note = 2-fluororibose uracil
  modified_base 5: mod_base = OTHER; note = 2-O-methylribose adenine
  modified_base 6: mod_base = OTHER; note = 2-fluororibose guanine
  modified_base 7: mod_base = OTHER; note = 2-O-methylribose adenine
  modified_base 8: mod_base = gm
  modified_base 9: mod_base = cm
  modified_base 10: mod_base = OTHER; note = 2-O-methylribose adenine
  modified_base 10..11: mod_base = OTHER; note S-N-(1,3-dimethylimidazolidin-2-ylidene)phosphoramidate
  modified_base 11: mod_base = OTHER; note = 2-fluororibose adenine
  modified_base 12: mod_base = gm
  modified_base 13: mod_base = OTHER; note = 2-O-methylribose adenine
  modified_base 13..14: mod_base = OTHER; note S-N-(1,3-dimethylimidazolidin-2-ylidene)phosphoramidate
  modified_base 14: mod_base = OTHER; note = 2-fluororibose adenine
  modified_base 15: mod_base = cm
  modified_base 15..16: mod_base = OTHER; note S-N-(1,3-dimethylimidazolidin-2-ylidene)phosphoramidate
  modified_base 16: mod_base = OTHER; note = 2-fluororibose adenine
  modified_base 17: mod_base = cm
  modified_base 17..18: mod_base = OTHER; note S-N-(1,3-dimethylimidazolidin-2-ylidene)phosphoramidate
  modified_base 18: mod_base = OTHER; note = 2-fluororibose uracil
  modified_base 19: mod_base = gm
  modified_base 19..20: mod_base = OTHER; note S-N-(1,3-dimethylimidazolidin-2-ylidene)phosphoramidate
  modified_base 20: mod_base = OTHER; note = 2-fluororibose uracil
  modified_base 21: mod_base = um
  modified_base 21..22: mod_base = OTHER; note = S-phosphorothioate
  modified_base 22: mod_base = um
  modified_base 22..23: mod_base = OTHER; note = S-phosphorothioate
  modified_base 23: mod_base = um
  source 1..23: mol_type = other RNA
ttatagagcaagaacactgtttt

SEQ ID NO: 807 - RNA, 23 nt, synthetic construct
  misc_feature 1..23: note = Synthetic: SSR-0106291
  modified_base 1: mod_base = um
  modified_base 1..2: mod_base = OTHER; note = S-phosphorothioate
  modified_base 2: mod_base = OTHER; note = 2-fluororibose uracil
  modified_base 2..3: mod_base = OTHER; note = R-phosphorothioate
  modified_base 3: mod_base = OTHER; note = 2-O-methylribose adenine
  modified_base 3..4: mod_base = OTHER; note S-N-(1,3-dimethylimidazolidin-2-ylidene)phosphoramidate
  modified_base 4: mod_base = OTHER; note = 2-fluororibose uracil
  modified_base 5: mod_base = OTHER; note = 2-O-methylribose adenine
  modified_base 6: mod_base = OTHER; note = 2-fluororibose guanine
  modified_base 7: mod_base = OTHER; note = 2-O-methylribose adenine
  modified_base 8: mod_base = gm
  modified_base 9: mod_base = cm
  modified_base 10: mod_base = OTHER; note = 2-O-methylribose adenine
  modified_base 10..11: mod_base = OTHER; note S-N-(1,3-dimethylimidazolidin-2-ylidene)phosphoramidate
  modified_base 11: mod_base = OTHER; note = 2-fluororibose adenine
  modified_base 12: mod_base = gm
  modified_base 13: mod_base = OTHER; note = 2-O-methylribose adenine
  modified_base 13..14: mod_base = OTHER; note S-N-(1,3-dimethylimidazolidin-2-ylidene)phosphoramidate
  modified_base 14: mod_base = OTHER; note = 2-fluororibose adenine
  modified_base 14..15: mod_base = OTHER; note S-N-(1,3-dimethylimidazolidin-2-ylidene)phosphoramidate
  modified_base 15: mod_base = cm
  modified_base 16: mod_base = OTHER; note = 2-fluororibose adenine
  modified_base 17: mod_base = cm
  modified_base 17..18: mod_base = OTHER; note S-N-(1,3-dimethylimidazolidin-2-ylidene)phosphoramidate
  modified_base 18: mod_base = um
  modified_base 18..19: mod_base = OTHER; note S-N-(1,3-dimethylimidazolidin-2-ylidene)phosphoramidate
  modified_base 19: mod_base = gm
  modified_base 20: mod_base = um
  modified_base 21: mod_base = um
  modified_base 21..22: mod_base = OTHER; note = S-phosphorothioate
  modified_base 22: mod_base = um
  modified_base 22..23: mod_base = OTHER; note = S-phosphorothioate
  modified_base 23: mod_base = um
  source 1..23: mol_type = other RNA
ttatagagcaagaacactgtttt

SEQ ID NO: 808 - RNA, 23 nt, synthetic construct
  misc_feature 1..23: note = Synthetic: SSR-0106292
  modified_base 1: mod_base = um
  modified_base 1..2: mod_base = OTHER; note = S-phosphorothioate
  modified_base 2: mod_base = OTHER; note = 2-fluororibose uracil
  modified_base 2..3: mod_base = OTHER; note = R-phosphorothioate
  modified_base 3: mod_base = OTHER; note = 2-O-methylribose adenine
  modified_base 3..4: mod_base = OTHER; note S-N-(1,3-dimethylimidazolidin-2-ylidene)phosphoramidate
  modified_base 4: mod_base = OTHER; note = 2-fluororibose uracil
  modified_base 5: mod_base = OTHER; note = 2-O-methylribose adenine
  modified_base 6: mod_base = OTHER; note = 2-fluororibose guanine
  modified_base 7: mod_base = OTHER; note = 2-O-methylribose adenine
  modified_base 8: mod_base = gm
  modified_base 9: mod_base = cm
  modified_base 10: mod_base = OTHER; note = 2-O-methylribose adenine
  modified_base 10..11: mod_base = OTHER; note S-N-(1,3-dimethylimidazolidin-2-ylidene)phosphoramidate
  modified_base 11: mod_base = OTHER; note = 2-fluororibose adenine
  modified_base 12: mod_base = gm
  modified_base 13: mod_base = OTHER; note = 2-O-methylribose adenine
  modified_base 14: mod_base = OTHER; note = 2-fluororibose adenine
  modified_base 14..15: mod_base = OTHER; note S-N-(1,3-dimethylimidazolidin-2-ylidene)phosphoramidate
  modified_base 15: mod_base = cm
  modified_base 15..16: mod_base = OTHER; note S-N-(1,3-dimethylimidazolidin-2-ylidene)phosphoramidate
  modified_base 16: mod_base = OTHER; note = 2-fluororibose adenine
  modified_base 17: mod_base = cm
  modified_base 18: mod_base = um
  modified_base 18..19: mod_base = OTHER; note S-N-(1,3-dimethylimidazolidin-2-ylidene)phosphoramidate
  modified_base 19: mod_base = gm
  modified_base 19..20: mod_base = OTHER; note S-N-(1,3-dimethylimidazolidin-2-ylidene)phosphoramidate
  modified_base 20: mod_base = um
  modified_base 21: mod_base = um
  modified_base 21..22: mod_base = OTHER; note = S-phosphorothioate
  modified_base 22: mod_base = um
  modified_base 22..23: mod_base = OTHER; note = S-phosphorothioate
  modified_base 23: mod_base = um
  source 1..23: mol_type = other RNA
ttatagagcaagaacactgtttt

SEQ ID NO: 809 - RNA, 23 nt, synthetic construct
  misc_feature 1..23: note = Synthetic: SSR-0106293
  modified_base 1: mod_base = um
  modified_base 1..2: mod_base = OTHER; note = S-phosphorothioate
  modified_base 2: mod_base = OTHER; note = 2-fluororibose uracil
  modified_base 2..3: mod_base = OTHER; note = R-phosphorothioate
  modified_base 3: mod_base = OTHER; note = 2-O-methylribose adenine
  modified_base 3..4: mod_base = OTHER; note S-N-(1,3-dimethylimidazolidin-2-ylidene)phosphoramidate
  modified_base 4: mod_base = OTHER; note = 2-fluororibose uracil
  modified_base 5: mod_base = OTHER; note = 2-O-methylribose adenine
  modified_base 6: mod_base = OTHER; note = 2-fluororibose guanine
  modified_base 7: mod_base = OTHER; note = 2-O-methylribose adenine
  modified_base 8: mod_base = gm
  modified_base 9: mod_base = cm
  modified_base 10: mod_base = OTHER; note = 2-O-methylribose adenine
  modified_base 10..11: mod_base = OTHER; note S-N-(1,3-dimethylimidazolidin-2-ylidene)phosphoramidate
  modified_base 11: mod_base = OTHER; note = 2-fluororibose adenine
  modified_base 12: mod_base = gm
  modified_base 12..13: mod_base = OTHER; note S-N-(1,3-dimethylimidazolidin-2-ylidene)phosphoramidate
  modified_base 13: mod_base = OTHER; note = 2-O-methylribose adenine
  modified_base 14: mod_base = OTHER; note = 2-fluororibose adenine
  modified_base 15: mod_base = cm
  modified_base 16: mod_base = OTHER; note = 2-fluororibose adenine
  modified_base 17: mod_base = cm
  modified_base 18: mod_base = um
  modified_base 19: mod_base = gm
  modified_base 20: mod_base = um
  modified_base 21: mod_base = um
  modified_base 21..22: mod_base = OTHER; note = S-phosphorothioate
  modified_base 22: mod_base = um
  modified_base 22..23: mod_base = OTHER; note = S-phosphorothioate
  modified_base 23: mod_base = um
  source 1..23: mol_type = other RNA
ttatagagcaagaacactgtttt

SEQ ID NO: 810 - RNA, 23 nt, synthetic construct
  misc_feature 1..23: note = Synthetic: SSR-0106294
  modified_base 1: mod_base = um
  modified_base 1..2: mod_base = OTHER; note = S-phosphorothioate
  modified_base 2: mod_base = OTHER; note = 2-fluororibose uracil
  modified_base 2..3: mod_base = OTHER; note = R-phosphorothioate
  modified_base 3: mod_base = OTHER; note = 2-O-methylribose adenine
  modified_base 3..4: mod_base = OTHER; note S-N-(1,3-dimethylimidazolidin-2-ylidene)phosphoramidate
  modified_base 4: mod_base = OTHER; note = 2-fluororibose uracil
  modified_base 5: mod_base = OTHER; note = 2-O-methylribose adenine
  modified_base 6: mod_base = OTHER; note = 2-fluororibose guanine
  modified_base 7: mod_base = OTHER; note = 2-O-methylribose adenine
  modified_base 8: mod_base = gm
  modified_base 9: mod_base = cm
  modified_base 10: mod_base = OTHER; note = 2-O-methylribose adenine
  modified_base 10..11: mod_base = OTHER; note S-N-(1,3-dimethylimidazolidin-2-ylidene)phosphoramidate
  modified_base 11: mod_base = OTHER; note = 2-fluororibose adenine
  modified_base 12: mod_base = gm
  modified_base 13: mod_base = OTHER; note = 2-O-methylribose adenine
  modified_base 13..14: mod_base = OTHER; note S-N-(1,3-dimethylimidazolidin-2-ylidene)phosphoramidate
  modified_base 14: mod_base = OTHER; note = 2-fluororibose adenine
  modified_base 15: mod_base = cm
  modified_base 16: mod_base = OTHER; note = 2-fluororibose adenine
  modified_base 17: mod_base = cm
  modified_base 18: mod_base = um
  modified_base 19: mod_base = gm
  modified_base 20: mod_base = um
  modified_base 21: mod_base = um
  modified_base 21..22: mod_base = OTHER; note = S-phosphorothioate
  modified_base 22: mod_base = um
  modified_base 22..23: mod_base = OTHER; note = S-phosphorothioate
  modified_base 23: mod_base = um
  source 1..23: mol_type = other RNA
ttatagagcaagaacactgtttt

SEQ ID NO: 811 - RNA, 23 nt, synthetic construct
  misc_feature 1..23: note = Synthetic: SSR-0106295
  modified_base 1: mod_base = um
  modified_base 1..2: mod_base = OTHER; note = S-phosphorothioate
  modified_base 2: mod_base = OTHER; note = 2-fluororibose uracil
  modified_base 2..3: mod_base = OTHER; note = R-phosphorothioate
  modified_base 3: mod_base = OTHER; note = 2-O-methylribose adenine
  modified_base 3..4: mod_base = OTHER; note S-N-(1,3-dimethylimidazolidin-2-ylidene)phosphoramidate
  modified_base 4: mod_base = OTHER; note = 2-fluororibose uracil
  modified_base 5: mod_base = OTHER; note = 2-O-methylribose adenine
  modified_base 6: mod_base = OTHER; note = 2-fluororibose guanine
  modified_base 7: mod_base = OTHER; note = 2-O-methylribose adenine
  modified_base 8: mod_base = gm
  modified_base 9: mod_base = cm
  modified_base 10: mod_base = OTHER; note = 2-O-methylribose adenine
  modified_base 10..11: mod_base = OTHER; note S-N-(1,3-dimethylimidazolidin-2-ylidene)phosphoramidate
  modified_base 11: mod_base = OTHER; note = 2-fluororibose adenine
  modified_base 12: mod_base = gm
  modified_base 13: mod_base = OTHER; note = 2-O-methylribose adenine
  modified_base 14: mod_base = OTHER; note = 2-fluororibose adenine
  modified_base 14..15: mod_base = OTHER; note S-N-(1,3-dimethylimidazolidin-2-ylidene)phosphoramidate
  modified_base 15: mod_base = cm
  modified_base 16: mod_base = OTHER; note = 2-fluororibose adenine
  modified_base 17: mod_base = cm
  modified_base 18: mod_base = um
  modified_base 19: mod_base = gm
  modified_base 20: mod_base = um
  modified_base 21: mod_base = um
  modified_base 21..22: mod_base = OTHER; note = S-phosphorothioate
  modified_base 22: mod_base = um
  modified_base 22..23: mod_base = OTHER; note = S-phosphorothioate
  modified_base 23: mod_base = um
  source 1..23: mol_type = other RNA
ttatagagcaagaacactgtttt

SEQ ID NO: 812 - RNA, 23 nt, synthetic construct
  misc_feature 1..23: note = Synthetic: SSR-0106296
  modified_base 1: mod_base = um
  modified_base 1..2: mod_base = OTHER; note = S-phosphorothioate
  modified_base 2: mod_base = OTHER; note = 2-fluororibose uracil
  modified_base 2..3: mod_base = OTHER; note = R-phosphorothioate
  modified_base 3: mod_base = OTHER; note = 2-O-methylribose adenine
  modified_base 3..4: mod_base = OTHER; note S-N-(1,3-dimethylimidazolidin-2-ylidene)phosphoramidate
  modified_base 4: mod_base = OTHER; note = 2-fluororibose uracil
  modified_base 5: mod_base = OTHER; note = 2-O-methylribose adenine
  modified_base 6: mod_base = OTHER; note = 2-fluororibose guanine
  modified_base 7: mod_base = OTHER; note = 2-O-methylribose adenine
  modified_base 8: mod_base = gm
  modified_base 9: mod_base = cm
  modified_base 10: mod_base = OTHER; note = 2-O-methylribose adenine
  modified_base 10..11: mod_base = OTHER; note S-N-(1,3-dimethylimidazolidin-2-ylidene)phosphoramidate
  modified_base 11: mod_base = OTHER; note = 2-fluororibose adenine
  modified_base 12: mod_base = gm
  modified_base 13: mod_base = OTHER; note = 2-O-methylribose adenine
  modified_base 14: mod_base = OTHER; note = 2-fluororibose adenine
  modified_base 15: mod_base = cm
  modified_base 15..16: mod_base = OTHER; note S-N-(1,3-dimethylimidazolidin-2-ylidene)phosphoramidate
  modified_base 16: mod_base = OTHER; note = 2-fluororibose adenine
  modified_base 17: mod_base = cm
  modified_base 18: mod_base = um
  modified_base 19: mod_base = gm
  modified_base 20: mod_base = um
  modified_base 21: mod_base = um
  modified_base 21..22: mod_base = OTHER; note = S-phosphorothioate
  modified_base 22: mod_base = um
  modified_base 22..23: mod_base = OTHER; note = S-phosphorothioate
  modified_base 23: mod_base = um
  source 1..23: mol_type = other RNA
ttatagagcaagaacactgtttt

SEQ ID NO: 813 - RNA, 23 nt, synthetic construct
  misc_feature 1..23: note = Synthetic: SSR-0106297
  modified_base 1: mod_base = um
  modified_base 1..2: mod_base = OTHER; note = S-phosphorothioate
  modified_base 2: mod_base = OTHER; note = 2-fluororibose uracil
  modified_base 2..3: mod_base = OTHER; note = R-phosphorothioate
  modified_base 3: mod_base = OTHER; note = 2-O-methylribose adenine
  modified_base 3..4: mod_base = OTHER; note S-N-(1,3-dimethylimidazolidin-2-ylidene)phosphoramidate
  modified_base 4: mod_base = OTHER; note = 2-fluororibose uracil
  modified_base 5: mod_base = OTHER; note = 2-O-methylribose adenine
  modified_base 6: mod_base = OTHER; note = 2-fluororibose guanine
  modified_base 7: mod_base = OTHER; note = 2-O-methylribose adenine
  modified_base 8: mod_base = gm
  modified_base 9: mod_base = cm
  modified_base 10: mod_base = OTHER; note = 2-O-methylribose adenine
  modified_base 10..11: mod_base = OTHER; note S-N-(1,3-dimethylimidazolidin-2-ylidene)phosphoramidate
  modified_base 11: mod_base = OTHER; note = 2-fluororibose adenine
  modified_base 12: mod_base = gm
  modified_base 13: mod_base = OTHER; note = 2-O-methylribose adenine
  modified_base 14: mod_base = OTHER; note = 2-fluororibose adenine
  modified_base 15: mod_base = cm
  modified_base 16: mod_base = OTHER; note = 2-fluororibose adenine
  modified_base 16..17: mod_base = OTHER; note S-N-(1,3-dimethylimidazolidin-2-ylidene)phosphoramidate
  modified_base 17: mod_base = cm
  modified_base 18: mod_base = um
  modified_base 19: mod_base = gm
  modified_base 20: mod_base = um
  modified_base 21: mod_base = um
  modified_base 21..22: mod_base = OTHER; note = S-phosphorothioate
  modified_base 22: mod_base = um
  modified_base 22..23: mod_base = OTHER; note = S-phosphorothioate
  modified_base 23: mod_base = um
  source 1..23: mol_type = other RNA
ttatagagcaagaacactgtttt

SEQ ID NO: 814 - RNA, 23 nt, synthetic construct
  misc_feature 1..23: note = Synthetic: SSR-0106298
  modified_base 1: mod_base = um
  modified_base 1..2: mod_base = OTHER; note = S-phosphorothioate
  modified_base 2: mod_base = OTHER; note = 2-fluororibose uracil
  modified_base 2..3: mod_base = OTHER; note = R-phosphorothioate
  modified_base 3: mod_base = OTHER; note = 2-O-methylribose adenine
  modified_base 3..4: mod_base = OTHER; note S-N-(1,3-dimethylimidazolidin-2-ylidene)phosphoramidate
  modified_base 4: mod_base = OTHER; note = 2-fluororibose uracil
  modified_base 5: mod_base = OTHER; note = 2-O-methylribose adenine
  modified_base 6: mod_base = OTHER; note = 2-fluororibose guanine
  modified_base 7: mod_base = OTHER; note = 2-O-methylribose adenine
  modified_base 8: mod_base = gm
  modified_base 9: mod_base = cm
  modified_base 10: mod_base = OTHER; note = 2-O-methylribose adenine
  modified_base 10..11: mod_base = OTHER; note S-N-(1,3-dimethylimidazolidin-2-ylidene)phosphoramidate
  modified_base 11: mod_base = OTHER; note = 2-fluororibose adenine
  modified_base 12: mod_base = gm
  modified_base 13: mod_base = OTHER; note = 2-O-methylribose adenine
  modified_base 14: mod_base = OTHER; note = 2-fluororibose adenine
  modified_base 15: mod_base = cm
  modified_base 16: mod_base = OTHER; note = 2-fluororibose adenine
  modified_base 17: mod_base = cm
  modified_base 17..18: mod_base = OTHER; note S-N-(1,3-dimethylimidazolidin-2-ylidene)phosphoramidate
  modified_base 18: mod_base = um
  modified_base 19: mod_base = gm
  modified_base 20: mod_base = um
  modified_base 21: mod_base = um
  modified_base 21..22: mod_base = OTHER; note = S-phosphorothioate
  modified_base 22: mod_base = um
  modified_base 22..23: mod_base = OTHER; note = S-phosphorothioate
  modified_base 23: mod_base = um
  source 1..23: mol_type = other RNA
ttatagagcaagaacactgtttt

SEQ ID NO: 815 - RNA, 23 nt, synthetic construct
  misc_feature 1..23: note = Synthetic: SSR-0106299
  modified_base 1: mod_base = um
  modified_base 1..2: mod_base = OTHER; note = S-phosphorothioate
  modified_base 2: mod_base = OTHER; note = 2-fluororibose uracil
  modified_base 2..3: mod_base = OTHER; note = R-phosphorothioate
  modified_base 3: mod_base = OTHER; note = 2-O-methylribose adenine
  modified_base 3..4: mod_base = OTHER; note S-N-(1,3-dimethylimidazolidin-2-ylidene)phosphoramidate
  modified_base 4: mod_base = OTHER; note = 2-fluororibose uracil
  modified_base 5: mod_base = OTHER; note = 2-O-methylribose adenine
  modified_base 6: mod_base = OTHER; note = 2-fluororibose guanine
  modified_base 7: mod_base = OTHER; note = 2-O-methylribose adenine
  modified_base 8: mod_base = gm
  modified_base 9: mod_base = cm
  modified_base 10: mod_base = OTHER; note = 2-O-methylribose adenine
  modified_base 10..11: mod_base = OTHER; note S-N-(1,3-dimethylimidazolidin-2-ylidene)phosphoramidate
  modified_base 11: mod_base = OTHER; note = 2-fluororibose adenine
  modified_base 12: mod_base = gm
  modified_base 13: mod_base = OTHER; note = 2-O-methylribose adenine
  modified_base 14: mod_base = OTHER; note = 2-fluororibose adenine
  modified_base 15: mod_base = cm
  modified_base 16: mod_base = OTHER; note = 2-fluororibose adenine
  modified_base 17: mod_base = cm
  modified_base 18: mod_base = um
  modified_base 18..19: mod_base = OTHER; note S-N-(1,3-dimethylimidazolidin-2-ylidene)phosphoramidate
  modified_base 19: mod_base = gm
  modified_base 20: mod_base = um
  modified_base 21: mod_base = um
  modified_base 21..22: mod_base = OTHER; note = S-phosphorothioate
  modified_base 22: mod_base = um
  modified_base 22..23: mod_base = OTHER; note = S-phosphorothioate
  modified_base 23: mod_base = um
  source 1..23: mol_type = other RNA
ttatagagcaagaacactgtttt

SEQ ID NO: 816 - RNA, 23 nt, synthetic construct
  misc_feature 1..23: note = Synthetic: SSR-0106300
  modified_base 1: mod_base = um
  modified_base 1..2: mod_base = OTHER; note = S-phosphorothioate
  modified_base 2: mod_base = OTHER; note = 2-fluororibose uracil
  modified_base 2..3: mod_base = OTHER; note = R-phosphorothioate
  modified_base 3: mod_base = OTHER; note = 2-O-methylribose adenine
  modified_base 3..4: mod_base = OTHER; note S-N-(1,3-dimethylimidazolidin-2-ylidene)phosphoramidate
  modified_base 4: mod_base = OTHER; note = 2-fluororibose uracil
  modified_base 5: mod_base = OTHER; note = 2-O-methylribose adenine
  modified_base 6: mod_base = OTHER; note = 2-fluororibose guanine
  modified_base 7: mod_base = OTHER; note = 2-O-methylribose adenine
  modified_base 8: mod_base = gm
  modified_base 9: mod_base = cm
  modified_base 10: mod_base = OTHER; note = 2-O-methylribose adenine
  modified_base 10..11: mod_base = OTHER; note S-N-(1,3-dimethylimidazolidin-2-ylidene)phosphoramidate
  modified_base 11: mod_base = OTHER; note = 2-fluororibose adenine
  modified_base 12: mod_base = gm
  modified_base 13: mod_base = OTHER; note = 2-O-methylribose adenine
  modified_base 14: mod_base = OTHER; note = 2-fluororibose adenine
  modified_base 15: mod_base = cm
  modified_base 16: mod_base = OTHER; note = 2-fluororibose adenine
  modified_base 17: mod_base = cm
  modified_base 18: mod_base = um
  modified_base 19: mod_base = gm
  modified_base 19..20: mod_base = OTHER; note S-N-(1,3-dimethylimidazolidin-2-ylidene)phosphoramidate
  modified_base 20: mod_base = um
  modified_base 21: mod_base = um
  modified_base 21..22: mod_base = OTHER; note = S-phosphorothioate
  modified_base 22: mod_base = um
  modified_base 22..23: mod_base = OTHER; note = S-phosphorothioate
  modified_base 23: mod_base = um
  source 1..23: mol_type = other RNA
ttatagagcaagaacactgtttt

SEQ ID NO: 817 - RNA, 23 nt, synthetic construct
  misc_feature 1..23: note = Synthetic: SSR-0106301
  modified_base 1: mod_base = um
  modified_base 1..2: mod_base = OTHER; note = S-phosphorothioate
  modified_base 2: mod_base = OTHER; note = 2-fluororibose uracil
  modified_base 2..3: mod_base = OTHER; note = R-phosphorothioate
  modified_base 3: mod_base = OTHER; note = 2-O-methylribose adenine
  modified_base 3..4: mod_base = OTHER; note S-N-(1,3-dimethylimidazolidin-2-ylidene)phosphoramidate
  modified_base 4: mod_base = OTHER; note = 2-fluororibose uracil
  modified_base 5: mod_base = OTHER; note = 2-O-methylribose adenine
  modified_base 6: mod_base = OTHER; note = 2-fluororibose guanine
  modified_base 7: mod_base = OTHER; note = 2-O-methylribose adenine
  modified_base 8: mod_base = gm
  modified_base 9: mod_base = cm
  modified_base 10: mod_base = OTHER; note = 2-O-methylribose adenine
  modified_base 10..11: mod_base = OTHER; note S-N-(1,3-dimethylimidazolidin-2-ylidene)phosphoramidate
  modified_base 11: mod_base = OTHER; note = 2-fluororibose adenine
  modified_base 12: mod_base = gm
  modified_base 13: mod_base = OTHER; note = 2-O-methylribose adenine
  modified_base 14: mod_base = OTHER; note = 2-fluororibose adenine
  modified_base 15: mod_base = cm
  modified_base 16: mod_base = OTHER; note = 2-fluororibose adenine
  modified_base 17: mod_base = cm
  modified_base 18: mod_base = um
  modified_base 19: mod_base = gm
  modified_base 20: mod_base = um
  modified_base 20..21: mod_base = OTHER; note S-N-(1,3-dimethylimidazolidin-2-ylidene)phosphoramidate
  modified_base 21: mod_base = um
  modified_base 21..22: mod_base = OTHER; note = S-phosphorothioate
  modified_base 22: mod_base = um
  modified_base 22..23: mod_base = OTHER; note = S-phosphorothioate
  modified_base 23: mod_base = um
  source 1..23: mol_type = other RNA
ttatagagcaagaacactgtttt

SEQ ID NO: 818 - RNA, 23 nt, synthetic construct
  misc_feature 1..23: note = Synthetic: SSR-0106302
  modified_base 1: mod_base = um
  modified_base 1..2: mod_base = OTHER; note = S-phosphorothioate
  modified_base 2: mod_base = OTHER; note = 2-fluororibose uracil
  modified_base 2..3: mod_base = OTHER; note = R-phosphorothioate
  modified_base 3: mod_base = OTHER; note = 2-O-methylribose adenine
  modified_base 3..4: mod_base = OTHER; note S-N-(1,3-dimethylimidazolidin-2-ylidene)phosphoramidate
  modified_base 4: mod_base = OTHER; note = 2-fluororibose uracil
  modified_base 5: mod_base = OTHER; note = 2-O-methylribose adenine
  modified_base 6: mod_base = OTHER; note = 2-fluororibose guanine
  modified_base 7: mod_base = OTHER; note = 2-O-methylribose adenine
  modified_base 8: mod_base = gm
  modified_base 9: mod_base = cm
  modified_base 10: mod_base = OTHER; note = 2-O-methylribose adenine
  modified_base 10..11: mod_base = OTHER; note S-N-(1,3-dimethylimidazolidin-2-ylidene)phosphoramidate
  modified_base 11: mod_base = OTHER; note = 2-fluororibose adenine
  modified_base 12: mod_base = gm
  modified_base 12..13: mod_base = OTHER; note S-N-(1,3-dimethylimidazolidin-2-ylidene)phosphoramidate
  modified_base 13: mod_base = OTHER; note = 2-fluororibose adenine
  modified_base 14: mod_base = OTHER; note = 2-fluororibose adenine
  modified_base 15: mod_base = cm
  modified_base 16: mod_base = OTHER; note = 2-fluororibose adenine
  modified_base 17: mod_base = cm
  modified_base 18: mod_base = um
  modified_base 19: mod_base = gm
  modified_base 20: mod_base = um
  modified_base 21: mod_base = um
  modified_base 21..22: mod_base = OTHER; note = S-phosphorothioate
  modified_base 22: mod_base = um
  modified_base 22..23: mod_base = OTHER; note = S-phosphorothioate
  modified_base 23: mod_base = um
  source 1..23: mol_type = other RNA
ttatagagcaagaacactgtttt

SEQ ID NO: 819 - RNA, 23 nt, synthetic construct
  misc_feature 1..23: note = Synthetic: SSR-0106303
  modified_base 1: mod_base = um
  modified_base 1..2: mod_base = OTHER; note = S-phosphorothioate
  modified_base 2: mod_base = OTHER; note = 2-fluororibose uracil
  modified_base 2..3: mod_base = OTHER; note = R-phosphorothioate
  modified_base 3: mod_base = OTHER; note = 2-O-methylribose adenine
  modified_base 3..4: mod_base = OTHER; note S-N-(1,3-dimethylimidazolidin-2-ylidene)phosphoramidate
  modified_base 4: mod_base = OTHER; note = 2-fluororibose uracil
  modified_base 5: mod_base = OTHER; note = 2-O-methylribose adenine
  modified_base 6: mod_base = OTHER; note = 2-fluororibose guanine
  modified_base 7: mod_base = OTHER; note = 2-O-methylribose adenine
  modified_base 8: mod_base = gm
  modified_base 9: mod_base = cm
  modified_base 10: mod_base = OTHER; note = 2-O-methylribose adenine
  modified_base 10..11: mod_base = OTHER; note S-N-(1,3-dimethylimidazolidin-2-ylidene)phosphoramidate
  modified_base 11: mod_base = OTHER; note = 2-fluororibose adenine
  modified_base 12: mod_base = gm
  modified_base 13: mod_base = OTHER; note = 2-O-methylribose adenine
  modified_base 14: mod_base = OTHER; note = 2-fluororibose adenine
  modified_base 14..15: mod_base = OTHER; note S-N-(1,3-dimethylimidazolidin-2-ylidene)phosphoramidate
  modified_base 15: mod_base = OTHER; note = 2-fluororibose cytosine
  modified_base 16: mod_base = OTHER; note = 2-fluororibose adenine
  modified_base 17: mod_base = cm
  modified_base 18: mod_base = um
  modified_base 19: mod_base = gm
  modified_base 20: mod_base = um
  modified_base 21: mod_base = um
  modified_base 21..22: mod_base = OTHER; note = S-phosphorothioate
  modified_base 22: mod_base = um
  modified_base 22..23: mod_base = OTHER; note = S-phosphorothioate
  modified_base 23: mod_base = um
  source 1..23: mol_type = other RNA
ttatagagcaagaacactgtttt

SEQ ID NO: 820 - RNA, 23 nt, synthetic construct
  misc_feature 1..23: note = Synthetic: SSR-0106304
  modified_base 1: mod_base = um
  modified_base 1..2: mod_base = OTHER; note = S-phosphorothioate
  modified_base 2: mod_base = OTHER; note = 2-fluororibose uracil
  modified_base 2..3: mod_base = OTHER; note = R-phosphorothioate
  modified_base 3: mod_base = OTHER; note = 2-O-methylribose adenine
  modified_base 3..4: mod_base = OTHER; note S-N-(1,3-dimethylimidazolidin-2-ylidene)phosphoramidate
  modified_base 4: mod_base = OTHER; note = 2-fluororibose uracil
  modified_base 5: mod_base = OTHER; note = 2-O-methylribose adenine
  modified_base 6: mod_base = OTHER; note = 2-fluororibose guanine
  modified_base 7: mod_base = OTHER; note = 2-O-methylribose adenine
  modified_base 8: mod_base = gm
  modified_base 9: mod_base = cm
  modified_base 10: mod_base = OTHER; note = 2-O-methylribose adenine
  modified_base 10..11: mod_base = OTHER; note S-N-(1,3-dimethylimidazolidin-2-ylidene)phosphoramidate
  modified_base 11: mod_base = OTHER; note = 2-fluororibose adenine
  modified_base 12: mod_base = gm
  modified_base 13: mod_base = OTHER; note = 2-O-methylribose adenine
  modified_base 14: mod_base = OTHER; note = 2-fluororibose adenine
  modified_base 15: mod_base = cm
  modified_base 16: mod_base = OTHER; note = 2-fluororibose adenine
  modified_base 16..17: mod_base = OTHER; note S-N-(1,3-dimethylimidazolidin-2-ylidene)phosphoramidate
  modified_base 17: mod_base = OTHER; note = 2-fluororibose cytosine
  modified_base 18: mod_base = um
  modified_base 19: mod_base = gm
  modified_base 20: mod_base = um
  modified_base 21: mod_base = um
  modified_base 21..22: mod_base = OTHER; note = S-phosphorothioate
  modified_base 22: mod_base = um
  modified_base 22..23: mod_base = OTHER; note = S-phosphorothioate
  modified_base 23: mod_base = um
  source 1..23: mol_type = other RNA
ttatagagcaagaacactgtttt

SEQ ID NO: 821 - RNA, 23 nt, synthetic construct
  misc_feature 1..23: note = Synthetic: SSR-0106305
  modified_base 1: mod_base = um
  modified_base 1..2: mod_base = OTHER; note = S-phosphorothioate
  modified_base 2: mod_base = OTHER; note = 2-fluororibose uracil
  modified_base 2..3: mod_base = OTHER; note = R-phosphorothioate
  modified_base 3: mod_base = OTHER; note = 2-O-methylribose adenine
  modified_base 3..4: mod_base = OTHER; note S-N-(1,3-dimethylimidazolidin-2-ylidene)phosphoramidate
  modified_base 4: mod_base = OTHER; note = 2-fluororibose uracil
  modified_base 5: mod_base = OTHER; note = 2-O-methylribose adenine
  modified_base 6: mod_base = OTHER; note = 2-fluororibose guanine
  modified_base 7: mod_base = OTHER; note = 2-O-methylribose adenine
  modified_base 8: mod_base = gm
  modified_base 9: mod_base = cm
  modified_base 10: mod_base = OTHER; note = 2-O-methylribose adenine
  modified_base 10..11: mod_base = OTHER; note S-N-(1,3-dimethylimidazolidin-2-ylidene)phosphoramidate
  modified_base 11: mod_base = OTHER; note = 2-fluororibose adenine
  modified_base 12: mod_base = gm
  modified_base 13: mod_base = OTHER; note = 2-O-methylribose adenine
  modified_base 14: mod_base = OTHER; note = 2-fluororibose adenine
  modified_base 15: mod_base = cm
  modified_base 16: mod_base = OTHER; note = 2-fluororibose adenine
  modified_base 17: mod_base = cm
  modified_base 17..18: mod_base = OTHER; note S-N-(1,3-dimethylimidazolidin-2-ylidene)phosphoramidate
  modified_base 18: mod_base = OTHER; note = 2-fluororibose uracil
  modified_base 19: mod_base = gm
  modified_base 20: mod_base = um
  modified_base 21: mod_base = um
  modified_base 21..22: mod_base = OTHER; note = S-phosphorothioate
  modified_base 22: mod_base = um
  modified_base 22..23: mod_base = OTHER; note = S-phosphorothioate
  modified_base 23: mod_base = um
  source 1..23: mol_type = other RNA
ttatagagcaagaacactgtttt

SEQ ID NO: 822 - RNA, 23 nt, synthetic construct
  misc_feature 1..23: note = Synthetic: SSR-0106306
  modified_base 1: mod_base = um
  modified_base 1..2: mod_base = OTHER; note = S-phosphorothioate
  modified_base 2: mod_base = OTHER; note = 2-fluororibose uracil
  modified_base 2..3: mod_base = OTHER; note = R-phosphorothioate
  modified_base 3: mod_base = OTHER; note = 2-O-methylribose adenine
  modified_base 3..4: mod_base = OTHER; note S-N-(1,3-dimethylimidazolidin-2-ylidene)phosphoramidate
  modified_base 4: mod_base = OTHER; note = 2-fluororibose uracil
  modified_base 5: mod_base = OTHER; note = 2-O-methylribose adenine
  modified_base 6: mod_base = OTHER; note = 2-fluororibose guanine
  modified_base 7: mod_base = OTHER; note = 2-O-methylribose adenine
  modified_base 8: mod_base = gm
  modified_base 9: mod_base = cm
  modified_base 10: mod_base = OTHER; note = 2-O-methylribose adenine
  modified_base 10..11: mod_base = OTHER; note S-N-(1,3-dimethylimidazolidin-2-ylidene)phosphoramidate
  modified_base 11: mod_base = OTHER; note = 2-fluororibose adenine
  modified_base 12: mod_base = gm
  modified_base 13: mod_base = OTHER; note = 2-O-methylribose adenine
  modified_base 14: mod_base = OTHER; note = 2-fluororibose adenine
  modified_base 15: mod_base = cm
  modified_base 16: mod_base = OTHER; note = 2-fluororibose adenine
  modified_base 17: mod_base = cm
  modified_base 18: mod_base = um
  modified_base 18..19: mod_base = OTHER; note S-N-(1,3-dimethylimidazolidin-2-ylidene)phosphoramidate
  modified_base 19: mod_base = OTHER; note = 2-fluororibose guanine
  modified_base 20: mod_base = um
  modified_base 21: mod_base = um
  modified_base 21..22: mod_base = OTHER; note = S-phosphorothioate
  modified_base 22: mod_base = um
  modified_base 22..23: mod_base = OTHER; note = S-phosphorothioate
  modified_base 23: mod_base = um
  source 1..23: mol_type = other RNA
ttatagagcaagaacactgtttt

SEQ ID NO: 823 - RNA, 21 nt, synthetic construct
  misc_feature 1..21: note = Synthetic: SSR-0106445
  modified_base 1: mod_base = cm
  modified_base 1..2: mod_base = OTHER; note = phosphorothioate
  modified_base 2: mod_base = um
  modified_base 3: mod_base = OTHER; note = 2-fluororibose guanine
  modified_base 4: mod_base = um
  modified_base 5: mod_base = OTHER; note = 2-fluororibose guanine
  modified_base 6: mod_base = cm
  modified_base 7: mod_base = OTHER; note = 2-fluororibose uracil
  modified_base 7..8: mod_base = OTHER; note R-N-(1-docecyl-3-methylimidazolidin-2-ylidene)phosphoramida te
  modified_base 8: mod_base = gm
  modified_base 9: mod_base = OTHER; note = 2-fluororibose uracil
  modified_base 10: mod_base = OTHER; note = 2-fluororibose adenine
  modified_base 11: mod_base = OTHER; note = 2-fluororibose adenine
  modified_base 12: mod_base = cm
  modified_base 13: mod_base = OTHER; note = 2-fluororibose adenine
  modified_base 14: mod_base = cm
  modified_base 15: mod_base = OTHER; note = 2-fluororibose adenine
  modified_base 16: mod_base = OTHER; note = 2-O-methylribose adenine
  modified_base 17: mod_base = OTHER; note = 2-fluororibose guanine
  modified_base 18: mod_base = um
  modified_base 19: mod_base = OTHER; note = 2-fluororibose adenine
  modified_base 20: mod_base = gm
  modified_base 20..21: mod_base = OTHER; note = phosphorothioate
  modified_base 21: mod_base = OTHER; note = 2-fluororibose adenine
  source 1..21: mol_type = other RNA
ctgtgctgtaacacaagtaga

SEQ ID NO: 824 - RNA, 21 nt, synthetic construct
  misc_feature 1..21: note = Synthetic: SSR-0106446
  modified_base 1: mod_base = cm
  modified_base 1..2: mod_base = OTHER; note = phosphorothioate
  modified_base 2: mod_base = um
  modified_base 3: mod_base = OTHER; note = 2-fluororibose guanine
  modified_base 4: mod_base = um
  modified_base 5: mod_base = OTHER; note = 2-fluororibose guanine
  modified_base 6: mod_base = cm
  modified_base 7: mod_base = OTHER; note = 2-fluororibose uracil
  modified_base 7..8: mod_base = OTHER; note R-N-(1-hexadecyl-3-methylimidazolidin-2-ylidene)phosphorami date
  modified_base 8: mod_base = gm
  modified_base 9: mod_base = OTHER; note = 2-fluororibose uracil
  modified_base 10: mod_base = OTHER; note = 2-fluororibose adenine
  modified_base 11: mod_base = OTHER; note = 2-fluororibose adenine
  modified_base 12: mod_base = cm
  modified_base 13: mod_base = OTHER; note = 2-fluororibose adenine
  modified_base 14: mod_base = cm
  modified_base 15: mod_base = OTHER; note = 2-fluororibose adenine
  modified_base 16: mod_base = OTHER; note = 2-O-methylribose adenine
  modified_base 17: mod_base = OTHER; note = 2-fluororibose guanine
  modified_base 18: mod_base = um
  modified_base 19: mod_base = OTHER; note = 2-fluororibose adenine
  modified_base 20: mod_base = gm
  modified_base 20..21: mod_base = OTHER; note = phosphorothioate
  modified_base 21: mod_base = OTHER; note = 2-fluororibose adenine
  source 1..21: mol_type = other RNA
ctgtgctgtaacacaagtaga

SEQ ID NO: 825 - RNA, 21 nt, synthetic construct
  misc_feature 1..21: note = Synthetic: SSR-0106447
  modified_base 1: mod_base = cm
  modified_base 1..2: mod_base = OTHER; note = S-phosphorothioate
  modified_base 2: mod_base = um
  modified_base 3: mod_base = OTHER; note = 2-fluororibose guanine
  modified_base 4: mod_base = um
  modified_base 5: mod_base = OTHER; note = 2-fluororibose guanine
  modified_base 6: mod_base = cm
  modified_base 7: mod_base = OTHER; note = 2-fluororibose uracil
  modified_base 7..8: mod_base = OTHER; note R-N-(1-docecyl-3-methylimidazolidin-2-ylidene)phosphoramida te
  modified_base 8: mod_base = gm
  modified_base 9: mod_base = OTHER; note = 2-fluororibose uracil
  modified_base 10: mod_base = OTHER; note = 2-fluororibose adenine
  modified_base 11: mod_base = OTHER; note = 2-fluororibose adenine
  modified_base 12: mod_base = cm
  modified_base 13: mod_base = OTHER; note = 2-fluororibose adenine
  modified_base 14: mod_base = cm
  modified_base 15: mod_base = OTHER; note = 2-fluororibose adenine
  modified_base 16: mod_base = OTHER; note = 2-O-methylribose adenine
  modified_base 17: mod_base = OTHER; note = 2-fluororibose guanine
  modified_base 18: mod_base = um
  modified_base 19: mod_base = OTHER; note = 2-fluororibose adenine
  modified_base 20: mod_base = gm
  modified_base 20..21: mod_base = OTHER; note = S-phosphorothioate
  modified_base 21: mod_base = OTHER; note = 2-fluororibose adenine
  source 1..21: mol_type = other RNA
ctgtgctgtaacacaagtaga

SEQ ID NO: 826 - RNA, 21 nt, synthetic construct
  misc_feature 1..21: note = Synthetic: SSR-0106448
  modified_base 1: mod_base = cm
  modified_base 1..2: mod_base = OTHER; note = S-phosphorothioate
  modified_base 2: mod_base = um
  modified_base 3: mod_base = OTHER; note = 2-fluororibose guanine
  modified_base 4: mod_base = um
  modified_base 5: mod_base = OTHER; note = 2-fluororibose guanine
  modified_base 6: mod_base = cm
  modified_base 7: mod_base = OTHER; note = 2-fluororibose uracil
  modified_base 7..8: mod_base = OTHER; note R-N-(1-hexadecyl-3-methylimidazolidin-2-ylidene)phosphorami date
  modified_base 8: mod_base = gm
  modified_base 9: mod_base = OTHER; note = 2-fluororibose uracil
  modified_base 10: mod_base = OTHER; note = 2-fluororibose adenine
  modified_base 11: mod_base = OTHER; note = 2-fluororibose adenine
  modified_base 12: mod_base = cm
  modified_base 13: mod_base = OTHER; note = 2-fluororibose adenine
  modified_base 14: mod_base = cm
  modified_base 15: mod_base = OTHER; note = 2-fluororibose adenine
  modified_base 16: mod_base = OTHER; note = 2-O-methylribose adenine
  modified_base 17: mod_base = OTHER; note = 2-fluororibose guanine
  modified_base 18: mod_base = um
  modified_base 19: mod_base = OTHER; note = 2-fluororibose adenine
  modified_base 20: mod_base = gm
  modified_base 20..21: mod_base = OTHER; note = S-phosphorothioate
  modified_base 21: mod_base = OTHER; note = 2-fluororibose adenine
  source 1..21: mol_type = other RNA
ctgtgctgtaacacaagtaga

SEQ ID NO: 827 - RNA, 21 nt, synthetic construct
  misc_feature 1..21: note = Synthetic: SSR-0106449
  modified_base 1: mod_base = cm
  modified_base 1..2: mod_base = OTHER; note = S-phosphorothioate
  modified_base 2: mod_base = um
  modified_base 3: mod_base = OTHER; note = 2-fluororibose guanine
  modified_base 4: mod_base = um
  modified_base 5: mod_base = OTHER; note = 2-fluororibose guanine
  modified_base 6: mod_base = cm
  modified_base 7: mod_base = OTHER; note = 2-fluororibose uracil
  modified_base 7..8: mod_base = OTHER; note R-N-(1-docecyl-3-methylimidazolidin-2-ylidene)phosphoramida te
  modified_base 8: mod_base = gm
  modified_base 9: mod_base = OTHER; note = 2-fluororibose uracil
  modified_base 10: mod_base = OTHER; note = 2-fluororibose adenine
  modified_base 11: mod_base = OTHER; note = 2-fluororibose adenine
  modified_base 12: mod_base = cm
  modified_base 13: mod_base = OTHER; note = 2-fluororibose adenine
  modified_base 14: mod_base = cm
  modified_base 15: mod_base = OTHER; note = 2-fluororibose adenine
  modified_base 15..16: mod_base = OTHER; note R-N-(1,3-dimethylimidazolidin-2-ylidene)phosphoramidate
  modified_base 16: mod_base = OTHER; note = 2-O-methylribose adenine
  modified_base 17: mod_base = OTHER; note = 2-fluororibose guanine
  modified_base 18: mod_base = um
  modified_base 19: mod_base = OTHER; note = 2-fluororibose adenine
  modified_base 20: mod_base = gm
  modified_base 20..21: mod_base = OTHER; note = S-phosphorothioate
  modified_base 21: mod_base = OTHER; note = 2-fluororibose adenine
  source 1..21: mol_type = other RNA
ctgtgctgtaacacaagtaga

SEQ ID NO: 828 - RNA, 21 nt, synthetic construct
  misc_feature 1..21: note = Synthetic: SSR-0106450
  modified_base 1: mod_base = cm
  modified_base 1..2: mod_base = OTHER; note = S-phosphorothioate
  modified_base 2: mod_base = um
  modified_base 3: mod_base = OTHER; note = 2-fluororibose guanine
  modified_base 4: mod_base = um
  modified_base 5: mod_base = OTHER; note = 2-fluororibose guanine
  modified_base 6: mod_base = cm
  modified_base 7: mod_base = OTHER; note = 2-fluororibose uracil
  modified_base 7..8: mod_base = OTHER; note R-N-(1-hexadecyl-3-methylimidazolidin-2-ylidene)phosphorami date
  modified_base 8: mod_base = gm
  modified_base 9: mod_base = OTHER; note = 2-fluororibose uracil
  modified_base 10: mod_base = OTHER; note = 2-fluororibose adenine
  modified_base 11: mod_base = OTHER; note = 2-fluororibose adenine
  modified_base 12: mod_base = cm
  modified_base 13: mod_base = OTHER; note = 2-fluororibose adenine
  modified_base 14: mod_base = cm
  modified_base 15: mod_base = OTHER; note = 2-fluororibose adenine
  modified_base 15..16: mod_base = OTHER; note R-N-(1,3-dimethylimidazolidin-2-ylidene)phosphoramidate
  modified_base 16: mod_base = OTHER; note = 2-O-methylribose adenine
  modified_base 17: mod_base = OTHER; note = 2-fluororibose guanine
  modified_base 18: mod_base = um
  modified_base 19: mod_base = OTHER; note = 2-fluororibose adenine
  modified_base 20: mod_base = gm
  modified_base 20..21: mod_base = OTHER; note = S-phosphorothioate
  modified_base 21: mod_base = OTHER; note = 2-fluororibose adenine
  source 1..21: mol_type = other RNA
ctgtgctgtaacacaagtaga

SEQ ID NO: 829 - RNA, 21 nt, synthetic construct
  misc_feature 1..21: note = Synthetic: SSR-0106451
  modified_base 1: mod_base = cm
  modified_base 1..2: mod_base = OTHER; note = S-phosphorothioate
  modified_base 2: mod_base = um
  modified_base 2..3: mod_base = OTHER; note = S-phosphorothioate
  modified_base 3: mod_base = OTHER; note = 2-fluororibose guanine
  modified_base 3..4: mod_base = OTHER; note = S-phosphorothioate
  modified_base 4: mod_base = um
  modified_base 4..5: mod_base = OTHER; note = S-phosphorothioate
  modified_base 5: mod_base = OTHER; note = 2-fluororibose guanine
  modified_base 5..6: mod_base = OTHER; note = S-phosphorothioate
  modified_base 6: mod_base = cm
  modified_base 6..7: mod_base = OTHER; note = S-phosphorothioate
  modified_base 7: mod_base = OTHER; note = 2-fluororibose uracil
  modified_base 7..8: mod_base = OTHER; note R-N-(1-docecyl-3-methylimidazolidin-2-ylidene)phosphoramida te
  modified_base 8: mod_base = gm
  modified_base 9: mod_base = OTHER; note = 2-fluororibose uracil
  modified_base 10: mod_base = OTHER; note = 2-fluororibose adenine
  modified_base 11: mod_base = OTHER; note = 2-fluororibose adenine
  modified_base 12: mod_base = cm
  modified_base 13: mod_base = OTHER; note = 2-fluororibose adenine
  modified_base 14: mod_base = cm
  modified_base 15: mod_base = OTHER; note = 2-fluororibose adenine
  modified_base 15..16: mod_base = OTHER; note R-N-(1,3-dimethylimidazolidin-2-ylidene)phosphoramidate
  modified_base 16: mod_base = OTHER; note = 2-O-methylribose adenine
  modified_base 16..17: mod_base = OTHER; note = S-phosphorothioate
  modified_base 17: mod_base = OTHER; note = 2-fluororibose guanine
  modified_base 17..18: mod_base = OTHER; note = S-phosphorothioate
  modified_base 18: mod_base = um
  modified_base 18..19: mod_base = OTHER; note = S-phosphorothioate
  modified_base 19: mod_base = OTHER; note = 2-fluororibose adenine
  modified_base 19..20: mod_base = OTHER; note = S-phosphorothioate
  modified_base 20: mod_base = gm
  modified_base 20..21: mod_base = OTHER; note = S-phosphorothioate
  modified_base 21: mod_base = OTHER; note = 2-O-methylribose adenine
  source 1..21: mol_type = other RNA
ctgtgctgtaacacaagtaga

SEQ ID NO: 830 - RNA, 21 nt, synthetic construct
  misc_feature 1..21: note = Synthetic: SSR-0106452
  modified_base 1: mod_base = cm
  modified_base 1..2: mod_base = OTHER; note = S-phosphorothioate
  modified_base 2: mod_base = um
  modified_base 2..3: mod_base = OTHER; note = S-phosphorothioate
  modified_base 3: mod_base = OTHER; note = 2-fluororibose guanine
  modified_base 3..4: mod_base = OTHER; note = S-phosphorothioate
  modified_base 4: mod_base = um
  modified_base 4..5: mod_base = OTHER; note = S-phosphorothioate
  modified_base 5: mod_base = OTHER; note = 2-fluororibose guanine
  modified_base 5..6: mod_base = OTHER; note = S-phosphorothioate
  modified_base 6: mod_base = cm
  modified_base 6..7: mod_base = OTHER; note = S-phosphorothioate
  modified_base 7: mod_base = OTHER; note = 2-fluororibose uracil
  modified_base 7..8: mod_base = OTHER; note R-N-(1-hexadecyl-3-methylimidazolidin-2-ylidene)phosphorami date
  modified_base 8: mod_base = gm
  modified_base 9: mod_base = OTHER; note = 2-fluororibose uracil
  modified_base 10: mod_base = OTHER; note = 2-fluororibose adenine
  modified_base 11: mod_base = OTHER; note = 2-fluororibose adenine
  modified_base 12: mod_base = cm
  modified_base 13: mod_base = OTHER; note = 2-fluororibose adenine
  modified_base 14: mod_base = cm
  modified_base 15: mod_base = OTHER; note = 2-fluororibose adenine
  modified_base 15..16: mod_base = OTHER; note R-N-(1,3-dimethylimidazolidin-2-ylidene)phosphoramidate
  modified_base 16: mod_base = OTHER; note = 2-O-methylribose adenine
  modified_base 16..17: mod_base = OTHER; note = S-phosphorothioate
  modified_base 17: mod_base = OTHER; note = 2-fluororibose guanine
  modified_base 17..18: mod_base = OTHER; note = S-phosphorothioate
  modified_base 18: mod_base = um
  modified_base 18..19: mod_base = OTHER; note = S-phosphorothioate
  modified_base 19: mod_base = OTHER; note = 2-fluororibose adenine
  modified_base 19..20: mod_base = OTHER; note = S-phosphorothioate
  modified_base 20: mod_base = gm
  modified_base 20..21: mod_base = OTHER; note = S-phosphorothioate
  modified_base 21: mod_base = OTHER; note = 2-O-methylribose adenine
  source 1..21: mol_type = other RNA
ctgtgctgtaacacaagtaga

SEQ ID NO: 831 - RNA, 23 nt, synthetic construct
  misc_feature 1..23: note = Synthetic: SSR-0106479
  modified_base 1: mod_base = OTHER; note = phosphate linked to the 5' end of 5-(R)-methyl-5-deoxy-2-O-methylribose uracil
  modified_base 1..2: mod_base = OTHER; note = R-phosphorothioate
  modified_base 2: mod_base = OTHER; note = 2-fluororibose cytosine
  modified_base 2..3: mod_base = OTHER; note = S-phosphorothioate
  modified_base 3: mod_base = um
  modified_base 3..4: mod_base = OTHER; note S-(1,3-dimethyl-1,3-dihydro-2H-benzo[d]imidazol-2-ylidene)p hosphoramidate
  modified_base 4: mod_base = OTHER; note = 2-fluororibose adenine
  modified_base 5: mod_base = cm
  modified_base 6: mod_base = OTHER; note = 2-fluororibose uracil
  modified_base 7: mod_base = um
  modified_base 7..8: mod_base = OTHER; note S-(1,3-dimethyl-1,3-dihydro-2H-benzo[d]imidazol-2-ylidene)p hosphoramidate
  modified_base 8: mod_base = OTHER; note = 2-fluororibose guanine
  modified_base 9: mod_base = um
  modified_base 10: mod_base = OTHER; note = 2-fluororibose guanine
  modified_base 11: mod_base = um
  modified_base 12: mod_base = um
  modified_base 13: mod_base = OTHER; note = 2-O-methylribose adenine
  modified_base 13..14: mod_base = OTHER; note = S-phosphorothioate
  modified_base 14: mod_base = OTHER; note = 2-fluororibose cytosine
  modified_base 14..15: mod_base = OTHER; note = S-phosphorothioate
  modified_base 15: mod_base = OTHER; note = 2-O-methylribose adenine
  modified_base 15..16: mod_base = OTHER; note = S-phosphorothioate
  modified_base 16: mod_base = OTHER; note = 2-fluororibose guanine
  modified_base 16..17: mod_base = OTHER; note = S-phosphorothioate
  modified_base 17: mod_base = cm
  modified_base 17..18: mod_base = OTHER; note = S-phosphorothioate
  modified_base 18: mod_base = OTHER; note = 2-fluororibose adenine
  modified_base 18..19: mod_base = OTHER; note S-(1,3-dimethyl-1,3-dihydro-2H-benzo[d]imidazol-2-ylidene)p hosphoramidate
  modified_base 19: mod_base = cm
  modified_base 19..20: mod_base = OTHER; note = S-phosphorothioate
  modified_base 20: mod_base = OTHER; note = 2-fluororibose adenine
  modified_base 20..21: mod_base = OTHER; note = S-phosphorothioate
  modified_base 21: mod_base = gm
  modified_base 21..22: mod_base = OTHER; note = S-phosphorothioate
  modified_base 22: mod_base = um
  modified_base 22..23: mod_base = OTHER; note = S-phosphorothioate
  modified_base 23: mod_base = um
  source 1..23: mol_type = other RNA
tctacttgtgttacagcacagtt

SEQ ID NO: 832 - RNA, 23 nt, synthetic construct
  misc_feature 1..23: note = Synthetic: SSR-0106480
  modified_base 1: mod_base = OTHER; note = phosphate linked to the 5' end of 5-(R)-methyl-5-deoxy-2-O-methylribose uracil
  modified_base 1..2: mod_base = OTHER; note = R-phosphorothioate
  modified_base 2: mod_base = OTHER; note = 2-fluororibose cytosine
  modified_base 2..3: mod_base = OTHER; note = S-phosphorothioate
  modified_base 3: mod_base = um
  modified_base 3..4: mod_base = OTHER; note S-(3aR,7aS-1,3,dimethyloctahydro-2H-benzo[d]imidazol-2ylide ne)phosphoramidate
  modified_base 4: mod_base = OTHER; note = 2-fluororibose adenine
  modified_base 5: mod_base = cm
  modified_base 6: mod_base = OTHER; note = 2-fluororibose uracil
  modified_base 7: mod_base = um
  modified_base 7..8: mod_base = OTHER; note S-(3aR,7aS-1,3,dimethyloctahydro-2H-benzo[d]imidazol-2ylide ne)phosphoramidate
  modified_base 8: mod_base = OTHER; note = 2-fluororibose guanine
  modified_base 9: mod_base = um
  modified_base 10: mod_base = OTHER; note = 2-fluororibose guanine
  modified_base 11: mod_base = um
  modified_base 12: mod_base = um
  modified_base 13: mod_base = OTHER; note = 2-O-methylribose adenine
  modified_base 13..14: mod_base = OTHER; note = S-phosphorothioate
  modified_base 14: mod_base = OTHER; note = 2-fluororibose cytosine
  modified_base 14..15: mod_base = OTHER; note = S-phosphorothioate
  modified_base 15: mod_base = OTHER; note = 2-O-methylribose adenine
  modified_base 15..16: mod_base = OTHER; note = S-phosphorothioate
  modified_base 16: mod_base = OTHER; note = 2-fluororibose guanine
  modified_base 16..17: mod_base = OTHER; note = S-phosphorothioate
  modified_base 17: mod_base = cm
  modified_base 17..18: mod_base = OTHER; note = S-phosphorothioate
  modified_base 18: mod_base = OTHER; note = 2-fluororibose adenine
  modified_base 18..19: mod_base = OTHER; note S-(3aR,7aS-1,3,dimethyloctahydro-2H-benzo[d]imidazol-2ylide ne)phosphoramidate
  modified_base 19: mod_base = cm
  modified_base 19..20: mod_base = OTHER; note = S-phosphorothioate
  modified_base 20: mod_base = OTHER; note = 2-fluororibose adenine
  modified_base 20..21: mod_base = OTHER; note = S-phosphorothioate
  modified_base 21: mod_base = gm
  modified_base 21..22: mod_base = OTHER; note = S-phosphorothioate
  modified_base 22: mod_base = um
  modified_base 22..23: mod_base = OTHER; note = S-phosphorothioate
  modified_base 23: mod_base = um
  source 1..23: mol_type = other RNA
tctacttgtgttacagcacagtt

SEQ ID NO: 833 - RNA, 23 nt, synthetic construct
  misc_feature 1..23: note = Synthetic: SSR-0106481
  modified_base 1: mod_base = OTHER; note = phosphate linked to the 5' end of 5-(R)-methyl-5-deoxy-2-O-methylribose uracil
  modified_base 1..2: mod_base = OTHER; note = R-phosphorothioate
  modified_base 2: mod_base = OTHER; note = 2-fluororibose cytosine
  modified_base 2..3: mod_base = OTHER; note = S-phosphorothioate
  modified_base 3: mod_base = um
  modified_base 3..4: mod_base = OTHER; note S-(3aR,7aR-1,3,dimethyloctahydro-2H-benzo[d]imidazol-2ylide ne)phosphoramidate
  modified_base 4: mod_base = OTHER; note = 2-fluororibose adenine
  modified_base 5: mod_base = cm
  modified_base 6: mod_base = OTHER; note = 2-fluororibose uracil
  modified_base 7: mod_base = um
  modified_base 7..8: mod_base = OTHER; note S-(3aR,7aR-1,3,dimethyloctahydro-2H-benzo[d]imidazol-2ylide ne)phosphoramidate
  modified_base 8: mod_base = OTHER; note = 2-fluororibose guanine
  modified_base 9: mod_base = um
  modified_base 10: mod_base = OTHER; note = 2-fluororibose guanine
  modified_base 11: mod_base = um
  modified_base 12: mod_base = um
  modified_base 13: mod_base = OTHER; note = 2-O-methylribose adenine
  modified_base 13..14: mod_base = OTHER; note = S-phosphorothioate
  modified_base 14: mod_base = OTHER; note = 2-fluororibose cytosine
  modified_base 14..15: mod_base = OTHER; note = S-phosphorothioate
  modified_base 15: mod_base = OTHER; note = 2-O-methylribose adenine
  modified_base 15..16: mod_base = OTHER; note = S-phosphorothioate
  modified_base 16: mod_base = OTHER; note = 2-fluororibose guanine
  modified_base 16..17: mod_base = OTHER; note = S-phosphorothioate
  modified_base 17: mod_base = cm
  modified_base 17..18: mod_base = OTHER; note = S-phosphorothioate
  modified_base 18: mod_base = OTHER; note = 2-fluororibose adenine
  modified_base 18..19: mod_base = OTHER; note S-(3aR,7aR-1,3,dimethyloctahydro-2H-benzo[d]imidazol-2ylide ne)phosphoramidate
  modified_base 19: mod_base = cm
  modified_base 19..20: mod_base = OTHER; note = S-phosphorothioate
  modified_base 20: mod_base = OTHER; note = 2-fluororibose adenine
  modified_base 20..21: mod_base = OTHER; note = S-phosphorothioate
  modified_base 21: mod_base = gm
  modified_base 21..22: mod_base = OTHER; note = S-phosphorothioate
  modified_base 22: mod_base = um
  modified_base 22..23: mod_base = OTHER; note = S-phosphorothioate
  modified_base 23: mod_base = um
  source 1..23: mol_type = other RNA
tctacttgtgttacagcacagtt

SEQ ID NO: 834 - RNA, 23 nt, synthetic construct
  misc_feature 1..23: note = Synthetic: SSR-0106482
  modified_base 1: mod_base = um
  modified_base 1..2: mod_base = OTHER; note = R-phosphorothioate
  modified_base 2: mod_base = OTHER; note = 2-fluororibose cytosine
  modified_base 2..3: mod_base = OTHER; note = S-phosphorothioate
  modified_base 3: mod_base = um
  modified_base 3..4: mod_base = OTHER; note S-(1,3-dimethyl-1,3-dihydro-2H-benzo[d]imidazol-2-ylidene)p hosphoramidate
  modified_base 4: mod_base = OTHER; note = 2-fluororibose adenine
  modified_base 5: mod_base = cm
  modified_base 6: mod_base = OTHER; note = 2-fluororibose uracil
  modified_base 7: mod_base = um
  modified_base 7..8: mod_base = OTHER; note S-(1,3-dimethyl-1,3-dihydro-2H-benzo[d]imidazol-2-ylidene)p hosphoramidate
  modified_base 8: mod_base = OTHER; note = 2-fluororibose guanine
  modified_base 9: mod_base = um
  modified_base 10: mod_base = OTHER; note = 2-fluororibose guanine
  modified_base 11: mod_base = um
  modified_base 12: mod_base = um
  modified_base 13: mod_base = OTHER; note = 2-O-methylribose adenine
  modified_base 13..14: mod_base = OTHER; note = S-phosphorothioate
  modified_base 14: mod_base = OTHER; note = 2-fluororibose cytosine
  modified_base 14..15: mod_base = OTHER; note = S-phosphorothioate
  modified_base 15: mod_base = OTHER; note = 2-O-methylribose adenine
  modified_base 15..16: mod_base = OTHER; note = S-phosphorothioate
  modified_base 16: mod_base = OTHER; note = 2-fluororibose guanine
  modified_base 16..17: mod_base = OTHER; note = S-phosphorothioate
  modified_base 17: mod_base = cm
  modified_base 17..18: mod_base = OTHER; note = S-phosphorothioate
  modified_base 18: mod_base = OTHER; note = 2-fluororibose adenine
  modified_base 18..19: mod_base = OTHER; note S-(1,3-dimethyl-1,3-dihydro-2H-benzo[d]imidazol-2-ylidene)p hosphoramidate
  modified_base 19: mod_base = cm
  modified_base 19..20: mod_base = OTHER; note = S-phosphorothioate
  modified_base 20: mod_base = OTHER; note = 2-fluororibose adenine
  modified_base 20..21: mod_base = OTHER; note = S-phosphorothioate
  modified_base 21: mod_base = gm
  modified_base 21..22: mod_base = OTHER; note = S-phosphorothioate
  modified_base 22: mod_base = um
  modified_base 22..23: mod_base = OTHER; note = S-phosphorothioate
  modified_base 23: mod_base = um
  source 1..23: mol_type = other RNA
tctacttgtgttacagcacagtt

SEQ ID NO: 835 - RNA, 23 nt, synthetic construct
  misc_feature 1..23: note = Synthetic: SSR-0106483
  modified_base 1: mod_base = um
  modified_base 1..2: mod_base = OTHER; note = R-phosphorothioate
  modified_base 2: mod_base = OTHER; note = 2-fluororibose cytosine
  modified_base 2..3: mod_base = OTHER; note = S-phosphorothioate
  modified_base 3: mod_base = um
  modified_base 3..4: mod_base = OTHER; note S-(3aR,7aS-1,3,dimethyloctahydro-2H-benzo[d]imidazol-2ylide ne)phosphoramidate
  modified_base 4: mod_base = OTHER; note = 2-fluororibose adenine
  modified_base 5: mod_base = cm
  modified_base 6: mod_base = OTHER; note = 2-fluororibose uracil
  modified_base 7: mod_base = um
  modified_base 7..8: mod_base = OTHER; note S-(3aR,7aS-1,3,dimethyloctahydro-2H-benzo[d]imidazol-2ylide ne)phosphoramidate
  modified_base 8: mod_base = OTHER; note = 2-fluororibose guanine
  modified_base 9: mod_base = um
  modified_base 10: mod_base = OTHER; note = 2-fluororibose guanine
  modified_base 11: mod_base = um
  modified_base 12: mod_base = um
  modified_base 13: mod_base = OTHER; note = 2-O-methylribose adenine
  modified_base 13..14: mod_base = OTHER; note = S-phosphorothioate
  modified_base 14: mod_base = OTHER; note = 2-fluororibose cytosine
  modified_base 14..15: mod_base = OTHER; note = S-phosphorothioate
  modified_base 15: mod_base = OTHER; note = 2-O-methylribose adenine
  modified_base 15..16: mod_base = OTHER; note = S-phosphorothioate
  modified_base 16: mod_base = OTHER; note = 2-fluororibose guanine
  modified_base 16..17: mod_base = OTHER; note = S-phosphorothioate
  modified_base 17: mod_base = cm
  modified_base 17..18: mod_base = OTHER; note = S-phosphorothioate
  modified_base 18: mod_base = OTHER; note = 2-fluororibose adenine
  modified_base 18..19: mod_base = OTHER; note S-(3aR,7aS-1,3,dimethyloctahydro-2H-benzo[d]imidazol-2ylide ne)phosphoramidate
  modified_base 19: mod_base = cm
  modified_base 19..20: mod_base = OTHER; note = S-phosphorothioate
  modified_base 20: mod_base = OTHER; note = 2-fluororibose adenine
  modified_base 20..21: mod_base = OTHER; note = S-phosphorothioate
  modified_base 21: mod_base = gm
  modified_base 21..22: mod_base = OTHER; note = S-phosphorothioate
  modified_base 22: mod_base = um
  modified_base 22..23: mod_base = OTHER; note = S-phosphorothioate
  modified_base 23: mod_base = um
  source 1..23: mol_type = other RNA
tctacttgtgttacagcacagtt

SEQ ID NO: 836 - RNA, 23 nt, synthetic construct
  misc_feature 1..23: note = Synthetic: SSR-0106484
  modified_base 1: mod_base = um
  modified_base 1..2: mod_base = OTHER; note = R-phosphorothioate
  modified_base 2: mod_base = OTHER; note = 2-fluororibose cytosine
  modified_base 2..3: mod_base = OTHER; note = S-phosphorothioate
  modified_base 3: mod_base = um
  modified_base 3..4: mod_base = OTHER; note S-(3aR,7aR-1,3,dimethyloctahydro-2H-benzo[d]imidazol-2ylide ne)phosphoramidate
  modified_base 4: mod_base = OTHER; note = 2-fluororibose adenine
  modified_base 5: mod_base = cm
  modified_base 6: mod_base = OTHER; note = 2-fluororibose uracil
  modified_base 7: mod_base = um
  modified_base 7..8: mod_base = OTHER; note S-(3aR,7aR-1,3,dimethyloctahydro-2H-benzo[d]imidazol-2ylide ne)phosphoramidate
  modified_base 8: mod_base = OTHER; note = 2-fluororibose guanine
  modified_base 9: mod_base = um
  modified_base 10: mod_base = OTHER; note = 2-fluororibose guanine
  modified_base 11: mod_base = um
  modified_base 12: mod_base = um
  modified_base 13: mod_base = OTHER; note = 2-O-methylribose adenine
  modified_base 13..14: mod_base = OTHER; note = S-phosphorothioate
  modified_base 14: mod_base = OTHER; note = 2-fluororibose cytosine
  modified_base 14..15: mod_base = OTHER; note = S-phosphorothioate
  modified_base 15: mod_base = OTHER; note = 2-O-methylribose adenine
  modified_base 15..16: mod_base = OTHER; note = S-phosphorothioate
  modified_base 16: mod_base = OTHER; note = 2-fluororibose guanine
  modified_base 16..17: mod_base = OTHER; note = S-phosphorothioate
  modified_base 17: mod_base = cm
  modified_base 17..18: mod_base = OTHER; note = S-phosphorothioate
  modified_base 18: mod_base = OTHER; note = 2-fluororibose adenine
  modified_base 18..19: mod_base = OTHER; note S-(3aR,7aR-1,3,dimethyloctahydro-2H-benzo[d]imidazol-2ylide ne)phosphoramidate
  modified_base 19: mod_base = cm
  modified_base 19..20: mod_base = OTHER; note = S-phosphorothioate
  modified_base 20: mod_base = OTHER; note = 2-fluororibose adenine
  modified_base 20..21: mod_base = OTHER; note = S-phosphorothioate
  modified_base 21: mod_base = gm
  modified_base 21..22: mod_base = OTHER; note = S-phosphorothioate
  modified_base 22: mod_base = um
  modified_base 22..23: mod_base = OTHER; note = S-phosphorothioate
  modified_base 23: mod_base = um
  source 1..23: mol_type = other RNA
tctacttgtgttacagcacagtt

SEQ ID NO: 837 - RNA, 21 nt, synthetic construct
  misc_feature 1..21: note = Synthetic: SSR-0106487
  modified_base 1: mod_base = cm
  modified_base 1..2: mod_base = OTHER; note = S-phosphorothioate
  modified_base 2: mod_base = um
  modified_base 3: mod_base = OTHER; note = 2-fluororibose guanine
  modified_base 4: mod_base = um
  modified_base 5: mod_base = OTHER; note = 2-fluororibose guanine
  modified_base 6: mod_base = cm
  modified_base 7: mod_base = OTHER; note = 2-fluororibose uracil
  modified_base 7..8: mod_base = OTHER; note R-(1-(3-aminopropyl)-3-methylimidazolidin-2-ylidene)phospho ramidate
  modified_base 8: mod_base = gm
  modified_base 9: mod_base = OTHER; note = 2-fluororibose uracil
  modified_base 10: mod_base = OTHER; note = 2-fluororibose adenine
  modified_base 11: mod_base = OTHER; note = 2-fluororibose adenine
  modified_base 12: mod_base = cm
  modified_base 13: mod_base = OTHER; note = 2-fluororibose adenine
  modified_base 14: mod_base = cm
  modified_base 15: mod_base = OTHER; note = 2-fluororibose adenine
  modified_base 15..16: mod_base = OTHER; note R-(1-(3-aminopropyl)-3-methylimidazolidin-2-ylidene)phospho ramidate
  modified_base 16: mod_base = OTHER; note = 2-O-methylribose adenine
  modified_base 17: mod_base = OTHER; note = 2-fluororibose guanine
  modified_base 18: mod_base = um
  modified_base 19: mod_base = OTHER; note = 2-fluororibose adenine
  modified_base 20: mod_base = gm
  modified_base 20..21: mod_base = OTHER; note = S-phosphorothioate
  modified_base 21: mod_base = OTHER; note = 2-fluororibose adenine
  source 1..21: mol_type = other RNA
ctgtgctgtaacacaagtaga

SEQ ID NO: 838 - RNA, 23 nt, synthetic construct
  misc_feature 1..23: note = Synthetic: SSR-0106517
  modified_base 1: mod_base = OTHER; note = 5-(E)-vinylphosphonate-5-deoxy-2-methylribose uracil
  modified_base 1..2: mod_base = OTHER; note = S-phosphorothioate
  modified_base 2: mod_base = OTHER; note = 2-fluororibose cytosine
  modified_base 2..3: mod_base = OTHER; note = S-phosphorothioate
  modified_base 3: mod_base = um
  modified_base 3..4: mod_base = OTHER; note S-N-(1,3-dimethylimidazolidin-2-ylidene)phosphoramidate
  modified_base 4: mod_base = OTHER; note = 2-fluororibose adenine
  modified_base 5: mod_base = cm
  modified_base 6: mod_base = OTHER; note = 2-fluororibose uracil
  modified_base 7: mod_base = um
  modified_base 7..8: mod_base = OTHER; note S-N-(1,3-dimethylimidazolidin-2-ylidene)phosphoramidate
  modified_base 8: mod_base = OTHER; note = 2-fluororibose guanine
  modified_base 9: mod_base = um
  modified_base 10: mod_base = OTHER; note = 2-fluororibose guanine
  modified_base 11: mod_base = um
  modified_base 12: mod_base = um
  modified_base 13: mod_base = OTHER; note = 2-O-methylribose adenine
  modified_base 13..14: mod_base = OTHER; note = S-phosphorothioate
  modified_base 14: mod_base = OTHER; note = 2-fluororibose cytosine
  modified_base 14..15: mod_base = OTHER; note = S-phosphorothioate
  modified_base 15: mod_base = OTHER; note = 2-O-methylribose adenine
  modified_base 15..16: mod_base = OTHER; note = S-phosphorothioate
  modified_base 16: mod_base = OTHER; note = 2-fluororibose guanine
  modified_base 16..17: mod_base = OTHER; note = S-phosphorothioate
  modified_base 17: mod_base = cm
  modified_base 17..18: mod_base = OTHER; note = S-phosphorothioate
  modified_base 18: mod_base = OTHER; note = 2-fluororibose adenine
  modified_base 18..19: mod_base = OTHER; note S-N-(1,3-dimethylimidazolidin-2-ylidene)phosphoramidate
  modified_base 19: mod_base = cm
  modified_base 19..20: mod_base = OTHER; note = S-phosphorothioate
  modified_base 20: mod_base = OTHER; note = 2-fluororibose adenine
  modified_base 20..21: mod_base = OTHER; note = S-phosphorothioate
  modified_base 21: mod_base = gm
  modified_base 21..22: mod_base = OTHER; note = S-phosphorothioate
  modified_base 22: mod_base = um
  modified_base 22..23: mod_base = OTHER; note = S-phosphorothioate
  modified_base 23: mod_base = um
  source 1..23: mol_type = other RNA
tctacttgtgttacagcacagtt

SEQ ID NO: 839 - RNA, 21 nt, synthetic construct
  misc_feature 1..21: note = Synthetic: SSR-0106564
  modified_base 1: mod_base = OTHER; note = 6-aminohexanol linked by phosphate to the 5' end of 2-O-methylribose cytosine
  modified_base 1..2: mod_base = OTHER; note = S-phosphorothioate
  modified_base 2: mod_base = um
  modified_base 3: mod_base = OTHER; note = 2-fluororibose guanine
  modified_base 4: mod_base = um
  modified_base 5: mod_base = OTHER; note = 2-fluororibose guanine
  modified_base 6: mod_base = cm
  modified_base 7: mod_base = OTHER; note = 2-fluororibose uracil
  modified_base 7..8: mod_base = OTHER; note R-N-(1,3-dimethylimidazolidin-2-ylidene)phosphoramidate
  modified_base 8: mod_base = gm
  modified_base 9: mod_base = OTHER; note = 2-fluororibose uracil
  modified_base 10: mod_base = OTHER; note = 2-fluororibose adenine
  modified_base 11: mod_base = OTHER; note = 2-fluororibose adenine
  modified_base 12: mod_base = cm
  modified_base 13: mod_base = OTHER; note = 2-fluororibose adenine
  modified_base 14: mod_base = cm
  modified_base 15: mod_base = OTHER; note = 2-fluororibose adenine
  modified_base 15..16: mod_base = OTHER; note R-N-(1,3-dimethylimidazolidin-2-ylidene)phosphoramidate
  modified_base 16: mod_base = OTHER; note = 2-O-methylribose adenine
  modified_base 17: mod_base = OTHER; note = 2-fluororibose guanine
  modified_base 18: mod_base = um
  modified_base 19: mod_base = OTHER; note = 2-fluororibose adenine
  modified_base 20: mod_base = gm
  modified_base 20..21: mod_base = OTHER; note = S-phosphorothioate
  modified_base 21: mod_base = OTHER; note = 2-fluororibose adenine
  source 1..21: mol_type = other RNA
ctgtgctgtaacacaagtaga

SEQ ID NO: 840 - RNA, 21 nt, synthetic construct
  misc_feature 1..21: note = Synthetic: SSR-0106565
  modified_base 1: mod_base = OTHER; note = palmitic acid linked to 6-aminohexanol linked by phosphate to the 5' end of 2-O-methylribose cytosine
  modified_base 1..2: mod_base = OTHER; note = S-phosphorothioate
  modified_base 2: mod_base = um
  modified_base 3: mod_base = OTHER; note = 2-fluororibose guanine
  modified_base 4: mod_base = um
  modified_base 5: mod_base = OTHER; note = 2-fluororibose guanine
  modified_base 6: mod_base = cm
  modified_base 7: mod_base = OTHER; note = 2-fluororibose uracil
  modified_base 7..8: mod_base = OTHER; note R-N-(1,3-dimethylimidazolidin-2-ylidene)phosphoramidate
  modified_base 8: mod_base = gm
  modified_base 9: mod_base = OTHER; note = 2-fluororibose uracil
  modified_base 10: mod_base = OTHER; note = 2-fluororibose adenine
  modified_base 11: mod_base = OTHER; note = 2-fluororibose adenine
  modified_base 12: mod_base = cm
  modified_base 13: mod_base = OTHER; note = 2-fluororibose adenine
  modified_base 14: mod_base = cm
  modified_base 15: mod_base = OTHER; note = 2-fluororibose adenine
  modified_base 15..16: mod_base = OTHER; note R-N-(1,3-dimethylimidazolidin-2-ylidene)phosphoramidate
  modified_base 16: mod_base = OTHER; note = 2-O-methylribose adenine
  modified_base 17: mod_base = OTHER; note = 2-fluororibose guanine
  modified_base 18: mod_base = um
  modified_base 19: mod_base = OTHER; note = 2-fluororibose adenine
  modified_base 20: mod_base = gm
  modified_base 20..21: mod_base = OTHER; note = S-phosphorothioate
  modified_base 21: mod_base = OTHER; note = 2-fluororibose adenine
  source 1..21: mol_type = other RNA
ctgtgctgtaacacaagtaga

SEQ ID NO: 841 - RNA, 21 nt, synthetic construct
  misc_feature 1..21: note = Synthetic: SSR-0106566
  modified_base 1: mod_base = OTHER; note = octadecanoic acid (stearic acid) linked to 6-aminohexanol linked by phosphate to the 5' end of 2-O-methylribose cytosine
  modified_base 1..2: mod_base = OTHER; note = S-phosphorothioate
  modified_base 2: mod_base = um
  modified_base 3: mod_base = OTHER; note = 2-fluororibose guanine
  modified_base 4: mod_base = um
  modified_base 5: mod_base = OTHER; note = 2-fluororibose guanine
  modified_base 6: mod_base = cm
  modified_base 7: mod_base = OTHER; note = 2-fluororibose uracil
  modified_base 7..8: mod_base = OTHER; note R-N-(1,3-dimethylimidazolidin-2-ylidene)phosphoramidate
  modified_base 8: mod_base = gm
  modified_base 9: mod_base = OTHER; note = 2-fluororibose uracil
  modified_base 10: mod_base = OTHER; note = 2-fluororibose adenine
  modified_base 11: mod_base = OTHER; note = 2-fluororibose adenine
  modified_base 12: mod_base = cm
  modified_base 13: mod_base = OTHER; note = 2-fluororibose adenine
  modified_base 14: mod_base = cm
  modified_base 15: mod_base = OTHER; note = 2-fluororibose adenine
  modified_base 15..16: mod_base = OTHER; note R-N-(1,3-dimethylimidazolidin-2-ylidene)phosphoramidate
  modified_base 16: mod_base = OTHER; note = 2-O-methylribose adenine
  modified_base 17: mod_base = OTHER; note = 2-fluororibose guanine
  modified_base 18: mod_base = um
  modified_base 19: mod_base = OTHER; note = 2-fluororibose adenine
  modified_base 20: mod_base = gm
  modified_base 20..21: mod_base = OTHER; note = S-phosphorothioate
  modified_base 21: mod_base = OTHER; note = 2-fluororibose adenine
  source 1..21: mol_type = other RNA
ctgtgctgtaacacaagtaga

SEQ ID NO: 842 - RNA, 21 nt, synthetic construct
  misc_feature 1..21: note = Synthetic: SSR-0106568
  modified_base 1: mod_base = OTHER; note = linoleic acid linked to 6-aminohexanol linked by phosphate to the 5' end of 2-O-methylribose cytosine
  modified_base 1..2: mod_base = OTHER; note = S-phosphorothioate
  modified_base 2: mod_base = um
  modified_base 3: mod_base = OTHER; note = 2-fluororibose guanine
  modified_base 4: mod_base = um
  modified_base 5: mod_base = OTHER; note = 2-fluororibose guanine
  modified_base 6: mod_base = cm
  modified_base 7: mod_base = OTHER; note = 2-fluororibose uracil
  modified_base 7..8: mod_base = OTHER; note R-N-(1,3-dimethylimidazolidin-2-ylidene)phosphoramidate
  modified_base 8: mod_base = gm
  modified_base 9: mod_base = OTHER; note = 2-fluororibose uracil
  modified_base 10: mod_base = OTHER; note = 2-fluororibose adenine
  modified_base 11: mod_base = OTHER; note = 2-fluororibose adenine
  modified_base 12: mod_base = cm
  modified_base 13: mod_base = OTHER; note = 2-fluororibose adenine
  modified_base 14: mod_base = cm
  modified_base 15: mod_base = OTHER; note = 2-fluororibose adenine
  modified_base 15..16: mod_base = OTHER; note R-N-(1,3-dimethylimidazolidin-2-ylidene)phosphoramidate
  modified_base 16: mod_base = OTHER; note = 2-O-methylribose adenine
  modified_base 17: mod_base = OTHER; note = 2-fluororibose guanine
  modified_base 18: mod_base = um
  modified_base 19: mod_base = OTHER; note = 2-fluororibose adenine
  modified_base 20: mod_base = gm
  modified_base 20..21: mod_base = OTHER; note = S-phosphorothioate
  modified_base 21: mod_base = OTHER; note = 2-fluororibose adenine
  source 1..21: mol_type = other RNA
ctgtgctgtaacacaagtaga

SEQ ID NO: 843 - RNA, 21 nt, synthetic construct
  misc_feature 1..21: note = Synthetic: SSR-0106569
  modified_base 1: mod_base = OTHER; note = turbinaric acid linked to 6-aminohexanol linked by phosphate to the 5' end of 2-O-methylribose cytosine
  modified_base 1..2: mod_base = OTHER; note = S-phosphorothioate
  modified_base 2: mod_base = um
  modified_base 3: mod_base = OTHER; note = 2-fluororibose guanine
  modified_base 4: mod_base = um
  modified_base 5: mod_base = OTHER; note = 2-fluororibose guanine
  modified_base 6: mod_base = cm
  modified_base 7: mod_base = OTHER; note = 2-fluororibose uracil
  modified_base 7..8: mod_base = OTHER; note R-N-(1,3-dimethylimidazolidin-2-ylidene)phosphoramidate
  modified_base 8: mod_base = gm
  modified_base 9: mod_base = OTHER; note = 2-fluororibose uracil
  modified_base 10: mod_base = OTHER; note = 2-fluororibose adenine
  modified_base 11: mod_base = OTHER; note = 2-fluororibose adenine
  modified_base 12: mod_base = cm
  modified_base 13: mod_base = OTHER; note = 2-fluororibose adenine
  modified_base 14: mod_base = cm
  modified_base 15: mod_base = OTHER; note = 2-fluororibose adenine
  modified_base 15..16: mod_base = OTHER; note R-N-(1,3-dimethylimidazolidin-2-ylidene)phosphoramidate
  modified_base 16: mod_base = OTHER; note = 2-O-methylribose adenine
  modified_base 17: mod_base = OTHER; note = 2-fluororibose guanine
  modified_base 18: mod_base = um
  modified_base 19: mod_base = OTHER; note = 2-fluororibose adenine
  modified_base 20: mod_base = gm
  modified_base 20..21: mod_base = OTHER; note = S-phosphorothioate
  modified_base 21: mod_base = OTHER; note = 2-fluororibose adenine
  source 1..21: mol_type = other RNA
ctgtgctgtaacacaagtaga

SEQ ID NO: 844 - RNA, 21 nt, synthetic construct
  misc_feature 1..21: note = Synthetic: SSR-0106570
  modified_base 1: mod_base = OTHER; note = cholesterol-3-ester linked to 6-aminohexanol linked by phosphate to the 5' end of 2-O-methylribose cytosine
  modified_base 1..2: mod_base = OTHER; note = S-phosphorothioate
  modified_base 2: mod_base = um
  modified_base 3: mod_base = OTHER; note = 2-fluororibose guanine
  modified_base 4: mod_base = um
  modified_base 5: mod_base = OTHER; note = 2-fluororibose guanine
  modified_base 6: mod_base = cm
  modified_base 7: mod_base = OTHER; note = 2-fluororibose uracil
  modified_base 7..8: mod_base = OTHER; note R-N-(1,3-dimethylimidazolidin-2-ylidene)phosphoramidate
  modified_base 8: mod_base = gm
  modified_base 9: mod_base = OTHER; note = 2-fluororibose uracil
  modified_base 10: mod_base = OTHER; note = 2-fluororibose adenine
  modified_base 11: mod_base = OTHER; note = 2-fluororibose adenine
  modified_base 12: mod_base = cm
  modified_base 13: mod_base = OTHER; note = 2-fluororibose adenine
  modified_base 14: mod_base = cm
  modified_base 15: mod_base = OTHER; note = 2-fluororibose adenine
  modified_base 15..16: mod_base = OTHER; note R-N-(1,3-dimethylimidazolidin-2-ylidene)phosphoramidate
  modified_base 16: mod_base = OTHER; note = 2-O-methylribose adenine
  modified_base 17: mod_base = OTHER; note = 2-fluororibose guanine
  modified_base 18: mod_base = um
  modified_base 19: mod_base = OTHER; note = 2-fluororibose adenine
  modified_base 20: mod_base = gm
  modified_base 20..21: mod_base = OTHER; note = S-phosphorothioate
  modified_base 21: mod_base = OTHER; note = 2-fluororibose adenine
  source 1..21: mol_type = other RNA
ctgtgctgtaacacaagtaga

SEQ ID NO: 845 - RNA, 21 nt, synthetic construct
  misc_feature 1..21: note = Synthetic: SSR-0106571
  modified_base 1: mod_base = OTHER; note = 2-hexyldecanoic acid linked to 6-aminohexanol linked by phosphate to the 5' end of 2-O-methylribose cytosine
  modified_base 1..2: mod_base = OTHER; note = S-phosphorothioate
  modified_base 2: mod_base = um
  modified_base 3: mod_base = OTHER; note = 2-fluororibose guanine
  modified_base 4: mod_base = um
  modified_base 5: mod_base = OTHER; note = 2-fluororibose guanine
  modified_base 6: mod_base = cm
  modified_base 7: mod_base = OTHER; note = 2-fluororibose uracil
  modified_base 7..8: mod_base = OTHER; note R-N-(1,3-dimethylimidazolidin-2-ylidene)phosphoramidate
  modified_base 8: mod_base = gm
  modified_base 9: mod_base = OTHER; note = 2-fluororibose uracil
  modified_base 10: mod_base = OTHER; note = 2-fluororibose adenine
  modified_base 11: mod_base = OTHER; note = 2-fluororibose adenine
  modified_base 12: mod_base = cm
  modified_base 13: mod_base = OTHER; note = 2-fluororibose adenine
  modified_base 14: mod_base = cm
  modified_base 15: mod_base = OTHER; note = 2-fluororibose adenine
  modified_base 15..16: mod_base = OTHER; note R-N-(1,3-dimethylimidazolidin-2-ylidene)phosphoramidate
  modified_base 16: mod_base = OTHER; note = 2-O-methylribose adenine
  modified_base 17: mod_base = OTHER; note = 2-fluororibose guanine
  modified_base 18: mod_base = um
  modified_base 19: mod_base = OTHER; note = 2-fluororibose adenine
  modified_base 20: mod_base = gm
  modified_base 20..21: mod_base = OTHER; note = S-phosphorothioate
  modified_base 21: mod_base = OTHER; note = 2-fluororibose adenine
  source 1..21: mol_type = other RNA
ctgtgctgtaacacaagtaga

SEQ ID NO: 846 - RNA, 21 nt, synthetic construct
  misc_feature 1..21: note = Synthetic: SSR-0106573
  modified_base 1: mod_base = OTHER; note = Triantennary Hexanoic acid with C12 linker linked to 6-aminohexanol linked by phosphate to the 5' end of 2-O-methylribose cytosine
  modified_base 1..2: mod_base = OTHER; note = S-phosphorothioate
  modified_base 2: mod_base = um
  modified_base 3: mod_base = OTHER; note = 2-fluororibose guanine
  modified_base 4: mod_base = um
  modified_base 5: mod_base = OTHER; note = 2-fluororibose guanine
  modified_base 6: mod_base = cm
  modified_base 7: mod_base = OTHER; note = 2-fluororibose uracil
  modified_base 7..8: mod_base = OTHER; note R-N-(1,3-dimethylimidazolidin-2-ylidene)phosphoramidate
  modified_base 8: mod_base = gm
  modified_base 9: mod_base = OTHER; note = 2-fluororibose uracil
  modified_base 10: mod_base = OTHER; note = 2-fluororibose adenine
  modified_base 11: mod_base = OTHER; note = 2-fluororibose adenine
  modified_base 12: mod_base = cm
  modified_base 13: mod_base = OTHER; note = 2-fluororibose adenine
  modified_base 14: mod_base = cm
  modified_base 15: mod_base = OTHER; note = 2-fluororibose adenine
  modified_base 15..16: mod_base = OTHER; note R-N-(1,3-dimethylimidazolidin-2-ylidene)phosphoramidate
  modified_base 16: mod_base = OTHER; note = 2-O-methylribose adenine
  modified_base 17: mod_base = OTHER; note = 2-fluororibose guanine
  modified_base 18: mod_base = um
  modified_base 19: mod_base = OTHER; note = 2-fluororibose adenine
  modified_base 20: mod_base = gm
  modified_base 20..21: mod_base = OTHER; note = S-phosphorothioate
  modified_base 21: mod_base = OTHER; note = 2-fluororibose adenine
  source 1..21: mol_type = other RNA
ctgtgctgtaacacaagtaga

SEQ ID NO: 847 - RNA, 21 nt, synthetic construct
  misc_feature 1..21: note = Synthetic: SSR-0106575
  modified_base 1: mod_base = OTHER; note = Triantennary benzamide with C5 linker linked to 6-aminohexanol linked by phosphate to the 5' end of 2-O-methylribose cytosine
  modified_base 1..2: mod_base = OTHER; note = S-phosphorothioate
  modified_base 2: mod_base = um
  modified_base 3: mod_base = OTHER; note = 2-fluororibose guanine
  modified_base 4: mod_base = um
  modified_base 5: mod_base = OTHER; note = 2-fluororibose guanine
  modified_base 6: mod_base = cm
  modified_base 7: mod_base = OTHER; note = 2-fluororibose uracil
  modified_base 7..8: mod_base = OTHER; note R-N-(1,3-dimethylimidazolidin-2-ylidene)phosphoramidate
  modified_base 8: mod_base = gm
  modified_base 9: mod_base = OTHER; note = 2-fluororibose uracil
  modified_base 10: mod_base = OTHER; note = 2-fluororibose adenine
  modified_base 11: mod_base = OTHER; note = 2-fluororibose adenine
  modified_base 12: mod_base = cm
  modified_base 13: mod_base = OTHER; note = 2-fluororibose adenine
  modified_base 14: mod_base = cm
  modified_base 15: mod_base = OTHER; note = 2-fluororibose adenine
  modified_base 15..16: mod_base = OTHER; note R-N-(1,3-dimethylimidazolidin-2-ylidene)phosphoramidate
  modified_base 16: mod_base = OTHER; note = 2-O-methylribose adenine
  modified_base 17: mod_base = OTHER; note = 2-fluororibose guanine
  modified_base 18: mod_base = um
  modified_base 19: mod_base = OTHER; note = 2-fluororibose adenine
  modified_base 20: mod_base = gm
  modified_base 20..21: mod_base = OTHER; note = S-phosphorothioate
  modified_base 21: mod_base = OTHER; note = 2-fluororibose adenine
  source 1..21: mol_type = other RNA
ctgtgctgtaacacaagtaga

SEQ ID NO: 848 - RNA, 21 nt, synthetic construct
  misc_feature 1..21: note = Synthetic: SSR-0106576
  modified_base 1: mod_base = OTHER; note = 20-oxoicosanoic acid linked to 6-aminohexanol linked by phosphate to the 5' end of 2-O-methylribose cytosine
  modified_base 1..2: mod_base = OTHER; note = S-phosphorothioate
  modified_base 2: mod_base = um
  modified_base 3: mod_base = OTHER; note = 2-fluororibose guanine
  modified_base 4: mod_base = um
  modified_base 5: mod_base = OTHER; note = 2-fluororibose guanine
  modified_base 6: mod_base = cm
  modified_base 7: mod_base = OTHER; note = 2-fluororibose uracil
  modified_base 7..8: mod_base = OTHER; note R-N-(1,3-dimethylimidazolidin-2-ylidene)phosphoramidate
  modified_base 8: mod_base = gm
  modified_base 9: mod_base = OTHER; note = 2-fluororibose uracil
  modified_base 10: mod_base = OTHER; note = 2-fluororibose adenine
  modified_base 11: mod_base = OTHER; note = 2-fluororibose adenine
  modified_base 12: mod_base = cm
  modified_base 13: mod_base = OTHER; note = 2-fluororibose adenine
  modified_base 14: mod_base = cm
  modified_base 15: mod_base = OTHER; note = 2-fluororibose adenine
  modified_base 15..16: mod_base = OTHER; note R-N-(1,3-dimethylimidazolidin-2-ylidene)phosphoramidate
  modified_base 16: mod_base = OTHER; note = 2-O-methylribose adenine
  modified_base 17: mod_base = OTHER; note = 2-fluororibose guanine
  modified_base 18: mod_base = um
  modified_base 19: mod_base = OTHER; note = 2-fluororibose adenine
  modified_base 20: mod_base = gm
  modified_base 20..21: mod_base = OTHER; note = S-phosphorothioate
  modified_base 21: mod_base = OTHER; note = 2-fluororibose adenine
  source 1..21: mol_type = other RNA
ctgtgctgtaacacaagtaga

SEQ ID NO: 849 - RNA, 21 nt, synthetic construct
  misc_feature 1..21: note = Synthetic: SSR-0106577
  modified_base 1: mod_base = OTHER; note = E,E-Muconic Acid linked to 6-aminohexanol linked by phosphate to the 5' end of 2-O-methylribose cytosine
  modified_base 1..2: mod_base = OTHER; note = S-phosphorothioate
  modified_base 2: mod_base = um
  modified_base 3: mod_base = OTHER; note = 2-fluororibose guanine
  modified_base 4: mod_base = um
  modified_base 5: mod_base = OTHER; note = 2-fluororibose guanine
  modified_base 6: mod_base = cm
  modified_base 7: mod_base = OTHER; note = 2-fluororibose uracil
  modified_base 7..8: mod_base = OTHER; note R-N-(1,3-dimethylimidazolidin-2-ylidene)phosphoramidate
  modified_base 8: mod_base = gm
  modified_base 9: mod_base = OTHER; note = 2-fluororibose uracil
  modified_base 10: mod_base = OTHER; note = 2-fluororibose adenine
  modified_base 11: mod_base = OTHER; note = 2-fluororibose adenine
  modified_base 12: mod_base = cm
  modified_base 13: mod_base = OTHER; note = 2-fluororibose adenine
  modified_base 14: mod_base = cm
  modified_base 15: mod_base = OTHER; note = 2-fluororibose adenine
  modified_base 15..16: mod_base = OTHER; note R-N-(1,3-dimethylimidazolidin-2-ylidene)phosphoramidate
  modified_base 16: mod_base = OTHER; note = 2-O-methylribose adenine
  modified_base 17: mod_base = OTHER; note = 2-fluororibose guanine
  modified_base 18: mod_base = um
  modified_base 19: mod_base = OTHER; note = 2-fluororibose adenine
  modified_base 20: mod_base = gm
  modified_base 20..21: mod_base = OTHER; note = S-phosphorothioate
  modified_base 21: mod_base = OTHER; note = 2-fluororibose adenine
  source 1..21: mol_type = other RNA
ctgtgctgtaacacaagtaga

SEQ ID NO: 850 - RNA, 21 nt, synthetic construct
  misc_feature 1..21: note = Synthetic: SSR-0106578
  modified_base 1: mod_base = OTHER; note = Z,Z-tridec-5,8-dienedioic acid linked to 6-aminohexanol linked by phosphate to the 5' end of 2-O-methylribose cytosine
  modified_base 1..2: mod_base = OTHER; note = S-phosphorothioate
  modified_base 2: mod_base = um
  modified_base 3: mod_base = OTHER; note = 2-fluororibose guanine
  modified_base 4: mod_base = um
  modified_base 5: mod_base = OTHER; note = 2-fluororibose guanine
  modified_base 6: mod_base = cm
  modified_base 7: mod_base = OTHER; note = 2-fluororibose uracil
  modified_base 7..8: mod_base = OTHER; note R-N-(1,3-dimethylimidazolidin-2-ylidene)phosphoramidate
  modified_base 8: mod_base = gm
  modified_base 9: mod_base = OTHER; note = 2-fluororibose uracil
  modified_base 10: mod_base = OTHER; note = 2-fluororibose adenine
  modified_base 11: mod_base = OTHER; note = 2-fluororibose adenine
  modified_base 12: mod_base = cm
  modified_base 13: mod_base = OTHER; note = 2-fluororibose adenine
  modified_base 14: mod_base = cm
  modified_base 15: mod_base = OTHER; note = 2-fluororibose adenine
  modified_base 15..16: mod_base = OTHER; note R-N-(1,3-dimethylimidazolidin-2-ylidene)phosphoramidate
  modified_base 16: mod_base = OTHER; note = 2-O-methylribose adenine
  modified_base 17: mod_base = OTHER; note = 2-fluororibose guanine
  modified_base 18: mod_base = um
  modified_base 19: mod_base = OTHER; note = 2-fluororibose adenine
  modified_base 20: mod_base = gm
  modified_base 20..21: mod_base = OTHER; note = S-phosphorothioate
  modified_base 21: mod_base = OTHER; note = 2-fluororibose adenine
  source 1..21: mol_type = other RNA
ctgtgctgtaacacaagtaga

SEQ ID NO: 851 - RNA, 21 nt, synthetic construct
  misc_feature 1..21: note = Synthetic: SSR-0106579
  modified_base 1: mod_base = OTHER; note = 5-Chloro-1,4-dihydro-4-methyl-2-quinazolinamine, C11oyl linker linked to 6-aminohexanol linked by phosphate to the 5' end of 2-O-methylribose cytosine
  modified_base 1..2: mod_base = OTHER; note = S-phosphorothioate
  modified_base 2: mod_base = um
  modified_base 3: mod_base = OTHER; note = 2-fluororibose guanine
  modified_base 4: mod_base = um
  modified_base 5: mod_base = OTHER; note = 2-fluororibose guanine
  modified_base 6: mod_base = cm
  modified_base 7: mod_base = OTHER; note = 2-fluororibose uracil
  modified_base 7..8: mod_base = OTHER; note R-N-(1,3-dimethylimidazolidin-2-ylidene)phosphoramidate
  modified_base 8: mod_base = gm
  modified_base 9: mod_base = OTHER; note = 2-fluororibose uracil
  modified_base 10: mod_base = OTHER; note = 2-fluororibose adenine
  modified_base 11: mod_base = OTHER; note = 2-fluororibose adenine
  modified_base 12: mod_base = cm
  modified_base 13: mod_base = OTHER; note = 2-fluororibose adenine
  modified_base 14: mod_base = cm
  modified_base 15: mod_base = OTHER; note = 2-fluororibose adenine
  modified_base 15..16: mod_base = OTHER; note R-N-(1,3-dimethylimidazolidin-2-ylidene)phosphoramidate
  modified_base 16: mod_base = OTHER; note = 2-O-methylribose adenine
  modified_base 17: mod_base = OTHER; note = 2-fluororibose guanine
  modified_base 18: mod_base = um
  modified_base 19: mod_base = OTHER; note = 2-fluororibose adenine
  modified_base 20: mod_base = gm
  modified_base 20..21: mod_base = OTHER; note = S-phosphorothioate
  modified_base 21: mod_base = OTHER; note = 2-fluororibose adenine
  source 1..21: mol_type = other RNA
ctgtgctgtaacacaagtaga

SEQ ID NO: 852 - RNA, 21 nt, synthetic construct
  misc_feature 1..21: note = Synthetic: SSR-0106580
  modified_base 1: mod_base = OTHER; note = L-Citruline linked to 6-aminohexanol linked by phosphate to the 5' end of 2-O-methylribose cytosine
  modified_base 1..2: mod_base = OTHER; note = S-phosphorothioate
  modified_base 2: mod_base = um
  modified_base 3: mod_base = OTHER; note = 2-fluororibose guanine
  modified_base 4: mod_base = um
  modified_base 5: mod_base = OTHER; note = 2-fluororibose guanine
  modified_base 6: mod_base = cm
  modified_base 7: mod_base = OTHER; note = 2-fluororibose uracil
  modified_base 7..8: mod_base = OTHER; note R-N-(1,3-dimethylimidazolidin-2-ylidene)phosphoramidate
  modified_base 8: mod_base = gm
  modified_base 9: mod_base = OTHER; note = 2-fluororibose uracil
  modified_base 10: mod_base = OTHER; note = 2-fluororibose adenine
  modified_base 11: mod_base = OTHER; note = 2-fluororibose adenine
  modified_base 12: mod_base = cm
  modified_base 13: mod_base = OTHER; note = 2-fluororibose adenine
  modified_base 14: mod_base = cm
  modified_base 15: mod_base = OTHER; note = 2-fluororibose adenine
  modified_base 15..16: mod_base = OTHER; note R-N-(1,3-dimethylimidazolidin-2-ylidene)phosphoramidate
  modified_base 16: mod_base = OTHER; note = 2-O-methylribose adenine
  modified_base 17: mod_base = OTHER; note = 2-fluororibose guanine
  modified_base 18: mod_base = um
  modified_base 19: mod_base = OTHER; note = 2-fluororibose adenine
  modified_base 20: mod_base = gm
  modified_base 20..21: mod_base = OTHER; note = S-phosphorothioate
  modified_base 21: mod_base = OTHER; note = 2-fluororibose adenine
  source 1..21: mol_type = other RNA
ctgtgctgtaacacaagtaga

SEQ ID NO: 853 - RNA, 21 nt, synthetic construct
  misc_feature 1..21: note = Synthetic: SSR-0106652
  modified_base 1: mod_base = OTHER; note = 10-(4-(2-carboxyethyl)phenoxy)decanoic acid linked to 6-aminohexanol linked by phosphate to the 5' end of 2-O-methylribose cytosine
  modified_base 1..2: mod_base = OTHER; note = S-phosphorothioate
  modified_base 2: mod_base = um
  modified_base 3: mod_base = OTHER; note = 2-fluororibose guanine
  modified_base 4: mod_base = um
  modified_base 5: mod_base = OTHER; note = 2-fluororibose guanine
  modified_base 6: mod_base = cm
  modified_base 7: mod_base = OTHER; note = 2-fluororibose uracil
  modified_base 7..8: mod_base = OTHER; note R-N-(1,3-dimethylimidazolidin-2-ylidene)phosphoramidate
  modified_base 8: mod_base = gm
  modified_base 9: mod_base = OTHER; note = 2-fluororibose uracil
  modified_base 10: mod_base = OTHER; note = 2-fluororibose adenine
  modified_base 11: mod_base = OTHER; note = 2-fluororibose adenine
  modified_base 12: mod_base = cm
  modified_base 13: mod_base = OTHER; note = 2-fluororibose adenine
  modified_base 14: mod_base = cm
  modified_base 15: mod_base = OTHER; note = 2-fluororibose adenine
  modified_base 15..16: mod_base = OTHER; note R-N-(1,3-dimethylimidazolidin-2-ylidene)phosphoramidate
  modified_base 16: mod_base = OTHER; note = 2-O-methylribose adenine
  modified_base 17: mod_base = OTHER; note = 2-fluororibose guanine
  modified_base 18: mod_base = um
  modified_base 19: mod_base = OTHER; note = 2-fluororibose adenine
  modified_base 20: mod_base = gm
  modified_base 20..21: mod_base = OTHER; note = S-phosphorothioate
  modified_base 21: mod_base = OTHER; note = 2-fluororibose adenine
  source 1..21: mol_type = other RNA
ctgtgctgtaacacaagtaga

SEQ ID NO: 854 - RNA, 21 nt, synthetic construct
  misc_feature 1..21: note = Synthetic: SSR-0106653
  modified_base 1: mod_base = OTHER; note = (E)-10-(4-(2-carboxyvinyl)phenoxy)decanoic acid linked to 6-aminohexanol linked by phosphate to the 5' end of 2-O-methylribose cytosine
  modified_base 1..2: mod_base = OTHER; note = S-phosphorothioate
  modified_base 2: mod_base = um
  modified_base 3: mod_base = OTHER; note = 2-fluororibose guanine
  modified_base 4: mod_base = um
  modified_base 5: mod_base = OTHER; note = 2-fluororibose guanine
  modified_base 6: mod_base = cm
  modified_base 7: mod_base = OTHER; note = 2-fluororibose uracil
  modified_base 7..8: mod_base = OTHER; note R-N-(1,3-dimethylimidazolidin-2-ylidene)phosphoramidate
  modified_base 8: mod_base = gm
  modified_base 9: mod_base = OTHER; note = 2-fluororibose uracil
  modified_base 10: mod_base = OTHER; note = 2-fluororibose adenine
  modified_base 11: mod_base = OTHER; note = 2-fluororibose adenine
  modified_base 12: mod_base = cm
  modified_base 13: mod_base = OTHER; note = 2-fluororibose adenine
  modified_base 14: mod_base = cm
  modified_base 15: mod_base = OTHER; note = 2-fluororibose adenine
  modified_base 15..16: mod_base = OTHER; note R-N-(1,3-dimethylimidazolidin-2-ylidene)phosphoramidate
  modified_base 16: mod_base = OTHER; note = 2-O-methylribose adenine
  modified_base 17: mod_base = OTHER; note = 2-fluororibose guanine
  modified_base 18: mod_base = um
  modified_base 19: mod_base = OTHER; note = 2-fluororibose adenine
  modified_base 20: mod_base = gm
  modified_base 20..21: mod_base = OTHER; note = S-phosphorothioate
  modified_base 21: mod_base = OTHER; note = 2-fluororibose adenine
  source 1..21: mol_type = other RNA
ctgtgctgtaacacaagtaga

SEQ ID NO: 855 - RNA, 21 nt, synthetic construct
  misc_feature 1..21: note = Synthetic: SSR-0106660
  modified_base 1: mod_base = OTHER; note = Bardoxolone (acid-linked) linked to 6-aminohexanol linked by phosphate to the 5' end of 2-O-methylribose cytosine
  modified_base 1..2: mod_base = OTHER; note = S-phosphorothioate
  modified_base 2: mod_base = um
  modified_base 3: mod_base = OTHER; note = 2-fluororibose guanine
  modified_base 4: mod_base = um
  modified_base 5: mod_base = OTHER; note = 2-fluororibose guanine
  modified_base 6: mod_base = cm
  modified_base 7: mod_base = OTHER; note = 2-fluororibose uracil
  modified_base 7..8: mod_base = OTHER; note R-N-(1,3-dimethylimidazolidin-2-ylidene)phosphoramidate
  modified_base 8: mod_base = gm
  modified_base 9: mod_base = OTHER; note = 2-fluororibose uracil
  modified_base 10: mod_base = OTHER; note = 2-fluororibose adenine
  modified_base 11: mod_base = OTHER; note = 2-fluororibose adenine
  modified_base 12: mod_base = cm
  modified_base 13: mod_base = OTHER; note = 2-fluororibose adenine
  modified_base 14: mod_base = cm
  modified_base 15: mod_base = OTHER; note = 2-fluororibose adenine
  modified_base 15..16: mod_base = OTHER; note R-N-(1,3-dimethylimidazolidin-2-ylidene)phosphoramidate
  modified_base 16: mod_base = OTHER; note = 2-O-methylribose adenine
  modified_base 17: mod_base = OTHER; note = 2-fluororibose guanine
  modified_base 18: mod_base = um
  modified_base 19: mod_base = OTHER; note = 2-fluororibose adenine
  modified_base 20: mod_base = gm
  modified_base 20..21: mod_base = OTHER; note = S-phosphorothioate
  modified_base 21: mod_base = OTHER; note = 2-fluororibose adenine
  source 1..21: mol_type = other RNA
ctgtgctgtaacacaagtaga

SEQ ID NO: 856 - RNA, 21 nt, synthetic construct
  misc_feature 1..21: note = Synthetic: SSR-0106679
  modified_base 1: mod_base = OTHER; note = triantennary anisamide with a C5 linker linked to 6-aminohexanol linked by phosphate to the 5' end of 2-O-methylribose cytosine
  modified_base 1..2: mod_base = OTHER; note = S-phosphorothioate
  modified_base 2: mod_base = um
  modified_base 3: mod_base = OTHER; note = 2-fluororibose guanine
  modified_base 4: mod_base = um
  modified_base 5: mod_base = OTHER; note = 2-fluororibose guanine
  modified_base 6: mod_base = cm
  modified_base 7: mod_base = OTHER; note = 2-fluororibose uracil
  modified_base 7..8: mod_base = OTHER; note R-N-(1,3-dimethylimidazolidin-2-ylidene)phosphoramidate
  modified_base 8: mod_base = gm
  modified_base 9: mod_base = OTHER; note = 2-fluororibose uracil
  modified_base 10: mod_base = OTHER; note = 2-fluororibose adenine
  modified_base 11: mod_base = OTHER; note = 2-fluororibose adenine
  modified_base 12: mod_base = cm
  modified_base 13: mod_base = OTHER; note = 2-fluororibose adenine
  modified_base 14: mod_base = cm
  modified_base 15: mod_base = OTHER; note = 2-fluororibose adenine
  modified_base 15..16: mod_base = OTHER; note R-N-(1,3-dimethylimidazolidin-2-ylidene)phosphoramidate
  modified_base 16: mod_base = OTHER; note = 2-O-methylribose adenine
  modified_base 17: mod_base = OTHER; note = 2-fluororibose guanine
  modified_base 18: mod_base = um
  modified_base 19: mod_base = OTHER; note = 2-fluororibose adenine
  modified_base 20: mod_base = gm
  modified_base 20..21: mod_base = OTHER; note = S-phosphorothioate
  modified_base 21: mod_base = OTHER; note = 2-fluororibose adenine
  source 1..21: mol_type = other RNA
ctgtgctgtaacacaagtaga

SEQ ID NO: 857 - RNA, 23 nt, synthetic construct
  misc_feature 1..23: note = Synthetic: SSR-0107358
  modified_base 1: mod_base = um
  modified_base 1..2: mod_base = OTHER; note = S-phosphorothioate
  modified_base 2: mod_base = OTHER; note = 2-fluororibose uracil
  modified_base 2..3: mod_base = OTHER; note = R-phosphorothioate
  modified_base 3: mod_base = OTHER; note = 2-O-methylribose adenine
  modified_base 4: mod_base = OTHER; note = 2-fluororibose uracil
  modified_base 5: mod_base = OTHER; note = 2-O-methylribose adenine
  modified_base 6: mod_base = OTHER; note = 2-fluororibose guanine
  modified_base 7: mod_base = OTHER; note = 2-O-methylribose adenine
  modified_base 8: mod_base = gm
  modified_base 9: mod_base = cm
  modified_base 10: mod_base = OTHER; note = 2-O-methylribose adenine
  modified_base 10..11: mod_base = OTHER; note S-N-(1,3-dimethylimidazolidin-2-ylidene)phosphoramidate
  modified_base 11: mod_base = OTHER; note = 2-fluororibose adenine
  modified_base 12: mod_base = gm
  modified_base 13: mod_base = OTHER; note = 2-O-methylribose adenine
  modified_base 14: mod_base = OTHER; note = 2-fluororibose adenine
  modified_base 15: mod_base = cm
  modified_base 16: mod_base = OTHER; note = 2-fluororibose adenine
  modified_base 17: mod_base = cm
  modified_base 18: mod_base = um
  modified_base 19: mod_base = gm
  modified_base 20: mod_base = um
  modified_base 21: mod_base = um
  modified_base 21..22: mod_base = OTHER; note = S-phosphorothioate
  modified_base 22: mod_base = um
  modified_base 22..23: mod_base = OTHER; note = S-phosphorothioate
  modified_base 23: mod_base = um
  source 1..23: mol_type = other RNA
ttatagagcaagaacactgtttt

SEQ ID NO: 858 - RNA, 23 nt, synthetic construct
  misc_feature 1..23: note = Synthetic: SSR-0107359
  modified_base 1: mod_base = um
  modified_base 1..2: mod_base = OTHER; note = S-phosphorothioate
  modified_base 2: mod_base = OTHER; note = 2-fluororibose uracil
  modified_base 2..3: mod_base = OTHER; note = R-phosphorothioate
  modified_base 3: mod_base = OTHER; note = 5-(R)-methyl-2-O-methylribose adenine
  modified_base 4: mod_base = OTHER; note = 5-(R)-methyl-2-fluororibose uracil
  modified_base 5: mod_base = OTHER; note = 2-O-methylribose adenine
  modified_base 6: mod_base = OTHER; note = 2-fluororibose guanine
  modified_base 7: mod_base = OTHER; note = 2-O-methylribose adenine
  modified_base 8: mod_base = gm
  modified_base 9: mod_base = cm
  modified_base 10: mod_base = OTHER; note = 2-O-methylribose adenine
  modified_base 10..11: mod_base = OTHER; note S-N-(1,3-dimethylimidazolidin-2-ylidene)phosphoramidate
  modified_base 11: mod_base = OTHER; note = 2-fluororibose adenine
  modified_base 12: mod_base = gm
  modified_base 13: mod_base = OTHER; note = 2-O-methylribose adenine
  modified_base 14: mod_base = OTHER; note = 2-fluororibose adenine
  modified_base 15: mod_base = cm
  modified_base 16: mod_base = OTHER; note = 2-fluororibose adenine
  modified_base 17: mod_base = cm
  modified_base 18: mod_base = um
  modified_base 19: mod_base = gm
  modified_base 20: mod_base = um
  modified_base 21: mod_base = um
  modified_base 21..22: mod_base = OTHER; note = S-phosphorothioate
  modified_base 22: mod_base = um
  modified_base 22..23: mod_base = OTHER; note = S-phosphorothioate
  modified_base 23: mod_base = um
  source 1..23: mol_type = other RNA
ttatagagcaagaacactgtttt

SEQ ID NO: 859 - RNA, 23 nt, synthetic construct
  misc_feature 1..23: note = Synthetic: SSR-0107360
  modified_base 1: mod_base = um
  modified_base 1..2: mod_base = OTHER; note = S-phosphorothioate
  modified_base 2: mod_base = OTHER; note = 2-fluororibose uracil
  modified_base 2..3: mod_base = OTHER; note = R-phosphorothioate
  modified_base 3: mod_base = OTHER; note = 5-(S)-methyl-2-O-methylribose adenine
  modified_base 4: mod_base = OTHER; note = 5-(S)-methyl-2-fluororibose uracil
  modified_base 5: mod_base = OTHER; note = 2-O-methylribose adenine
  modified_base 6: mod_base = OTHER; note = 2-fluororibose guanine
  modified_base 7: mod_base = OTHER; note = 2-O-methylribose adenine
  modified_base 8: mod_base = gm
  modified_base 9: mod_base = cm
  modified_base 10: mod_base = OTHER; note = 2-O-methylribose adenine
  modified_base 10..11: mod_base = OTHER; note S-N-(1,3-dimethylimidazolidin-2-ylidene)phosphoramidate
  modified_base 11: mod_base = OTHER; note = 2-fluororibose adenine
  modified_base 12: mod_base = gm
  modified_base 13: mod_base = OTHER; note = 2-O-methylribose adenine
  modified_base 14: mod_base = OTHER; note = 2-fluororibose adenine
  modified_base 15: mod_base = cm
  modified_base 16: mod_base = OTHER; note = 2-fluororibose adenine
  modified_base 17: mod_base = cm
  modified_base 18: mod_base = um
  modified_base 19: mod_base = gm
  modified_base 20: mod_base = um
  modified_base 21: mod_base = um
  modified_base 21..22: mod_base = OTHER; note = S-phosphorothioate
  modified_base 22: mod_base = um
  modified_base 22..23: mod_base = OTHER; note = S-phosphorothioate
  modified_base 23: mod_base = um
  source 1..23: mol_type = other RNA
ttatagagcaagaacactgtttt

SEQ ID NO: 860 - RNA, 23 nt, synthetic construct
  misc_feature 1..23: note = Synthetic: SSR-0106644
  modified_base 1: mod_base = um
  modified_base 1..2: mod_base = OTHER; note = S-phosphorothioate
  modified_base 2: mod_base = OTHER; note = 2-fluororibose uracil
  modified_base 2..3: mod_base = OTHER; note = R-phosphorothioate
  modified_base 3: mod_base = OTHER; note = 2-O-methylribose adenine
  modified_base 3..4: mod_base = OTHER; note S-N-(1,3-dimethylimidazolidin-2-ylidene)phosphoramidate
  modified_base 4: mod_base = OTHER; note = 5-(R)-methyl-2-fluororibose uracil
  modified_base 5: mod_base = OTHER; note = 2-O-methylribose adenine
  modified_base 6: mod_base = OTHER; note = 2-fluororibose guanine
  modified_base 7: mod_base = OTHER; note = 2-O-methylribose adenine
  modified_base 8: mod_base = gm
  modified_base 9: mod_base = cm
  modified_base 10: mod_base = OTHER; note = 2-O-methylribose adenine
  modified_base 10..11: mod_base = OTHER; note S-N-(1,3-dimethylimidazolidin-2-ylidene)phosphoramidate
  modified_base 11: mod_base = OTHER; note = 2-fluororibose adenine
  modified_base 12: mod_base = gm
  modified_base 13: mod_base = OTHER; note = 2-O-methylribose adenine
  modified_base 14: mod_base = OTHER; note = 2-fluororibose adenine
  modified_base 15: mod_base = cm
  modified_base 16: mod_base = OTHER; note = 2-fluororibose adenine
  modified_base 17: mod_base = cm
  modified_base 18: mod_base = um
  modified_base 19: mod_base = gm
  modified_base 20: mod_base = um
  modified_base 21: mod_base = um
  modified_base 21..22: mod_base = OTHER; note = S-phosphorothioate
  modified_base 22: mod_base = um
  modified_base 22..23: mod_base = OTHER; note = S-phosphorothioate
  modified_base 23: mod_base = um
  source 1..23: mol_type = other RNA
ttatagagcaagaacactgtttt

SEQ ID NO: 861 - RNA, 23 nt, synthetic construct
  misc_feature 1..23: note = Synthetic: SSR-0106645
  modified_base 1: mod_base = um
  modified_base 1..2: mod_base = OTHER; note = S-phosphorothioate
  modified_base 2: mod_base = OTHER; note = 2-fluororibose uracil
  modified_base 2..3: mod_base = OTHER; note = R-phosphorothioate
  modified_base 3: mod_base = OTHER; note = 2-O-methylribose adenine
  modified_base 3..4: mod_base = OTHER; note S-N-(1,3-dimethylimidazolidin-2-ylidene)phosphoramidate
  modified_base 4: mod_base = OTHER; note = 5-(S)-methyl-2-fluororibose uracil
  modified_base 5: mod_base = OTHER; note = 2-O-methylribose adenine
  modified_base 6: mod_base = OTHER; note = 2-fluororibose guanine
  modified_base 7: mod_base = OTHER; note = 2-O-methylribose adenine
  modified_base 8: mod_base = gm
  modified_base 9: mod_base = cm
  modified_base 10: mod_base = OTHER; note = 2-O-methylribose adenine
  modified_base 10..11: mod_base = OTHER; note S-N-(1,3-dimethylimidazolidin-2-ylidene)phosphoramidate
  modified_base 11: mod_base = OTHER; note = 2-fluororibose adenine
  modified_base 12: mod_base = gm
  modified_base 13: mod_base = OTHER; note = 2-O-methylribose adenine
  modified_base 14: mod_base = OTHER; note = 2-fluororibose adenine
  modified_base 15: mod_base = cm
  modified_base 16: mod_base = OTHER; note = 2-fluororibose adenine
  modified_base 17: mod_base = cm
  modified_base 18: mod_base = um
  modified_base 19: mod_base = gm
  modified_base 20: mod_base = um
  modified_base 21: mod_base = um
  modified_base 21..22: mod_base = OTHER; note = S-phosphorothioate
  modified_base 22: mod_base = um
  modified_base 22..23: mod_base = OTHER; note = S-phosphorothioate
  modified_base 23: mod_base = um
  source 1..23: mol_type = other RNA
ttatagagcaagaacactgtttt

SEQ ID NO: 862 - RNA, 23 nt, synthetic construct
  misc_feature 1..23: note = Synthetic: SSR-0106646
  modified_base 1: mod_base = um
  modified_base 1..2: mod_base = OTHER; note = S-phosphorothioate
  modified_base 2: mod_base = OTHER; note = 2-fluororibose uracil
  modified_base 2..3: mod_base = OTHER; note = R-phosphorothioate
  modified_base 3: mod_base = OTHER; note = 5-(R)-methyl-2-O-methylribose adenine
  modified_base 3..4: mod_base = OTHER; note S-N-(1,3-dimethylimidazolidin-2-ylidene)phosphoramidate
  modified_base 4: mod_base = OTHER; note = 2-fluororibose uracil
  modified_base 5: mod_base = OTHER; note = 2-O-methylribose adenine
  modified_base 6: mod_base = OTHER; note = 2-fluororibose guanine
  modified_base 7: mod_base = OTHER; note = 2-O-methylribose adenine
  modified_base 8: mod_base = gm
  modified_base 9: mod_base = cm
  modified_base 10: mod_base = OTHER; note = 2-O-methylribose adenine
  modified_base 10..11: mod_base = OTHER; note S-N-(1,3-dimethylimidazolidin-2-ylidene)phosphoramidate
  modified_base 11: mod_base = OTHER; note = 2-fluororibose adenine
  modified_base 12: mod_base = gm
  modified_base 13: mod_base = OTHER; note = 2-O-methylribose adenine
  modified_base 14: mod_base = OTHER; note = 2-fluororibose adenine
  modified_base 15: mod_base = cm
  modified_base 16: mod_base = OTHER; note = 2-fluororibose adenine
  modified_base 17: mod_base = cm
  modified_base 18: mod_base = um
  modified_base 19: mod_base = gm
  modified_base 20: mod_base = um
  modified_base 21: mod_base = um
  modified_base 21..22: mod_base = OTHER; note = S-phosphorothioate
  modified_base 22: mod_base = um
  modified_base 22..23: mod_base = OTHER; note = S-phosphorothioate
  modified_base 23: mod_base = um
  source 1..23: mol_type = other RNA
ttatagagcaagaacactgtttt

SEQ ID NO: 863 - RNA, 23 nt, synthetic construct
  misc_feature 1..23: note = Synthetic: SSR-0106648
  modified_base 1: mod_base = um
  modified_base 1..2: mod_base = OTHER; note = S-phosphorothioate
  modified_base 2: mod_base = OTHER; note = 2-fluororibose uracil
  modified_base 2..3: mod_base = OTHER; note = S-phosphorothioate
  modified_base 3: mod_base = OTHER; note = 5-(R)-methyl-2-O-methylribose adenine
  modified_base 3..4: mod_base = OTHER; note S-N-(1,3-dimethylimidazolidin-2-ylidene)phosphoramidate
  modified_base 4: mod_base = OTHER; note = 5-(R)-methyl-2-fluororibose uracil
  modified_base 5: mod_base = OTHER; note = 2-O-methylribose adenine
  modified_base 6: mod_base = OTHER; note = 2-fluororibose guanine
  modified_base 7: mod_base = OTHER; note = 2-O-methylribose adenine
  modified_base 8: mod_base = gm
  modified_base 9: mod_base = cm
  modified_base 10: mod_base = OTHER; note = 2-O-methylribose adenine
  modified_base 10..11: mod_base = OTHER; note S-N-(1,3-dimethylimidazolidin-2-ylidene)phosphoramidate
  modified_base 11: mod_base = OTHER; note = 2-fluororibose adenine
  modified_base 12: mod_base = gm
  modified_base 13: mod_base = OTHER; note = 2-O-methylribose adenine
  modified_base 14: mod_base = OTHER; note = 2-fluororibose adenine
  modified_base 15: mod_base = cm
  modified_base 16: mod_base = OTHER; note = 2-fluororibose adenine
  modified_base 17: mod_base = cm
  modified_base 18: mod_base = um
  modified_base 19: mod_base = gm
  modified_base 20: mod_base = um
  modified_base 21: mod_base = um
  modified_base 21..22: mod_base = OTHER; note = S-phosphorothioate
  modified_base 22: mod_base = um
  modified_base 22..23: mod_base = OTHER; note = S-phosphorothioate
  modified_base 23: mod_base = um
  source 1..23: mol_type = other RNA
ttatagagcaagaacactgtttt

SEQ ID NO: 864 - RNA, 23 nt, synthetic construct
  misc_feature 1..23: note = Synthetic: SSR-0106649
  modified_base 1: mod_base = um
  modified_base 1..2: mod_base = OTHER; note = S-phosphorothioate
  modified_base 2: mod_base = OTHER; note = 2-fluororibose uracil
  modified_base 2..3: mod_base = OTHER; note = S-phosphorothioate
  modified_base 3: mod_base = OTHER; note = 5-(S)-methyl-2-O-methylribose adenine
  modified_base 3..4: mod_base = OTHER; note S-N-(1,3-dimethylimidazolidin-2-ylidene)phosphoramidate
  modified_base 4: mod_base = OTHER; note = 5-(S)-methyl-2-fluororibose uracil
  modified_base 5: mod_base = OTHER; note = 2-O-methylribose adenine
  modified_base 6: mod_base = OTHER; note = 2-fluororibose guanine
  modified_base 7: mod_base = OTHER; note = 2-O-methylribose adenine
  modified_base 8: mod_base = gm
  modified_base 9: mod_base = cm
  modified_base 10: mod_base = OTHER; note = 2-O-methylribose adenine
  modified_base 10..11: mod_base = OTHER; note S-N-(1,3-dimethylimidazolidin-2-ylidene)phosphoramidate
  modified_base 11: mod_base = OTHER; note = 2-fluororibose adenine
  modified_base 12: mod_base = gm
  modified_base 13: mod_base = OTHER; note = 2-O-methylribose adenine
  modified_base 14: mod_base = OTHER; note = 2-fluororibose adenine
  modified_base 15: mod_base = cm
  modified_base 16: mod_base = OTHER; note = 2-fluororibose adenine
  modified_base 17: mod_base = cm
  modified_base 18: mod_base = um
  modified_base 19: mod_base = gm
  modified_base 20: mod_base = um
  modified_base 21: mod_base = um
  modified_base 21..22: mod_base = OTHER; note = S-phosphorothioate
  modified_base 22: mod_base = um
  modified_base 22..23: mod_base = OTHER; note = S-phosphorothioate
  modified_base 23: mod_base = um
  source 1..23: mol_type = other RNA
ttatagagcaagaacactgtttt

SEQ ID NO: 865 - RNA, 23 nt, synthetic construct
  misc_feature 1..23: note = Synthetic: SSR-0106650
  modified_base 1: mod_base = um
  modified_base 1..2: mod_base = OTHER; note = S-phosphorothioate
  modified_base 2: mod_base = OTHER; note = 2-fluororibose uracil
  modified_base 2..3: mod_base = OTHER; note = S-phosphorothioate
  modified_base 3: mod_base = OTHER; note = 2-O-methylribose adenine
  modified_base 3..4: mod_base = OTHER; note S-N-(1,3-dimethylimidazolidin-2-ylidene)phosphoramidate
  modified_base 4: mod_base = OTHER; note = S-propanetriol uracil
  modified_base 5: mod_base = OTHER; note = 2-O-methylribose adenine
  modified_base 6: mod_base = OTHER; note = 2-fluororibose guanine
  modified_base 7: mod_base = OTHER; note = 2-O-methylribose adenine
  modified_base 8: mod_base = gm
  modified_base 9: mod_base = cm
  modified_base 10: mod_base = OTHER; note = 2-O-methylribose adenine
  modified_base 10..11: mod_base = OTHER; note S-N-(1,3-dimethylimidazolidin-2-ylidene)phosphoramidate
  modified_base 11: mod_base = OTHER; note = 2-fluororibose adenine
  modified_base 12: mod_base = gm
  modified_base 13: mod_base = OTHER; note = 2-O-methylribose adenine
  modified_base 14: mod_base = OTHER; note = 2-fluororibose adenine
  modified_base 15: mod_base = cm
  modified_base 16: mod_base = OTHER; note = 2-fluororibose adenine
  modified_base 17: mod_base = cm
  modified_base 18: mod_base = um
  modified_base 19: mod_base = gm
  modified_base 20: mod_base = um
  modified_base 21: mod_base = um
  modified_base 21..22: mod_base = OTHER; note = S-phosphorothioate
  modified_base 22: mod_base = um
  modified_base 22..23: mod_base = OTHER; note = S-phosphorothioate
  modified_base 23: mod_base = um
  source 1..23: mol_type = other RNA
ttatagagcaagaacactgtttt

SEQ ID NO: 866 - RNA, 23 nt, synthetic construct
  misc_feature 1..23: note = Synthetic: SSR-0107361
  modified_base 1: mod_base = um
  modified_base 1..2: mod_base = OTHER; note = S-phosphorothioate
  modified_base 2: mod_base = OTHER; note = 2-fluororibose uracil
  modified_base 2..3: mod_base = OTHER; note = R-phosphorothioate
  modified_base 3: mod_base = OTHER; note = 2-O-methylribose adenine
  modified_base 3..4: mod_base = OTHER; note S-N-(1,3-dimethylimidazolidin-2-ylidene)phosphoramidate
  modified_base 4: mod_base = OTHER; note = 2-fluororibose uracil
  modified_base 5: mod_base = OTHER; note = 2-O-methylribose adenine
  modified_base 6: mod_base = OTHER; note = 2-fluororibose guanine
  modified_base 7: mod_base = OTHER; note = 2-O-methylribose adenine
  modified_base 8: mod_base = OTHER; note = S-propanetriol guanine
  modified_base 9: mod_base = cm
  modified_base 10: mod_base = OTHER; note = 2-O-methylribose adenine
  modified_base 10..11: mod_base = OTHER; note S-N-(1,3-dimethylimidazolidin-2-ylidene)phosphoramidate
  modified_base 11: mod_base = OTHER; note = 2-fluororibose adenine
  modified_base 12: mod_base = gm
  modified_base 13: mod_base = OTHER; note = 2-O-methylribose adenine
  modified_base 14: mod_base = OTHER; note = 2-fluororibose adenine
  modified_base 15: mod_base = cm
  modified_base 16: mod_base = OTHER; note = 2-fluororibose adenine
  modified_base 17: mod_base = cm
  modified_base 18: mod_base = um
  modified_base 19: mod_base = gm
  modified_base 20: mod_base = um
  modified_base 21: mod_base = um
  modified_base 21..22: mod_base = OTHER; note = S-phosphorothioate
  modified_base 22: mod_base = um
  modified_base 22..23: mod_base = OTHER; note = S-phosphorothioate
  modified_base 23: mod_base = um
  source 1..23: mol_type = other RNA
ttatagagcaagaacactgtttt

SEQ ID NO: 867 - RNA, 23 nt, synthetic construct
  misc_feature 1..23: note = Synthetic: SSR-0107362
  modified_base 1: mod_base = um
  modified_base 1..2: mod_base = OTHER; note = S-phosphorothioate
  modified_base 2: mod_base = OTHER; note = 2-fluororibose uracil
  modified_base 2..3: mod_base = OTHER; note = R-phosphorothioate
  modified_base 3: mod_base = OTHER; note = 2-O-methylribose adenine
  modified_base 3..4: mod_base = OTHER; note S-N-(1,3-dimethylimidazolidin-2-ylidene)phosphoramidate
  modified_base 4: mod_base = OTHER; note = 2-fluororibose uracil
  modified_base 5: mod_base = OTHER; note = 2-O-methylribose adenine
  modified_base 6: mod_base = OTHER; note = 2-fluororibose guanine
  modified_base 7: mod_base = OTHER; note = S-propanetriol adenine
  modified_base 8: mod_base = gm
  modified_base 9: mod_base = cm
  modified_base 10: mod_base = OTHER; note = 2-O-methylribose adenine
  modified_base 10..11: mod_base = OTHER; note S-N-(1,3-dimethylimidazolidin-2-ylidene)phosphoramidate
  modified_base 11: mod_base = OTHER; note = 2-fluororibose adenine
  modified_base 12: mod_base = gm
  modified_base 13: mod_base = OTHER; note = 2-O-methylribose adenine
  modified_base 14: mod_base = OTHER; note = 2-fluororibose adenine
  modified_base 15: mod_base = cm
  modified_base 16: mod_base = OTHER; note = 2-fluororibose adenine
  modified_base 17: mod_base = cm
  modified_base 18: mod_base = um
  modified_base 19: mod_base = gm
  modified_base 20: mod_base = um
  modified_base 21: mod_base = um
  modified_base 21..22: mod_base = OTHER; note = S-phosphorothioate
  modified_base 22: mod_base = um
  modified_base 22..23: mod_base = OTHER; note = S-phosphorothioate
  modified_base 23: mod_base = um
  source 1..23: mol_type = other RNA
ttatagagcaagaacactgtttt

SEQ ID NO: 868 - RNA, 23 nt, synthetic construct
  misc_feature 1..23: note = Synthetic: SSR-0107363
  modified_base 1: mod_base = um
  modified_base 1..2: mod_base = OTHER; note = S-phosphorothioate
  modified_base 2: mod_base = OTHER; note = 2-fluororibose uracil
  modified_base 2..3: mod_base = OTHER; note = R-phosphorothioate
  modified_base 3: mod_base = OTHER; note = 2-O-methylribose adenine
  modified_base 3..4: mod_base = OTHER; note S-N-(1,3-dimethylimidazolidin-2-ylidene)phosphoramidate
  modified_base 4: mod_base = OTHER; note = 2-fluororibose uracil
  modified_base 5: mod_base = OTHER; note = 2-O-methylribose adenine
  modified_base 6: mod_base = OTHER; note = S-propanetriol guanine
  modified_base 7: mod_base = OTHER; note = 2-O-methylribose adenine
  modified_base 8: mod_base = gm
  modified_base 9: mod_base = cm
  modified_base 10: mod_base = OTHER; note = 2-O-methylribose adenine
  modified_base 10..11: mod_base = OTHER; note S-N-(1,3-dimethylimidazolidin-2-ylidene)phosphoramidate
  modified_base 11: mod_base = OTHER; note = 2-fluororibose adenine
  modified_base 12: mod_base = gm
  modified_base 13: mod_base = OTHER; note = 2-O-methylribose adenine
  modified_base 14: mod_base = OTHER; note = 2-fluororibose adenine
  modified_base 15: mod_base = cm
  modified_base 16: mod_base = OTHER; note = 2-fluororibose adenine
  modified_base 17: mod_base = cm
  modified_base 18: mod_base = um
  modified_base 19: mod_base = gm
  modified_base 20: mod_base = um
  modified_base 21: mod_base = um
  modified_base 21..22: mod_base = OTHER; note = S-phosphorothioate
  modified_base 22: mod_base = um
  modified_base 22..23: mod_base = OTHER; note = S-phosphorothioate
  modified_base 23: mod_base = um
  source 1..23: mol_type = other RNA
ttatagagcaagaacactgtttt

SEQ ID NO: 869 - RNA, 23 nt, synthetic construct
  misc_feature 1..23: note = Synthetic: SSR-0107364
  modified_base 1: mod_base = um
  modified_base 1..2: mod_base = OTHER; note = S-phosphorothioate
  modified_base 2: mod_base = OTHER; note = 2-fluororibose uracil
  modified_base 2..3: mod_base = OTHER; note = R-phosphorothioate
  modified_base 3: mod_base = OTHER; note = 2-O-methylribose adenine
  modified_base 3..4: mod_base = OTHER; note S-N-(1,3-dimethylimidazolidin-2-ylidene)phosphoramidate
  modified_base 4: mod_base = OTHER; note = 2-fluororibose uracil
  modified_base 5: mod_base = OTHER; note = S-propanetriol adenine
  modified_base 6: mod_base = OTHER; note = 2-fluororibose guanine
  modified_base 7: mod_base = OTHER; note = 2-O-methylribose adenine
  modified_base 8: mod_base = gm
  modified_base 9: mod_base = cm
  modified_base 10: mod_base = OTHER; note = 2-O-methylribose adenine
  modified_base 10..11: mod_base = OTHER; note S-N-(1,3-dimethylimidazolidin-2-ylidene)phosphoramidate
  modified_base 11: mod_base = OTHER; note = 2-fluororibose adenine
  modified_base 12: mod_base = gm
  modified_base 13: mod_base = OTHER; note = 2-O-methylribose adenine
  modified_base 14: mod_base = OTHER; note = 2-fluororibose adenine
  modified_base 15: mod_base = cm
  modified_base 16: mod_base = OTHER; note = 2-fluororibose adenine
  modified_base 17: mod_base = cm
  modified_base 18: mod_base = um
  modified_base 19: mod_base = gm
  modified_base 20: mod_base = um
  modified_base 21: mod_base = um
  modified_base 21..22: mod_base = OTHER; note = S-phosphorothioate
  modified_base 22: mod_base = um
  modified_base 22..23: mod_base = OTHER; note = S-phosphorothioate
  modified_base 23: mod_base = um
  source 1..23: mol_type = other RNA
ttatagagcaagaacactgtttt

SEQ ID NO: 870 - RNA, 23 nt, synthetic construct
  misc_feature 1..23: note = Synthetic: SSR-0107416
  modified_base 1: mod_base = um
  modified_base 1..2: mod_base = OTHER; note = S-phosphorothioate
  modified_base 2: mod_base = OTHER; note = 2-fluororibose uracil
  modified_base 2..3: mod_base = OTHER; note = R-phosphorothioate
  modified_base 3: mod_base = OTHER; note = 2-O-methylribose adenine
  modified_base 3..4: mod_base = OTHER; note S-N-(1,3-dimethylimidazolidin-2-ylidene)phosphoramidate
  modified_base 4: mod_base = OTHER; note = S-propanetriol thymine
  modified_base 5: mod_base = OTHER; note = 2-O-methylribose adenine
  modified_base 6: mod_base = OTHER; note = 2-fluororibose guanine
  modified_base 7: mod_base = OTHER; note = 2-O-methylribose adenine
  modified_base 8: mod_base = gm
  modified_base 9: mod_base = cm
  modified_base 10: mod_base = OTHER; note = 2-O-methylribose adenine
  modified_base 10..11: mod_base = OTHER; note S-N-(1,3-dimethylimidazolidin-2-ylidene)phosphoramidate
  modified_base 11: mod_base = OTHER; note = 2-fluororibose adenine
  modified_base 12: mod_base = gm
  modified_base 13: mod_base = OTHER; note = 2-O-methylribose adenine
  modified_base 14: mod_base = OTHER; note = 2-fluororibose adenine
  modified_base 15: mod_base = cm
  modified_base 16: mod_base = OTHER; note = 2-fluororibose adenine
  modified_base 17: mod_base = cm
  modified_base 18: mod_base = um
  modified_base 19: mod_base = gm
  modified_base 20: mod_base = um
  modified_base 21: mod_base = um
  modified_base 21..22: mod_base = OTHER; note = S-phosphorothioate
  modified_base 22: mod_base = um
  modified_base 22..23: mod_base = OTHER; note = S-phosphorothioate
  modified_base 23: mod_base = um
  source 1..23: mol_type = other RNA
ttatagagcaagaacactgtttt

SEQ ID NO: 871 - RNA, 23 nt, synthetic construct
  modified_base 4: mod_base = OTHER; note = ribose thymine
  source 1..23: mol_type = other RNA
ttatagagcaagaacactgtttt

SEQ ID NO: 872 - RNA, 23 nt, synthetic construct
  misc_feature 1..23: note = Synthetic: SSR-0107366
  modified_base 1: mod_base = um
  modified_base 1..2: mod_base = OTHER; note = S-phosphorothioate
  modified_base 2: mod_base = OTHER; note = 2-fluororibose uracil
  modified_base 2..3: mod_base = OTHER; note = R-phosphorothioate
  modified_base 3: mod_base = OTHER; note = S-propanetriol adenine
  modified_base 3..4: mod_base = OTHER; note S-N-(1,3-dimethylimidazolidin-2-ylidene)phosphoramidate
  modified_base 4: mod_base = OTHER; note = 2-fluororibose uracil
  modified_base 5: mod_base = OTHER; note = 2-O-methylribose adenine
  modified_base 6: mod_base = OTHER; note = 2-fluororibose guanine
  modified_base 7: mod_base = OTHER; note = 2-O-methylribose adenine
  modified_base 8: mod_base = gm
  modified_base 9: mod_base = cm
  modified_base 10: mod_base = OTHER; note = 2-O-methylribose adenine
  modified_base 10..11: mod_base = OTHER; note S-N-(1,3-dimethylimidazolidin-2-ylidene)phosphoramidate
  modified_base 11: mod_base = OTHER; note = 2-fluororibose adenine
  modified_base 12: mod_base = gm
  modified_base 13: mod_base = OTHER; note = 2-O-methylribose adenine
  modified_base 14: mod_base = OTHER; note = 2-fluororibose adenine
  modified_base 15: mod_base = cm
  modified_base 16: mod_base = OTHER; note = 2-fluororibose adenine
  modified_base 17: mod_base = cm
  modified_base 18: mod_base = um
  modified_base 19: mod_base = gm
  modified_base 20: mod_base = um
  modified_base 21: mod_base = um
  modified_base 21..22: mod_base = OTHER; note = S-phosphorothioate
  modified_base 22: mod_base = um
  modified_base 22..23: mod_base = OTHER; note = S-phosphorothioate
  modified_base 23: mod_base = um
  source 1..23: mol_type = other RNA
ttatagagcaagaacactgtttt

SEQ ID NO: 873 - RNA, 23 nt, synthetic construct
  misc_feature 1..23: note = Synthetic: SSR-0107417
  modified_base 1: mod_base = um
  modified_base 1..2: mod_base = OTHER; note = S-phosphorothioate
  modified_base 2: mod_base = OTHER; note = S-propanetriol thymine
  modified_base 2..3: mod_base = OTHER; note = R-phosphorothioate
  modified_base 3: mod_base = OTHER; note = 2-O-methylribose adenine
  modified_base 3..4: mod_base = OTHER; note S-N-(1,3-dimethylimidazolidin-2-ylidene)phosphoramidate
  modified_base 4: mod_base = OTHER; note = 2-fluororibose uracil
  modified_base 5: mod_base = OTHER; note = 2-O-methylribose adenine
  modified_base 6: mod_base = OTHER; note = 2-fluororibose guanine
  modified_base 7: mod_base = OTHER; note = 2-O-methylribose adenine
  modified_base 8: mod_base = gm
  modified_base 9: mod_base = cm
  modified_base 10: mod_base = OTHER; note = 2-O-methylribose adenine
  modified_base 10..11: mod_base = OTHER; note S-N-(1,3-dimethylimidazolidin-2-ylidene)phosphoramidate
  modified_base 11: mod_base = OTHER; note = 2-fluororibose adenine
  modified_base 12: mod_base = gm
  modified_base 13: mod_base = OTHER; note = 2-O-methylribose adenine
  modified_base 14: mod_base = OTHER; note = 2-fluororibose adenine
  modified_base 15: mod_base = cm
  modified_base 16: mod_base = OTHER; note = 2-fluororibose adenine
  modified_base 17: mod_base = cm
  modified_base 18: mod_base = um
  modified_base 19: mod_base = gm
  modified_base 20: mod_base = um
  modified_base 21: mod_base = um
  modified_base 21..22: mod_base = OTHER; note = S-phosphorothioate
  modified_base 22: mod_base = um
  modified_base 22..23: mod_base = OTHER; note = S-phosphorothioate
  modified_base 23: mod_base = um
  source 1..23: mol_type = other RNA
ttatagagcaagaacactgtttt

SEQ ID NO: 874 - RNA, 23 nt, synthetic construct
  modified_base 2: mod_base = OTHER; note = ribose thymine
  source 1..23: mol_type = other RNA
ttatagagcaagaacactgtttt

SEQ ID NO: 875 - RNA, 23 nt, synthetic construct
  misc_feature 1..23: note = Synthetic: SSR-0107418
  modified_base 1: mod_base = OTHER; note = S-propanetriol thymine
  modified_base 1..2: mod_base = OTHER; note = S-phosphorothioate
  modified_base 2: mod_base = OTHER; note = 2-fluororibose uracil
  modified_base 2..3: mod_base = OTHER; note = R-phosphorothioate
  modified_base 3: mod_base = OTHER; note = 2-O-methylribose adenine
  modified_base 3..4: mod_base = OTHER; note S-N-(1,3-dimethylimidazolidin-2-ylidene)phosphoramidate
  modified_base 4: mod_base = OTHER; note = 2-fluororibose uracil
  modified_base 5: mod_base = OTHER; note = 2-O-methylribose adenine
  modified_base 6: mod_base = OTHER; note = 2-fluororibose guanine
  modified_base 7: mod_base = OTHER; note = 2-O-methylribose adenine
  modified_base 8: mod_base = gm
  modified_base 9: mod_base = cm
  modified_base 10: mod_base = OTHER; note = 2-O-methylribose adenine
  modified_base 10..11: mod_base = OTHER; note S-N-(1,3-dimethylimidazolidin-2-ylidene)phosphoramidate
  modified_base 11: mod_base = OTHER; note = 2-fluororibose adenine
  modified_base 12: mod_base = gm
  modified_base 13: mod_base = OTHER; note = 2-O-methylribose adenine
  modified_base 14: mod_base = OTHER; note = 2-fluororibose adenine
  modified_base 15: mod_base = cm
  modified_base 16: mod_base = OTHER; note = 2-fluororibose adenine
  modified_base 17: mod_base = cm
  modified_base 18: mod_base = um
  modified_base 19: mod_base = gm
  modified_base 20: mod_base = um
  modified_base 21: mod_base = um
  modified_base 21..22: mod_base = OTHER; note = S-phosphorothioate
  modified_base 22: mod_base = um
  modified_base 22..23: mod_base = OTHER; note = S-phosphorothioate
  modified_base 23: mod_base = um
  source 1..23: mol_type = other RNA
ttatagagcaagaacactgtttt

SEQ ID NO: 876 - RNA, 23 nt, synthetic construct
  misc_feature 1..23: note = Synthetic: SSR-0107369
  modified_base 1: mod_base = um
  modified_base 1..2: mod_base = OTHER; note = S-phosphorothioate
  modified_base 2: mod_base = OTHER; note = 2-fluororibose uracil
  modified_base 2..3: mod_base = OTHER; note = R-phosphorothioate
  modified_base 3: mod_base = OTHER; note = 2-O-methylribose adenine
  modified_base 3..4: mod_base = OTHER; note S-N-(1,3-dimethylimidazolidin-2-ylidene)phosphoramidate
  modified_base 4: mod_base = OTHER; note = 2-fluororibose uracil
  modified_base 5: mod_base = OTHER; note = 2-O-methylribose adenine
  modified_base 6: mod_base = OTHER; note = 2-fluororibose guanine
  modified_base 7: mod_base = OTHER; note = 2-O-methylribose adenine
  modified_base 8: mod_base = OTHER; note = deoxyribose guanine
  modified_base 9: mod_base = cm
  modified_base 10: mod_base = OTHER; note = 2-O-methylribose adenine
  modified_base 10..11: mod_base = OTHER; note S-N-(1,3-dimethylimidazolidin-2-ylidene)phosphoramidate
  modified_base 11: mod_base = OTHER; note = 2-fluororibose adenine
  modified_base 12: mod_base = gm
  modified_base 13: mod_base = OTHER; note = 2-O-methylribose adenine
  modified_base 14: mod_base = OTHER; note = 2-fluororibose adenine
  modified_base 15: mod_base = cm
  modified_base 16: mod_base = OTHER; note = 2-fluororibose adenine
  modified_base 17: mod_base = cm
  modified_base 18: mod_base = um
  modified_base 19: mod_base = gm
  modified_base 20: mod_base = um
  modified_base 21: mod_base = um
  modified_base 21..22: mod_base = OTHER; note = S-phosphorothioate
  modified_base 22: mod_base = um
  modified_base 22..23: mod_base = OTHER; note = S-phosphorothioate
  modified_base 23: mod_base = um
  source 1..23: mol_type = other RNA
ttatagagcaagaacactgtttt

SEQ ID NO: 877 - RNA, 23 nt, synthetic construct
  misc_feature 1..23: note = Synthetic: SSR-0107370
  modified_base 1: mod_base = um
  modified_base 1..2: mod_base = OTHER; note = S-phosphorothioate
  modified_base 2: mod_base = OTHER; note = 2-fluororibose uracil
  modified_base 2..3: mod_base = OTHER; note = R-phosphorothioate
  modified_base 3: mod_base = OTHER; note = 2-O-methylribose adenine
  modified_base 3..4: mod_base = OTHER; note S-N-(1,3-dimethylimidazolidin-2-ylidene)phosphoramidate
  modified_base 4: mod_base = OTHER; note = 2-fluororibose uracil
  modified_base 5: mod_base = OTHER; note = 2-O-methylribose adenine
  modified_base 6: mod_base = OTHER; note = 2-fluororibose guanine
  modified_base 7: mod_base = OTHER; note = deoxyribose adenine
  modified_base 8: mod_base = gm
  modified_base 9: mod_base = cm
  modified_base 10: mod_base = OTHER; note = 2-O-methylribose adenine
  modified_base 10..11: mod_base = OTHER; note S-N-(1,3-dimethylimidazolidin-2-ylidene)phosphoramidate
  modified_base 11: mod_base = OTHER; note = 2-fluororibose adenine
  modified_base 12: mod_base = gm
  modified_base 13: mod_base = OTHER; note = 2-O-methylribose adenine
  modified_base 14: mod_base = OTHER; note = 2-fluororibose adenine
  modified_base 15: mod_base = cm
  modified_base 16: mod_base = OTHER; note = 2-fluororibose adenine
  modified_base 17: mod_base = cm
  modified_base 18: mod_base = um
  modified_base 19: mod_base = gm
  modified_base 20: mod_base = um
  modified_base 21: mod_base = um
  modified_base 21..22: mod_base = OTHER; note = S-phosphorothioate
  modified_base 22: mod_base = um
  modified_base 22..23: mod_base = OTHER; note = S-phosphorothioate
  modified_base 23: mod_base = um
  source 1..23: mol_type = other RNA
ttatagagcaagaacactgtttt

SEQ ID NO: 878 - RNA, 23 nt, synthetic construct
  misc_feature 1..23: note = Synthetic: SSR-0107371
  modified_base 1: mod_base = um
  modified_base 1..2: mod_base = OTHER; note = S-phosphorothioate
  modified_base 2: mod_base = OTHER; note = 2-fluororibose uracil
  modified_base 2..3: mod_base = OTHER; note = R-phosphorothioate
  modified_base 3: mod_base = OTHER; note = 2-O-methylribose adenine
  modified_base 3..4: mod_base = OTHER; note S-N-(1,3-dimethylimidazolidin-2-ylidene)phosphoramidate
  modified_base 4: mod_base = OTHER; note = 2-fluororibose uracil
  modified_base 5: mod_base = OTHER; note = 2-O-methylribose adenine
  modified_base 6: mod_base = OTHER; note = deoxyribose guanine
  modified_base 7: mod_base = OTHER; note = 2-O-methylribose adenine
  modified_base 8: mod_base = gm
  modified_base 9: mod_base = cm
  modified_base 10: mod_base = OTHER; note = 2-O-methylribose adenine
  modified_base 10..11: mod_base = OTHER; note S-N-(1,3-dimethylimidazolidin-2-ylidene)phosphoramidate
  modified_base 11: mod_base = OTHER; note = 2-fluororibose adenine
  modified_base 12: mod_base = gm
  modified_base 13: mod_base = OTHER; note = 2-O-methylribose adenine
  modified_base 14: mod_base = OTHER; note = 2-fluororibose adenine
  modified_base 15: mod_base = cm
  modified_base 16: mod_base = OTHER; note = 2-fluororibose adenine
  modified_base 17: mod_base = cm
  modified_base 18: mod_base = um
  modified_base 19: mod_base = gm
  modified_base 20: mod_base = um
  modified_base 21: mod_base = um
  modified_base 21..22: mod_base = OTHER; note = S-phosphorothioate
  modified_base 22: mod_base = um
  modified_base 22..23: mod_base = OTHER; note = S-phosphorothioate
  modified_base 23: mod_base = um
  source 1..23: mol_type = other RNA
ttatagagcaagaacactgtttt

SEQ ID NO: 879 - RNA, 23 nt, synthetic construct
  misc_feature 1..23: note = Synthetic: SSR-0107372
  modified_base 1: mod_base = um
  modified_base 1..2: mod_base = OTHER; note = S-phosphorothioate
  modified_base 2: mod_base = OTHER; note = 2-fluororibose uracil
  modified_base 2..3: mod_base = OTHER; note = R-phosphorothioate
  modified_base 3: mod_base = OTHER; note = 2-O-methylribose adenine
  modified_base 3..4: mod_base = OTHER; note S-N-(1,3-dimethylimidazolidin-2-ylidene)phosphoramidate
  modified_base 4: mod_base = OTHER; note = 2-fluororibose uracil
  modified_base 5: mod_base = OTHER; note = deoxyribose adenine
  modified_base 6: mod_base = OTHER; note = 2-fluororibose guanine
  modified_base 7: mod_base = OTHER; note = 2-O-methylribose adenine
  modified_base 8: mod_base = gm
  modified_base 9: mod_base = cm
  modified_base 10: mod_base = OTHER; note = 2-O-methylribose adenine
  modified_base 10..11: mod_base = OTHER; note S-N-(1,3-dimethylimidazolidin-2-ylidene)phosphoramidate
  modified_base 11: mod_base = OTHER; note = 2-fluororibose adenine
  modified_base 12: mod_base = gm
  modified_base 13: mod_base = OTHER; note = 2-O-methylribose adenine
  modified_base 14: mod_base = OTHER; note = 2-fluororibose adenine
  modified_base 15: mod_base = cm
  modified_base 16: mod_base = OTHER; note = 2-fluororibose adenine
  modified_base 17: mod_base = cm
  modified_base 18: mod_base = um
  modified_base 19: mod_base = gm
  modified_base 20: mod_base = um
  modified_base 21: mod_base = um
  modified_base 21..22: mod_base = OTHER; note = S-phosphorothioate
  modified_base 22: mod_base = um
  modified_base 22..23: mod_base = OTHER; note = S-phosphorothioate
  modified_base 23: mod_base = um
  source 1..23: mol_type = other RNA
ttatagagcaagaacactgtttt

SEQ ID NO: 880 - RNA, 23 nt, synthetic construct
  misc_feature 1..23: note = Synthetic: SSR-0107373
  modified_base 1: mod_base = um
  modified_base 1..2: mod_base = OTHER; note = S-phosphorothioate
  modified_base 2: mod_base = OTHER; note = 2-fluororibose uracil
  modified_base 2..3: mod_base = OTHER; note = R-phosphorothioate
  modified_base 3: mod_base = OTHER; note = 2-O-methylribose adenine
  modified_base 3..4: mod_base = OTHER; note S-N-(1,3-dimethylimidazolidin-2-ylidene)phosphoramidate
  modified_base 4: mod_base = OTHER; note = deoxyribose thymine
  modified_base 5: mod_base = OTHER; note = 2-O-methylribose adenine
  modified_base 6: mod_base = OTHER; note = 2-fluororibose guanine
  modified_base 7: mod_base = OTHER; note = 2-O-methylribose adenine
  modified_base 8: mod_base = gm
  modified_base 9: mod_base = cm
  modified_base 10: mod_base = OTHER; note = 2-O-methylribose adenine
  modified_base 10..11: mod_base = OTHER; note S-N-(1,3-dimethylimidazolidin-2-ylidene)phosphoramidate
  modified_base 11: mod_base = OTHER; note = 2-fluororibose adenine
  modified_base 12: mod_base = gm
  modified_base 13: mod_base = OTHER; note = 2-O-methylribose adenine
  modified_base 14: mod_base = OTHER; note = 2-fluororibose adenine
  modified_base 15: mod_base = cm
  modified_base 16: mod_base = OTHER; note = 2-fluororibose adenine
  modified_base 17: mod_base = cm
  modified_base 18: mod_base = um
  modified_base 19: mod_base = gm
  modified_base 20: mod_base = um
  modified_base 21: mod_base = um
  modified_base 21..22: mod_base = OTHER; note = S-phosphorothioate
  modified_base 22: mod_base = um
  modified_base 22..23: mod_base = OTHER; note = S-phosphorothioate
  modified_base 23: mod_base = um
  source 1..23: mol_type = other RNA
ttatagagcaagaacactgtttt

SEQ ID NO: 881 - RNA, 23 nt, synthetic construct
  misc_feature 1..23: note = Synthetic: SSR-0107374
  modified_base 1: mod_base = um
  modified_base 1..2: mod_base = OTHER; note = S-phosphorothioate
  modified_base 2: mod_base = OTHER; note = 2-fluororibose uracil
  modified_base 2..3: mod_base = OTHER; note = R-phosphorothioate
  modified_base 3: mod_base = OTHER; note = deoxyribose adenine
  modified_base 3..4: mod_base = OTHER; note S-N-(1,3-dimethylimidazolidin-2-ylidene)phosphoramidate
  modified_base 4: mod_base = OTHER; note = 2-fluororibose uracil
  modified_base 5: mod_base = OTHER; note = 2-O-methylribose adenine
  modified_base 6: mod_base = OTHER; note = 2-fluororibose guanine
  modified_base 7: mod_base = OTHER; note = 2-O-methylribose adenine
  modified_base 8: mod_base = gm
  modified_base 9: mod_base = cm
  modified_base 10: mod_base = OTHER; note = 2-O-methylribose adenine
  modified_base 10..11: mod_base = OTHER; note S-N-(1,3-dimethylimidazolidin-2-ylidene)phosphoramidate
  modified_base 11: mod_base = OTHER; note = 2-fluororibose adenine
  modified_base 12: mod_base = gm
  modified_base 13: mod_base = OTHER; note = 2-O-methylribose adenine
  modified_base 14: mod_base = OTHER; note = 2-fluororibose adenine
  modified_base 15: mod_base = cm
  modified_base 16: mod_base = OTHER; note = 2-fluororibose adenine
  modified_base 17: mod_base = cm
  modified_base 18: mod_base = um
  modified_base 19: mod_base = gm
  modified_base 20: mod_base = um
  modified_base 21: mod_base = um
  modified_base 21..22: mod_base = OTHER; note = S-phosphorothioate
  modified_base 22: mod_base = um
  modified_base 22..23: mod_base = OTHER; note = S-phosphorothioate
  modified_base 23: mod_base = um
  source 1..23: mol_type = other RNA
ttatagagcaagaacactgtttt

SEQ ID NO: 882 - RNA, 23 nt, synthetic construct
  misc_feature 1..23: note = Synthetic: SSR-0107375
  modified_base 1: mod_base = um
  modified_base 1..2: mod_base = OTHER; note = S-phosphorothioate
  modified_base 2: mod_base = OTHER; note = deoxyribose thymine
  modified_base 2..3: mod_base = OTHER; note = R-phosphorothioate
  modified_base 3: mod_base = OTHER; note = 2-O-methylribose adenine
  modified_base 3..4: mod_base = OTHER; note S-N-(1,3-dimethylimidazolidin-2-ylidene)phosphoramidate
  modified_base 4: mod_base = OTHER; note = 2-fluororibose uracil
  modified_base 5: mod_base = OTHER; note = 2-O-methylribose adenine
  modified_base 6: mod_base = OTHER; note = 2-fluororibose guanine
  modified_base 7: mod_base = OTHER; note = 2-O-methylribose adenine
  modified_base 8: mod_base = gm
  modified_base 9: mod_base = cm
  modified_base 10: mod_base = OTHER; note = 2-O-methylribose adenine
  modified_base 10..11: mod_base = OTHER; note S-N-(1,3-dimethylimidazolidin-2-ylidene)phosphoramidate
  modified_base 11: mod_base = OTHER; note = 2-fluororibose adenine
  modified_base 12: mod_base = gm
  modified_base 13: mod_base = OTHER; note = 2-O-methylribose adenine
  modified_base 14: mod_base = OTHER; note = 2-fluororibose adenine
  modified_base 15: mod_base = cm
  modified_base 16: mod_base = OTHER; note = 2-fluororibose adenine
  modified_base 17: mod_base = cm
  modified_base 18: mod_base = um
  modified_base 19: mod_base = gm
  modified_base 20: mod_base = um
  modified_base 21: mod_base = um
  modified_base 21..22: mod_base = OTHER; note = S-phosphorothioate
  modified_base 22: mod_base = um
  modified_base 22..23: mod_base = OTHER; note = S-phosphorothioate
  modified_base 23: mod_base = um
  source 1..23: mol_type = other RNA
ttatagagcaagaacactgtttt

SEQ ID NO: 883 - RNA, 23 nt, synthetic construct
  misc_feature 1..23: note = Synthetic: SSR-0107376
  modified_base 1: mod_base = OTHER; note = deoxyribose thymine
  modified_base 1..2: mod_base = OTHER; note = S-phosphorothioate
  modified_base 2: mod_base = OTHER; note = 2-fluororibose uracil
  modified_base 2..3: mod_base = OTHER; note = R-phosphorothioate
  modified_base 3: mod_base = OTHER; note = 2-O-methylribose adenine
  modified_base 3..4: mod_base = OTHER; note S-N-(1,3-dimethylimidazolidin-2-ylidene)phosphoramidate
  modified_base 4: mod_base = OTHER; note = 2-fluororibose uracil
  modified_base 5: mod_base = OTHER; note = 2-O-methylribose adenine
  modified_base 6: mod_base = OTHER; note = 2-fluororibose guanine
  modified_base 7: mod_base = OTHER; note = 2-O-methylribose adenine
  modified_base 8: mod_base = gm
  modified_base 9: mod_base = cm
  modified_base 10: mod_base = OTHER; note = 2-O-methylribose adenine
  modified_base 10..11: mod_base = OTHER; note S-N-(1,3-dimethylimidazolidin-2-ylidene)phosphoramidate
  modified_base 11: mod_base = OTHER; note = 2-fluororibose adenine
  modified_base 12: mod_base = gm
  modified_base 13: mod_base = OTHER; note = 2-O-methylribose adenine
  modified_base 14: mod_base = OTHER; note = 2-fluororibose adenine
  modified_base 15: mod_base = cm
  modified_base 16: mod_base = OTHER; note = 2-fluororibose adenine
  modified_base 17: mod_base = cm
  modified_base 18: mod_base = um
  modified_base 19: mod_base = gm
  modified_base 20: mod_base = um
  modified_base 21: mod_base = um
  modified_base 21..22: mod_base = OTHER; note = S-phosphorothioate
  modified_base 22: mod_base = um
  modified_base 22..23: mod_base = OTHER; note = S-phosphorothioate
  modified_base 23: mod_base = um
  source 1..23: mol_type = other RNA
ttatagagcaagaacactgtttt

SEQ ID NO: 884 - RNA, 23 nt, synthetic construct
  misc_feature 1..23: note = Synthetic: SSR-0107377
  modified_base 1: mod_base = um
  modified_base 1..2: mod_base = OTHER; note = S-phosphorothioate
  modified_base 2: mod_base = OTHER; note = 2-fluororibose uracil
  modified_base 2..3: mod_base = OTHER; note = R-phosphorothioate
  modified_base 3: mod_base = OTHER; note = 2-O-methylribose adenine
  modified_base 3..4: mod_base = OTHER; note S-N-(1,3-dimethylimidazolidin-2-ylidene)phosphoramidate
  modified_base 4: mod_base = OTHER; note = 2-fluororibose uracil
  modified_base 5: mod_base = OTHER; note = 2-O-methylribose adenine
  modified_base 6: mod_base = OTHER; note = 2-fluororibose guanine
  modified_base 7: mod_base = OTHER; note = 2-O-methylribose adenine
  modified_base 8: mod_base = OTHER; note = 2-O-methoxyethylribose guanine
  modified_base 9: mod_base = cm
  modified_base 10: mod_base = OTHER; note = 2-O-methylribose adenine
  modified_base 10..11: mod_base = OTHER; note S-N-(1,3-dimethylimidazolidin-2-ylidene)phosphoramidate
  modified_base 11: mod_base = OTHER; note = 2-fluororibose adenine
  modified_base 12: mod_base = gm
  modified_base 13: mod_base = OTHER; note = 2-O-methylribose adenine
  modified_base 14: mod_base = OTHER; note = 2-fluororibose adenine
  modified_base 15: mod_base = cm
  modified_base 16: mod_base = OTHER; note = 2-fluororibose adenine
  modified_base 17: mod_base = cm
  modified_base 18: mod_base = um
  modified_base 19: mod_base = gm
  modified_base 20: mod_base = um
  modified_base 21: mod_base = um
  modified_base 21..22: mod_base = OTHER; note = S-phosphorothioate
  modified_base 22: mod_base = um
  modified_base 22..23: mod_base = OTHER; note = S-phosphorothioate
  modified_base 23: mod_base = um
  source 1..23: mol_type = other RNA
ttatagagcaagaacactgtttt

SEQ ID NO: 885 - RNA, 23 nt, synthetic construct
  misc_feature 1..23: note = Synthetic: SSR-0107378
  modified_base 1: mod_base = um
  modified_base 1..2: mod_base = OTHER; note = S-phosphorothioate
  modified_base 2: mod_base = OTHER; note = 2-fluororibose uracil
  modified_base 2..3: mod_base = OTHER; note = R-phosphorothioate
  modified_base 3: mod_base = OTHER; note = 2-O-methylribose adenine
  modified_base 3..4: mod_base = OTHER; note S-N-(1,3-dimethylimidazolidin-2-ylidene)phosphoramidate
  modified_base 4: mod_base = OTHER; note = 2-fluororibose uracil
  modified_base 5: mod_base = OTHER; note = 2-O-methylribose adenine
  modified_base 6: mod_base = OTHER; note = 2-fluororibose guanine
  modified_base 7: mod_base = OTHER; note = 2-O-methoxyethylribose adenine
  modified_base 8: mod_base = gm
  modified_base 9: mod_base = cm
  modified_base 10: mod_base = OTHER; note = 2-O-methylribose adenine
  modified_base 10..11: mod_base = OTHER; note S-N-(1,3-dimethylimidazolidin-2-ylidene)phosphoramidate
  modified_base 11: mod_base = OTHER; note = 2-fluororibose adenine
  modified_base 12: mod_base = gm
  modified_base 13: mod_base = OTHER; note = 2-O-methylribose adenine
  modified_base 14: mod_base = OTHER; note = 2-fluororibose adenine
  modified_base 15: mod_base = cm
  modified_base 16: mod_base = OTHER; note = 2-fluororibose adenine
  modified_base 17: mod_base = cm
  modified_base 18: mod_base = um
  modified_base 19: mod_base = gm
  modified_base 20: mod_base = um
  modified_base 21: mod_base = um
  modified_base 21..22: mod_base = OTHER; note = S-phosphorothioate
  modified_base 22: mod_base = um
  modified_base 22..23: mod_base = OTHER; note = S-phosphorothioate
  modified_base 23: mod_base = um
  source 1..23: mol_type = other RNA
ttatagagcaagaacactgtttt

SEQ ID NO: 886 - RNA, 23 nt, synthetic construct
  misc_feature 1..23: note = Synthetic: SSR-0107379
  modified_base 1: mod_base = um
  modified_base 1..2: mod_base = OTHER; note = S-phosphorothioate
  modified_base 2: mod_base = OTHER; note = 2-fluororibose uracil
  modified_base 2..3: mod_base = OTHER; note = R-phosphorothioate
  modified_base 3: mod_base = OTHER; note = 2-O-methylribose adenine
  modified_base 3..4: mod_base = OTHER; note S-N-(1,3-dimethylimidazolidin-2-ylidene)phosphoramidate
  modified_base 4: mod_base = OTHER; note = 2-fluororibose uracil
  modified_base 5: mod_base = OTHER; note = 2-O-methylribose adenine
  modified_base 6: mod_base = OTHER; note = 2-O-methoxyethylribose guanine
  modified_base 7: mod_base = OTHER; note = 2-O-methylribose adenine
  modified_base 8: mod_base = gm
  modified_base 9: mod_base = cm
  modified_base 10: mod_base = OTHER; note = 2-O-methylribose adenine
  modified_base 10..11: mod_base = OTHER; note S-N-(1,3-dimethylimidazolidin-2-ylidene)phosphoramidate
  modified_base 11: mod_base = OTHER; note = 2-fluororibose adenine
  modified_base 12: mod_base = gm
  modified_base 13: mod_base = OTHER; note = 2-O-methylribose adenine
  modified_base 14: mod_base = OTHER; note = 2-fluororibose adenine
  modified_base 15: mod_base = cm
  modified_base 16: mod_base = OTHER; note = 2-fluororibose adenine
  modified_base 17: mod_base = cm
  modified_base 18: mod_base = um
  modified_base 19: mod_base = gm
  modified_base 20: mod_base = um
  modified_base 21: mod_base = um
  modified_base 21..22: mod_base = OTHER; note = S-phosphorothioate
  modified_base 22: mod_base = um
  modified_base 22..23: mod_base = OTHER; note = S-phosphorothioate
  modified_base 23: mod_base = um
  source 1..23: mol_type = other RNA
ttatagagcaagaacactgtttt

SEQ ID NO: 887 - RNA, 23 nt, synthetic construct
  misc_feature 1..23: note = Synthetic: SSR-0107380
  modified_base 1: mod_base = um
  modified_base 1..2: mod_base = OTHER; note = S-phosphorothioate
  modified_base 2: mod_base = OTHER; note = 2-fluororibose uracil
  modified_base 2..3: mod_base = OTHER; note = R-phosphorothioate
  modified_base 3: mod_base = OTHER; note = 2-O-methylribose adenine
  modified_base 3..4: mod_base = OTHER; note S-N-(1,3-dimethylimidazolidin-2-ylidene)phosphoramidate
  modified_base 4: mod_base = OTHER; note = 2-fluororibose uracil
  modified_base 5: mod_base = OTHER; note = 2-O-methoxyethylribose adenine
  modified_base 6: mod_base = OTHER; note = 2-fluororibose guanine
  modified_base 7: mod_base = OTHER; note = 2-O-methylribose adenine
  modified_base 8: mod_base = gm
  modified_base 9: mod_base = cm
  modified_base 10: mod_base = OTHER; note = 2-O-methylribose adenine
  modified_base 10..11: mod_base = OTHER; note S-N-(1,3-dimethylimidazolidin-2-ylidene)phosphoramidate
  modified_base 11: mod_base = OTHER; note = 2-fluororibose adenine
  modified_base 12: mod_base = gm
  modified_base 13: mod_base = OTHER; note = 2-O-methylribose adenine
  modified_base 14: mod_base = OTHER; note = 2-fluororibose adenine
  modified_base 15: mod_base = cm
  modified_base 16: mod_base = OTHER; note = 2-fluororibose adenine
  modified_base 17: mod_base = cm
  modified_base 18: mod_base = um
  modified_base 19: mod_base = gm
  modified_base 20: mod_base = um
  modified_base 21: mod_base = um
  modified_base 21..22: mod_base = OTHER; note = S-phosphorothioate
  modified_base 22: mod_base = um
  modified_base 22..23: mod_base = OTHER; note = S-phosphorothioate
  modified_base 23: mod_base = um
  source 1..23: mol_type = other RNA
ttatagagcaagaacactgtttt

SEQ ID NO: 888 - RNA, 23 nt, synthetic construct
  misc_feature 1..23: note = Synthetic: SSR-0107381
  modified_base 1: mod_base = um
  modified_base 1..2: mod_base = OTHER; note = S-phosphorothioate
  modified_base 2: mod_base = OTHER; note = 2-fluororibose uracil
  modified_base 2..3: mod_base = OTHER; note = R-phosphorothioate
  modified_base 3: mod_base = OTHER; note = 2-O-methylribose adenine
  modified_base 3..4: mod_base = OTHER; note S-N-(1,3-dimethylimidazolidin-2-ylidene)phosphoramidate
  modified_base 4: mod_base = OTHER; note = 2-O-methoxyethylribose thymine
  modified_base 5: mod_base = OTHER; note = 2-O-methylribose adenine
  modified_base 6: mod_base = OTHER; note = 2-fluororibose guanine
  modified_base 7: mod_base = OTHER; note = 2-O-methylribose adenine
  modified_base 8: mod_base = gm
  modified_base 9: mod_base = cm
  modified_base 10: mod_base = OTHER; note = 2-O-methylribose adenine
  modified_base 10..11: mod_base = OTHER; note S-N-(1,3-dimethylimidazolidin-2-ylidene)phosphoramidate
  modified_base 11: mod_base = OTHER; note = 2-fluororibose adenine
  modified_base 12: mod_base = gm
  modified_base 13: mod_base = OTHER; note = 2-O-methylribose adenine
  modified_base 14: mod_base = OTHER; note = 2-fluororibose adenine
  modified_base 15: mod_base = cm
  modified_base 16: mod_base = OTHER; note = 2-fluororibose adenine
  modified_base 17: mod_base = cm
  modified_base 18: mod_base = um
  modified_base 19: mod_base = gm
  modified_base 20: mod_base = um
  modified_base 21: mod_base = um
  modified_base 21..22: mod_base = OTHER; note = S-phosphorothioate
  modified_base 22: mod_base = um
  modified_base 22..23: mod_base = OTHER; note = S-phosphorothioate
  modified_base 23: mod_base = um
  source 1..23: mol_type = other RNA
ttatagagcaagaacactgtttt

SEQ ID NO: 889 - RNA, 23 nt, synthetic construct
  misc_feature 1..23: note = Synthetic: SSR-0107382
  modified_base 1: mod_base = um
  modified_base 1..2: mod_base = OTHER; note = S-phosphorothioate
  modified_base 2: mod_base = OTHER; note = 2-fluororibose uracil
  modified_base 2..3: mod_base = OTHER; note = R-phosphorothioate
  modified_base 3: mod_base = OTHER; note = 2-O-methoxyethylribose adenine
  modified_base 3..4: mod_base = OTHER; note S-N-(1,3-dimethylimidazolidin-2-ylidene)phosphoramidate
  modified_base 4: mod_base = OTHER; note = 2-fluororibose uracil
  modified_base 5: mod_base = OTHER; note = 2-O-methylribose adenine
  modified_base 6: mod_base = OTHER; note = 2-fluororibose guanine
  modified_base 7: mod_base = OTHER; note = 2-O-methylribose adenine
  modified_base 8: mod_base = gm
  modified_base 9: mod_base = cm
  modified_base 10: mod_base = OTHER; note = 2-O-methylribose adenine
  modified_base 10..11: mod_base = OTHER; note S-N-(1,3-dimethylimidazolidin-2-ylidene)phosphoramidate
  modified_base 11: mod_base = OTHER; note = 2-fluororibose adenine
  modified_base 12: mod_base = gm
  modified_base 13: mod_base = OTHER; note = 2-O-methylribose adenine
  modified_base 14: mod_base = OTHER; note = 2-fluororibose adenine
  modified_base 15: mod_base = cm
  modified_base 16: mod_base = OTHER; note = 2-fluororibose adenine
  modified_base 17: mod_base = cm
  modified_base 18: mod_base = um
  modified_base 19: mod_base = gm
  modified_base 20: mod_base = um
  modified_base 21: mod_base = um
  modified_base 21..22: mod_base = OTHER; note = S-phosphorothioate
  modified_base 22: mod_base = um
  modified_base 22..23: mod_base = OTHER; note = S-phosphorothioate
  modified_base 23: mod_base = um
  source 1..23: mol_type = other RNA
ttatagagcaagaacactgtttt

SEQ ID NO: 890 - RNA, 23 nt, synthetic construct
  misc_feature 1..23: note = Synthetic: SSR-0107383
  modified_base 1: mod_base = um
  modified_base 1..2: mod_base = OTHER; note = S-phosphorothioate
  modified_base 2: mod_base = OTHER; note = 2-O-methoxyethylribose thymine
  modified_base 2..3: mod_base = OTHER; note = R-phosphorothioate
  modified_base 3: mod_base = OTHER; note = 2-O-methylribose adenine
  modified_base 3..4: mod_base = OTHER; note S-N-(1,3-dimethylimidazolidin-2-ylidene)phosphoramidate
  modified_base 4: mod_base = OTHER; note = 2-fluororibose uracil
  modified_base 5: mod_base = OTHER; note = 2-O-methylribose adenine
  modified_base 6: mod_base = OTHER; note = 2-fluororibose guanine
  modified_base 7: mod_base = OTHER; note = 2-O-methylribose adenine
  modified_base 8: mod_base = gm
  modified_base 9: mod_base = cm
  modified_base 10: mod_base = OTHER; note = 2-O-methylribose adenine
  modified_base 10..11: mod_base = OTHER; note S-N-(1,3-dimethylimidazolidin-2-ylidene)phosphoramidate
  modified_base 11: mod_base = OTHER; note = 2-fluororibose adenine
  modified_base 12: mod_base = gm
  modified_base 13: mod_base = OTHER; note = 2-O-methylribose adenine
  modified_base 14: mod_base = OTHER; note = 2-fluororibose adenine
  modified_base 15: mod_base = cm
  modified_base 16: mod_base = OTHER; note = 2-fluororibose adenine
  modified_base 17: mod_base = cm
  modified_base 18: mod_base = um
  modified_base 19: mod_base = gm
  modified_base 20: mod_base = um
  modified_base 21: mod_base = um
  modified_base 21..22: mod_base = OTHER; note = S-phosphorothioate
  modified_base 22: mod_base = um
  modified_base 22..23: mod_base = OTHER; note = S-phosphorothioate
  modified_base 23: mod_base = um
  source 1..23: mol_type = other RNA
ttatagagcaagaacactgtttt

SEQ ID NO: 891 - RNA, 23 nt, synthetic construct
  misc_feature 1..23: note = Synthetic: SSR-0107384
  modified_base 1: mod_base = OTHER; note = 2-O-methoxyethylribose thymine
  modified_base 1..2: mod_base = OTHER; note = S-phosphorothioate
  modified_base 2: mod_base = OTHER; note = 2-fluororibose uracil
  modified_base 2..3: mod_base = OTHER; note = R-phosphorothioate
  modified_base 3: mod_base = OTHER; note = 2-O-methylribose adenine
  modified_base 3..4: mod_base = OTHER; note S-N-(1,3-dimethylimidazolidin-2-ylidene)phosphoramidate
  modified_base 4: mod_base = OTHER; note = 2-fluororibose uracil
  modified_base 5: mod_base = OTHER; note = 2-O-methylribose adenine
  modified_base 6: mod_base = OTHER; note = 2-fluororibose guanine
  modified_base 7: mod_base = OTHER; note = 2-O-methylribose adenine
  modified_base 8: mod_base = gm
  modified_base 9: mod_base = cm
  modified_base 10: mod_base = OTHER; note = 2-O-methylribose adenine
  modified_base 10..11: mod_base = OTHER; note S-N-(1,3-dimethylimidazolidin-2-ylidene)phosphoramidate
  modified_base 11: mod_base = OTHER; note = 2-fluororibose adenine
  modified_base 12: mod_base = gm
  modified_base 13: mod_base = OTHER; note = 2-O-methylribose adenine
  modified_base 14: mod_base = OTHER; note = 2-fluororibose adenine
  modified_base 15: mod_base = cm
  modified_base 16: mod_base = OTHER; note = 2-fluororibose adenine
  modified_base 17: mod_base = cm
  modified_base 18: mod_base = um
  modified_base 19: mod_base = gm
  modified_base 20: mod_base = um
  modified_base 21: mod_base = um
  modified_base 21..22: mod_base = OTHER; note = S-phosphorothioate
  modified_base 22: mod_base = um
  modified_base 22..23: mod_base = OTHER; note = S-phosphorothioate
  modified_base 23: mod_base = um
  source 1..23: mol_type = other RNA
ttatagagcaagaacactgtttt

SEQ ID NO: 892 - RNA, 23 nt, synthetic construct
  misc_feature 1..23: note = Synthetic: SSR-0107385
  modified_base 1: mod_base = um
  modified_base 1..2: mod_base = OTHER; note = S-phosphorothioate
  modified_base 2: mod_base = OTHER; note = 2-fluororibose uracil
  modified_base 2..3: mod_base = OTHER; note = R-phosphorothioate
  modified_base 3: mod_base = OTHER; note = 2-O-methylribose adenine
  modified_base 3..4: mod_base = OTHER; note S-N-(1,3-dimethylimidazolidin-2-ylidene)phosphoramidate
  modified_base 4: mod_base = OTHER; note = 2-fluororibose uracil
  modified_base 5: mod_base = OTHER; note = 2-O-methylribose adenine
  modified_base 6: mod_base = OTHER; note = 2-fluororibose guanine
  modified_base 7: mod_base = OTHER; note = 2-O-methylribose adenine
  modified_base 8: mod_base = OTHER; note = 2,4-locked-ribose guanine
  modified_base 9: mod_base = cm
  modified_base 10: mod_base = OTHER; note = 2-O-methylribose adenine
  modified_base 10..11: mod_base = OTHER; note S-N-(1,3-dimethylimidazolidin-2-ylidene)phosphoramidate
  modified_base 11: mod_base = OTHER; note = 2-fluororibose adenine
  modified_base 12: mod_base = gm
  modified_base 13: mod_base = OTHER; note = 2-O-methylribose adenine
  modified_base 14: mod_base = OTHER; note = 2-fluororibose adenine
  modified_base 15: mod_base = cm
  modified_base 16: mod_base = OTHER; note = 2-fluororibose adenine
  modified_base 17: mod_base = cm
  modified_base 18: mod_base = um
  modified_base 19: mod_base = gm
  modified_base 20: mod_base = um
  modified_base 21: mod_base = um
  modified_base 21..22: mod_base = OTHER; note = S-phosphorothioate
  modified_base 22: mod_base = um
  modified_base 22..23: mod_base = OTHER; note = S-phosphorothioate
  modified_base 23: mod_base = um
  source 1..23: mol_type = other RNA
ttatagagcaagaacactgtttt

SEQ ID NO: 893 - RNA, 23 nt, synthetic construct
  misc_feature 1..23: note = Synthetic: SSR-0107386
  modified_base 1: mod_base = um
  modified_base 1..2: mod_base = OTHER; note = S-phosphorothioate
  modified_base 2: mod_base = OTHER; note = 2-fluororibose uracil
  modified_base 2..3: mod_base = OTHER; note = R-phosphorothioate
  modified_base 3: mod_base = OTHER; note = 2-O-methylribose adenine
  modified_base 3..4: mod_base = OTHER; note S-N-(1,3-dimethylimidazolidin-2-ylidene)phosphoramidate
  modified_base 4: mod_base = OTHER; note = 2-fluororibose uracil
  modified_base 5: mod_base = OTHER; note = 2-O-methylribose adenine
  modified_base 6: mod_base = OTHER; note = 2-fluororibose guanine
  modified_base 7: mod_base = OTHER; note = 2,4-locked-ribose adenine
  modified_base 8: mod_base = gm
  modified_base 9: mod_base = cm
  modified_base 10: mod_base = OTHER; note = 2-O-methylribose adenine
  modified_base 10..11: mod_base = OTHER; note S-N-(1,3-dimethylimidazolidin-2-ylidene)phosphoramidate
  modified_base 11: mod_base = OTHER; note = 2-fluororibose adenine
  modified_base 12: mod_base = gm
  modified_base 13: mod_base = OTHER; note = 2-O-methylribose adenine
  modified_base 14: mod_base = OTHER; note = 2-fluororibose adenine
  modified_base 15: mod_base = cm
  modified_base 16: mod_base = OTHER; note = 2-fluororibose adenine
  modified_base 17: mod_base = cm
  modified_base 18: mod_base = um
  modified_base 19: mod_base = gm
  modified_base 20: mod_base = um
  modified_base 21: mod_base = um
  modified_base 21..22: mod_base = OTHER; note = S-phosphorothioate
  modified_base 22: mod_base = um
  modified_base 22..23: mod_base = OTHER; note = S-phosphorothioate
  modified_base 23: mod_base = um
  source 1..23: mol_type = other RNA
ttatagagcaagaacactgtttt

SEQ ID NO: 894 - RNA, 23 nt, synthetic construct
  misc_feature 1..23: note = Synthetic: SSR-0107387
  modified_base 1: mod_base = um
  modified_base 1..2: mod_base = OTHER; note = S-phosphorothioate
  modified_base 2: mod_base = OTHER; note = 2-fluororibose uracil
  modified_base 2..3: mod_base = OTHER; note = R-phosphorothioate
  modified_base 3: mod_base = OTHER; note = 2-O-methylribose adenine
  modified_base 3..4: mod_base = OTHER; note S-N-(1,3-dimethylimidazolidin-2-ylidene)phosphoramidate
  modified_base 4: mod_base = OTHER; note = 2-fluororibose uracil
  modified_base 5: mod_base = OTHER; note = 2-O-methylribose adenine
  modified_base 6: mod_base = OTHER; note = 2,4-locked-ribose guanine
  modified_base 7: mod_base = OTHER; note = 2-O-methylribose adenine
  modified_base 8: mod_base = gm
  modified_base 9: mod_base = cm
  modified_base 10: mod_base = OTHER; note = 2-O-methylribose adenine
  modified_base 10..11: mod_base = OTHER; note S-N-(1,3-dimethylimidazolidin-2-ylidene)phosphoramidate
  modified_base 11: mod_base = OTHER; note = 2-fluororibose adenine
  modified_base 12: mod_base = gm
  modified_base 13: mod_base = OTHER; note = 2-O-methylribose adenine
  modified_base 14: mod_base = OTHER; note = 2-fluororibose adenine
  modified_base 15: mod_base = cm
  modified_base 16: mod_base = OTHER; note = 2-fluororibose adenine
  modified_base 17: mod_base = cm
  modified_base 18: mod_base = um
  modified_base 19: mod_base = gm
  modified_base 20: mod_base = um
  modified_base 21: mod_base = um
  modified_base 21..22: mod_base = OTHER; note = S-phosphorothioate
  modified_base 22: mod_base = um
  modified_base 22..23: mod_base = OTHER; note = S-phosphorothioate
  modified_base 23: mod_base = um
  source 1..23: mol_type = other RNA
ttatagagcaagaacactgtttt

SEQ ID NO: 895 - RNA, 23 nt, synthetic construct
  misc_feature 1..23: note = Synthetic: SSR-0107388
  modified_base 1: mod_base = um
  modified_base 1..2: mod_base = OTHER; note = S-phosphorothioate
  modified_base 2: mod_base = OTHER; note = 2-fluororibose uracil
  modified_base 2..3: mod_base = OTHER; note = R-phosphorothioate
  modified_base 3: mod_base = OTHER; note = 2-O-methylribose adenine
  modified_base 3..4: mod_base = OTHER; note S-N-(1,3-dimethylimidazolidin-2-ylidene)phosphoramidate
  modified_base 4: mod_base = OTHER; note = 2-fluororibose uracil
  modified_base 5: mod_base = OTHER; note = 2,4-locked-ribose adenine
  modified_base 6: mod_base = OTHER; note = 2-fluororibose guanine
  modified_base 7: mod_base = OTHER; note = 2-O-methylribose adenine
  modified_base 8: mod_base = gm
  modified_base 9: mod_base = cm
  modified_base 10: mod_base = OTHER; note = 2-O-methylribose adenine
  modified_base 10..11: mod_base = OTHER; note S-N-(1,3-dimethylimidazolidin-2-ylidene)phosphoramidate
  modified_base 11: mod_base = OTHER; note = 2-fluororibose adenine
  modified_base 12: mod_base = gm
  modified_base 13: mod_base = OTHER; note = 2-O-methylribose adenine
  modified_base 14: mod_base = OTHER; note = 2-fluororibose adenine
  modified_base 15: mod_base = cm
  modified_base 16: mod_base = OTHER; note = 2-fluororibose adenine
  modified_base 17: mod_base = cm
  modified_base 18: mod_base = um
  modified_base 19: mod_base = gm
  modified_base 20: mod_base = um
  modified_base 21: mod_base = um
  modified_base 21..22: mod_base = OTHER; note = S-phosphorothioate
  modified_base 22: mod_base = um
  modified_base 22..23: mod_base = OTHER; note = S-phosphorothioate
  modified_base 23: mod_base = um
  source 1..23: mol_type = other RNA
ttatagagcaagaacactgtttt

SEQ ID NO: 896 - RNA, 23 nt, synthetic construct
  misc_feature 1..23: note = Synthetic: SSR-0107389
  modified_base 1: mod_base = um
  modified_base 1..2: mod_base = OTHER; note = S-phosphorothioate
  modified_base 2: mod_base = OTHER; note = 2-fluororibose uracil
  modified_base 2..3: mod_base = OTHER; note = R-phosphorothioate
  modified_base 3: mod_base = OTHER; note = 2-O-methylribose adenine
  modified_base 3..4: mod_base = OTHER; note S-N-(1,3-dimethylimidazolidin-2-ylidene)phosphoramidate
  modified_base 4: mod_base = OTHER; note = 2,4-locked-ribose thymine
  modified_base 5: mod_base = OTHER; note = 2-O-methylribose adenine
  modified_base 6: mod_base = OTHER; note = 2-fluororibose guanine
  modified_base 7: mod_base = OTHER; note = 2-O-methylribose adenine
  modified_base 8: mod_base = gm
  modified_base 9: mod_base = cm
  modified_base 10: mod_base = OTHER; note = 2-O-methylribose adenine
  modified_base 10..11: mod_base = OTHER; note S-N-(1,3-dimethylimidazolidin-2-ylidene)phosphoramidate
  modified_base 11: mod_base = OTHER; note = 2-fluororibose adenine
  modified_base 12: mod_base = gm
  modified_base 13: mod_base = OTHER; note = 2-O-methylribose adenine
  modified_base 14: mod_base = OTHER; note = 2-fluororibose adenine
  modified_base 15: mod_base = cm
  modified_base 16: mod_base = OTHER; note = 2-fluororibose adenine
  modified_base 17: mod_base = cm
  modified_base 18: mod_base = um
  modified_base 19: mod_base = gm
  modified_base 20: mod_base = um
  modified_base 21: mod_base = um
  modified_base 21..22: mod_base = OTHER; note = S-phosphorothioate
  modified_base 22: mod_base = um
  modified_base 22..23: mod_base = OTHER; note = S-phosphorothioate
  modified_base 23: mod_base = um
  source 1..23: mol_type = other RNA
ttatagagcaagaacactgtttt

SEQ ID NO: 897 - RNA, 23 nt, synthetic construct
  misc_feature 1..23: note = Synthetic: SSR-0107390
  modified_base 1: mod_base = um
  modified_base 1..2: mod_base = OTHER; note = S-phosphorothioate
  modified_base 2: mod_base = OTHER; note = 2-fluororibose uracil
  modified_base 2..3: mod_base = OTHER; note = R-phosphorothioate
  modified_base 3: mod_base = OTHER; note = 2,4-locked-ribose adenine
  modified_base 3..4: mod_base = OTHER; note S-N-(1,3-dimethylimidazolidin-2-ylidene)phosphoramidate
  modified_base 4: mod_base = OTHER; note = 2-fluororibose uracil
  modified_base 5: mod_base = OTHER; note = 2-O-methylribose adenine
  modified_base 6: mod_base = OTHER; note = 2-fluororibose guanine
  modified_base 7: mod_base = OTHER; note = 2-O-methylribose adenine
  modified_base 8: mod_base = gm
  modified_base 9: mod_base = cm
  modified_base 10: mod_base = OTHER; note = 2-O-methylribose adenine
  modified_base 10..11: mod_base = OTHER; note S-N-(1,3-dimethylimidazolidin-2-ylidene)phosphoramidate
  modified_base 11: mod_base = OTHER; note = 2-fluororibose adenine
  modified_base 12: mod_base = gm
  modified_base 13: mod_base = OTHER; note = 2-O-methylribose adenine
  modified_base 14: mod_base = OTHER; note = 2-fluororibose adenine
  modified_base 15: mod_base = cm
  modified_base 16: mod_base = OTHER; note = 2-fluororibose adenine
  modified_base 17: mod_base = cm
  modified_base 18: mod_base = um
  modified_base 19: mod_base = gm
  modified_base 20: mod_base = um
  modified_base 21: mod_base = um
  modified_base 21..22: mod_base = OTHER; note = S-phosphorothioate
  modified_base 22: mod_base = um
  modified_base 22..23: mod_base = OTHER; note = S-phosphorothioate
  modified_base 23: mod_base = um
  source 1..23: mol_type = other RNA
ttatagagcaagaacactgtttt

SEQ ID NO: 898 - RNA, 23 nt, synthetic construct
  misc_feature 1..23: note = Synthetic: SSR-0107391
  modified_base 1: mod_base = um
  modified_base 1..2: mod_base = OTHER; note = S-phosphorothioate
  modified_base 2: mod_base = OTHER; note = 2,4-locked-ribose thymine
  modified_base 2..3: mod_base = OTHER; note = R-phosphorothioate
  modified_base 3: mod_base = OTHER; note = 2-O-methylribose adenine
  modified_base 3..4: mod_base = OTHER; note S-N-(1,3-dimethylimidazolidin-2-ylidene)phosphoramidate
  modified_base 4: mod_base = OTHER; note = 2-fluororibose uracil
  modified_base 5: mod_base = OTHER; note = 2-O-methylribose adenine
  modified_base 6: mod_base = OTHER; note = 2-fluororibose guanine
  modified_base 7: mod_base = OTHER; note = 2-O-methylribose adenine
  modified_base 8: mod_base = gm
  modified_base 9: mod_base = cm
  modified_base 10: mod_base = OTHER; note = 2-O-methylribose adenine
  modified_base 10..11: mod_base = OTHER; note S-N-(1,3-dimethylimidazolidin-2-ylidene)phosphoramidate
  modified_base 11: mod_base = OTHER; note = 2-fluororibose adenine
  modified_base 12: mod_base = gm
  modified_base 13: mod_base = OTHER; note = 2-O-methylribose adenine
  modified_base 14: mod_base = OTHER; note = 2-fluororibose adenine
  modified_base 15: mod_base = cm
  modified_base 16: mod_base = OTHER; note = 2-fluororibose adenine
  modified_base 17: mod_base = cm
  modified_base 18: mod_base = um
  modified_base 19: mod_base = gm
  modified_base 20: mod_base = um
  modified_base 21: mod_base = um
  modified_base 21..22: mod_base = OTHER; note = S-phosphorothioate
  modified_base 22: mod_base = um
  modified_base 22..23: mod_base = OTHER; note = S-phosphorothioate
  modified_base 23: mod_base = um
  source 1..23: mol_type = other RNA
ttatagagcaagaacactgtttt

SEQ ID NO: 899 - RNA, 23 nt, synthetic construct
  misc_feature 1..23: note = Synthetic: SSR-0107392
  modified_base 1: mod_base = OTHER; note = 2,4-locked-ribose thymine
  modified_base 1..2: mod_base = OTHER; note = S-phosphorothioate
  modified_base 2: mod_base = OTHER; note = 2-fluororibose uracil
  modified_base 2..3: mod_base = OTHER; note = R-phosphorothioate
  modified_base 3: mod_base = OTHER; note = 2-O-methylribose adenine
  modified_base 3..4: mod_base = OTHER; note S-N-(1,3-dimethylimidazolidin-2-ylidene)phosphoramidate
  modified_base 4: mod_base = OTHER; note = 2-fluororibose uracil
  modified_base 5: mod_base = OTHER; note = 2-O-methylribose adenine
  modified_base 6: mod_base = OTHER; note = 2-fluororibose guanine
  modified_base 7: mod_base = OTHER; note = 2-O-methylribose adenine
  modified_base 8: mod_base = gm
  modified_base 9: mod_base = cm
  modified_base 10: mod_base = OTHER; note = 2-O-methylribose adenine
  modified_base 10..11: mod_base = OTHER; note S-N-(1,3-dimethylimidazolidin-2-ylidene)phosphoramidate
  modified_base 11: mod_base = OTHER; note = 2-fluororibose adenine
  modified_base 12: mod_base = gm
  modified_base 13: mod_base = OTHER; note = 2-O-methylribose adenine
  modified_base 14: mod_base = OTHER; note = 2-fluororibose adenine
  modified_base 15: mod_base = cm
  modified_base 16: mod_base = OTHER; note = 2-fluororibose adenine
  modified_base 17: mod_base = cm
  modified_base 18: mod_base = um
  modified_base 19: mod_base = gm
  modified_base 20: mod_base = um
  modified_base 21: mod_base = um
  modified_base 21..22: mod_base = OTHER; note = S-phosphorothioate
  modified_base 22: mod_base = um
  modified_base 22..23: mod_base = OTHER; note = S-phosphorothioate
  modified_base 23: mod_base = um
  source 1..23: mol_type = other RNA
ttatagagcaagaacactgtttt

SEQ ID NO: 900 - RNA, 21 nt, synthetic construct
  misc_feature 1..21: note = Synthetic: SSR-0106661
  modified_base 1: mod_base = OTHER; note = C6 Spacer linked by N-(1-docecyl-3-methylimidazolidin-2-ylidene)phosphoramidate the 5' end of 2-O-methylribose cytosine
  modified_base 1..2: mod_base = OTHER; note = S-phosphorothioate
  modified_base 2: mod_base = um
  modified_base 3: mod_base = OTHER; note = 2-fluororibose guanine
  modified_base 4: mod_base = um
  modified_base 5: mod_base = OTHER; note = 2-fluororibose guanine
  modified_base 6: mod_base = cm
  modified_base 7: mod_base = OTHER; note = 2-fluororibose uracil
  modified_base 7..8: mod_base = OTHER; note R-N-(1,3-dimethylimidazolidin-2-ylidene)phosphoramidate
  modified_base 8: mod_base = gm
  modified_base 9: mod_base = OTHER; note = 2-fluororibose uracil
  modified_base 10: mod_base = OTHER; note = 2-fluororibose adenine
  modified_base 11: mod_base = OTHER; note = 2-fluororibose adenine
  modified_base 12: mod_base = cm
  modified_base 13: mod_base = OTHER; note = 2-fluororibose adenine
  modified_base 14: mod_base = cm
  modified_base 15: mod_base = OTHER; note = 2-fluororibose adenine
  modified_base 15..16: mod_base = OTHER; note R-N-(1,3-dimethylimidazolidin-2-ylidene)phosphoramidate
  modified_base 16: mod_base = OTHER; note = 2-O-methylribose adenine
  modified_base 17: mod_base = OTHER; note = 2-fluororibose guanine
  modified_base 18: mod_base = um
  modified_base 19: mod_base = OTHER; note = 2-fluororibose adenine
  modified_base 20: mod_base = gm
  modified_base 20..21: mod_base = OTHER; note = S-phosphorothioate
  modified_base 21: mod_base = OTHER; note = 2-fluororibose adenine
  source 1..21: mol_type = other RNA
ctgtgctgtaacacaagtaga

SEQ ID NO: 901 - RNA, 21 nt, synthetic construct
  misc_feature 1..21: note = Synthetic: SSR-0106662
  modified_base 1: mod_base = OTHER; note = C6 Spacer linked by N-(1-hexadecyl-3-methylimidazolidin-2-ylidene)phosphoramida te the 5' end of 2-O-methylribose cytosine
  modified_base 1..2: mod_base = OTHER; note = S-phosphorothioate
  modified_base 2: mod_base = um
  modified_base 3: mod_base = OTHER; note = 2-fluororibose guanine
  modified_base 4: mod_base = um
  modified_base 5: mod_base = OTHER; note = 2-fluororibose guanine
  modified_base 6: mod_base = cm
  modified_base 7: mod_base = OTHER; note = 2-fluororibose uracil
  modified_base 7..8: mod_base = OTHER; note R-N-(1,3-dimethylimidazolidin-2-ylidene)phosphoramidate
  modified_base 8: mod_base = gm
  modified_base 9: mod_base = OTHER; note = 2-fluororibose uracil
  modified_base 10: mod_base = OTHER; note = 2-fluororibose adenine
  modified_base 11: mod_base = OTHER; note = 2-fluororibose adenine
  modified_base 12: mod_base = cm
  modified_base 13: mod_base = OTHER; note = 2-fluororibose adenine
  modified_base 14: mod_base = cm
  modified_base 15: mod_base = OTHER; note = 2-fluororibose adenine
  modified_base 15..16: mod_base = OTHER; note R-N-(1,3-dimethylimidazolidin-2-ylidene)phosphoramidate
  modified_base 16: mod_base = OTHER; note = 2-O-methylribose adenine
  modified_base 17: mod_base = OTHER; note = 2-fluororibose guanine
  modified_base 18: mod_base = um
  modified_base 19: mod_base = OTHER; note = 2-fluororibose adenine
  modified_base 20: mod_base = gm
  modified_base 20..21: mod_base = OTHER; note = S-phosphorothioate
  modified_base 21: mod_base = OTHER; note = 2-fluororibose adenine
  source 1..21: mol_type = other RNA
ctgtgctgtaacacaagtaga

SEQ ID NO: 902 - RNA, 21 nt, synthetic construct
  misc_feature 1..21: note = Synthetic: SSR-0106663
  modified_base 1: mod_base = OTHER; note = C6 Spacer linked by N-(1,3-didodecylimidazolidin-2-ylidene)phosphoramidate the 5' end of 2-O-methylribose cytosine
  modified_base 1..2: mod_base = OTHER; note = S-phosphorothioate
  modified_base 2: mod_base = um
  modified_base 3: mod_base = OTHER; note = 2-fluororibose guanine
  modified_base 4: mod_base = um
  modified_base 5: mod_base = OTHER; note = 2-fluororibose guanine
  modified_base 6: mod_base = cm
  modified_base 7: mod_base = OTHER; note = 2-fluororibose uracil
  modified_base 7..8: mod_base = OTHER; note R-N-(1,3-dimethylimidazolidin-2-ylidene)phosphoramidate
  modified_base 8: mod_base = gm
  modified_base 9: mod_base = OTHER; note = 2-fluororibose uracil
  modified_base 10: mod_base = OTHER; note = 2-fluororibose adenine
  modified_base 11: mod_base = OTHER; note = 2-fluororibose adenine
  modified_base 12: mod_base = cm
  modified_base 13: mod_base = OTHER; note = 2-fluororibose adenine
  modified_base 14: mod_base = cm
  modified_base 15: mod_base = OTHER; note = 2-fluororibose adenine
  modified_base 15..16: mod_base = OTHER; note R-N-(1,3-dimethylimidazolidin-2-ylidene)phosphoramidate
  modified_base 16: mod_base = OTHER; note = 2-O-methylribose adenine
  modified_base 17: mod_base = OTHER; note = 2-fluororibose guanine
  modified_base 18: mod_base = um
  modified_base 19: mod_base = OTHER; note = 2-fluororibose adenine
  modified_base 20: mod_base = gm
  modified_base 20..21: mod_base = OTHER; note = S-phosphorothioate
  modified_base 21: mod_base = OTHER; note = 2-fluororibose adenine
  source 1..21: mol_type = other RNA
ctgtgctgtaacacaagtaga

SEQ ID NO: 903 - RNA, 21 nt, synthetic construct
  misc_feature 1..21: note = Synthetic: SSR-0106664
  modified_base 1: mod_base = OTHER; note = C6 Spacer linked by N-(1,3-dihexadecylimidazolidin-2-ylidene)phosphoramidate the 5' end of 2-O-methylribose cytosine
  modified_base 1..2: mod_base = OTHER; note = S-phosphorothioate
  modified_base 2: mod_base = um
  modified_base 3: mod_base = OTHER; note = 2-fluororibose guanine
  modified_base 4: mod_base = um
  modified_base 5: mod_base = OTHER; note = 2-fluororibose guanine
  modified_base 6: mod_base = cm
  modified_base 7: mod_base = OTHER; note = 2-fluororibose uracil
  modified_base 7..8: mod_base = OTHER; note R-N-(1,3-dimethylimidazolidin-2-ylidene)phosphoramidate
  modified_base 8: mod_base = gm
  modified_base 9: mod_base = OTHER; note = 2-fluororibose uracil
  modified_base 10: mod_base = OTHER; note = 2-fluororibose adenine
  modified_base 11: mod_base = OTHER; note = 2-fluororibose adenine
  modified_base 12: mod_base = cm
  modified_base 13: mod_base = OTHER; note = 2-fluororibose adenine
  modified_base 14: mod_base = cm
  modified_base 15: mod_base = OTHER; note = 2-fluororibose adenine
  modified_base 15..16: mod_base = OTHER; note R-N-(1,3-dimethylimidazolidin-2-ylidene)phosphoramidate
  modified_base 16: mod_base = OTHER; note = 2-O-methylribose adenine
  modified_base 17: mod_base = OTHER; note = 2-fluororibose guanine
  modified_base 18: mod_base = um
  modified_base 19: mod_base = OTHER; note = 2-fluororibose adenine
  modified_base 20: mod_base = gm
  modified_base 20..21: mod_base = OTHER; note = S-phosphorothioate
  modified_base 21: mod_base = OTHER; note = 2-fluororibose adenine
  source 1..21: mol_type = other RNA
ctgtgctgtaacacaagtaga

SEQ ID NO: 904 - RNA, 21 nt, synthetic construct
  misc_feature 1..21: note = Synthetic: SSR-0106665
  modified_base 1: mod_base = cm
  modified_base 1..2: mod_base = OTHER; note = S-phosphorothioate
  modified_base 2: mod_base = um
  modified_base 3: mod_base = OTHER; note = 2-fluororibose guanine
  modified_base 4: mod_base = um
  modified_base 5: mod_base = OTHER; note = 2-fluororibose guanine
  modified_base 6: mod_base = cm
  modified_base 7: mod_base = OTHER; note = 2-fluororibose uracil
  modified_base 7..8: mod_base = OTHER; note R-N-(1,3-didodecylimidazolidin-2-ylidene)phosphoramidate
  modified_base 8: mod_base = gm
  modified_base 9: mod_base = OTHER; note = 2-fluororibose uracil
  modified_base 10: mod_base = OTHER; note = 2-fluororibose adenine
  modified_base 11: mod_base = OTHER; note = 2-fluororibose adenine
  modified_base 12: mod_base = cm
  modified_base 13: mod_base = OTHER; note = 2-fluororibose adenine
  modified_base 14: mod_base = cm
  modified_base 15: mod_base = OTHER; note = 2-fluororibose adenine
  modified_base 16: mod_base = OTHER; note = 2-O-methylribose adenine
  modified_base 17: mod_base = OTHER; note = 2-fluororibose guanine
  modified_base 18: mod_base = um
  modified_base 19: mod_base = OTHER; note = 2-fluororibose adenine
  modified_base 20: mod_base = gm
  modified_base 20..21: mod_base = OTHER; note = S-phosphorothioate
  modified_base 21: mod_base = OTHER; note = 2-fluororibose adenine
  source 1..21: mol_type = other RNA
ctgtgctgtaacacaagtaga

SEQ ID NO: 905 - RNA, 21 nt, synthetic construct
  misc_feature 1..21: note = Synthetic: SSR-0106666
  modified_base 1: mod_base = cm
  modified_base 1..2: mod_base = OTHER; note = S-phosphorothioate
  modified_base 2: mod_base = um
  modified_base 3: mod_base = OTHER; note = 2-fluororibose guanine
  modified_base 4: mod_base = um
  modified_base 5: mod_base = OTHER; note = 2-fluororibose guanine
  modified_base 6: mod_base = cm
  modified_base 7: mod_base = OTHER; note = 2-fluororibose uracil
  modified_base 7..8: mod_base = OTHER; note R-N-(1,3-dihexadecylimidazolidin-2-ylidene)phosphoramidate
  modified_base 8: mod_base = gm
  modified_base 9: mod_base = OTHER; note = 2-fluororibose uracil
  modified_base 10: mod_base = OTHER; note = 2-fluororibose adenine
  modified_base 11: mod_base = OTHER; note = 2-fluororibose adenine
  modified_base 12: mod_base = cm
  modified_base 13: mod_base = OTHER; note = 2-fluororibose adenine
  modified_base 14: mod_base = cm
  modified_base 15: mod_base = OTHER; note = 2-fluororibose adenine
  modified_base 16: mod_base = OTHER; note = 2-O-methylribose adenine
  modified_base 17: mod_base = OTHER; note = 2-fluororibose guanine
  modified_base 18: mod_base = um
  modified_base 19: mod_base = OTHER; note = 2-fluororibose adenine
  modified_base 20: mod_base = gm
  modified_base 20..21: mod_base = OTHER; note = S-phosphorothioate
  modified_base 21: mod_base = OTHER; note = 2-fluororibose adenine
  source 1..21: mol_type = other RNA
ctgtgctgtaacacaagtaga

SEQ ID NO: 906 - RNA, 21 nt, synthetic construct
  misc_feature 1..21: note = Synthetic: SSR-0106601
  modified_base 1: mod_base = cm
  modified_base 1..2: mod_base = OTHER; note = S-phosphorothioate
  modified_base 2: mod_base = um
  modified_base 3: mod_base = OTHER; note = 2-fluororibose guanine
  modified_base 4: mod_base = um
  modified_base 5: mod_base = OTHER; note = 2-fluororibose guanine
  modified_base 6: mod_base = cm
  modified_base 7: mod_base = OTHER; note = 2-O-hexadecylribose uracil
  modified_base 7..8: mod_base = OTHER; note R-N-(1-docecyl-3-methylimidazolidin-2-ylidene)phosphoramida te
  modified_base 8: mod_base = gm
  modified_base 9: mod_base = OTHER; note = 2-fluororibose uracil
  modified_base 10: mod_base = OTHER; note = 2-fluororibose adenine
  modified_base 11: mod_base = OTHER; note = 2-fluororibose adenine
  modified_base 12: mod_base = cm
  modified_base 13: mod_base = OTHER; note = 2-fluororibose adenine
  modified_base 14: mod_base = cm
  modified_base 15: mod_base = OTHER; note = 2-fluororibose adenine
  modified_base 16: mod_base = OTHER; note = 2-O-methylribose adenine
  modified_base 17: mod_base = OTHER; note = 2-fluororibose guanine
  modified_base 18: mod_base = um
  modified_base 19: mod_base = OTHER; note = 2-fluororibose adenine
  modified_base 20: mod_base = gm
  modified_base 20..21: mod_base = OTHER; note = S-phosphorothioate
  modified_base 21: mod_base = OTHER; note = 2-fluororibose adenine
  source 1..21: mol_type = other RNA
ctgtgctgtaacacaagtaga

SEQ ID NO: 907 - RNA, 21 nt, synthetic construct
  misc_feature 1..21: note = Synthetic: SSR-0106602
  modified_base 1: mod_base = cm
  modified_base 1..2: mod_base = OTHER; note = S-phosphorothioate
  modified_base 2: mod_base = um
  modified_base 3: mod_base = OTHER; note = 2-fluororibose guanine
  modified_base 4: mod_base = um
  modified_base 5: mod_base = OTHER; note = 2-fluororibose guanine
  modified_base 6: mod_base = cm
  modified_base 7: mod_base = OTHER; note = 2-O-hexadecylribose uracil
  modified_base 7..8: mod_base = OTHER; note R-N-(1-hexadecyl-3-methylimidazolidin-2-ylidene)phosphorami date
  modified_base 8: mod_base = gm
  modified_base 9: mod_base = OTHER; note = 2-fluororibose uracil
  modified_base 10: mod_base = OTHER; note = 2-fluororibose adenine
  modified_base 11: mod_base = OTHER; note = 2-fluororibose adenine
  modified_base 12: mod_base = cm
  modified_base 13: mod_base = OTHER; note = 2-fluororibose adenine
  modified_base 14: mod_base = cm
  modified_base 15: mod_base = OTHER; note = 2-fluororibose adenine
  modified_base 16: mod_base = OTHER; note = 2-O-methylribose adenine
  modified_base 17: mod_base = OTHER; note = 2-fluororibose guanine
  modified_base 18: mod_base = um
  modified_base 19: mod_base = OTHER; note = 2-fluororibose adenine
  modified_base 20: mod_base = gm
  modified_base 20..21: mod_base = OTHER; note = S-phosphorothioate
  modified_base 21: mod_base = OTHER; note = 2-fluororibose adenine
  source 1..21: mol_type = other RNA
ctgtgctgtaacacaagtaga

SEQ ID NO: 908 - RNA, 23 nt, synthetic construct
  misc_feature 1..23: note = Synthetic: WV-48528
  misc_feature 1..23: note = Synthetic: SSR-0104473
  modified_base 1: mod_base = um
  modified_base 1..2: mod_base = OTHER; note = S-phosphorothioate
  modified_base 2: mod_base = OTHER; note = 2-fluororibose uracil
  modified_base 2..3: mod_base = OTHER; note = R-phosphorothioate
  modified_base 3: mod_base = OTHER; note = 2-O-methylribose adenine
  modified_base 3..4: mod_base = OTHER; note S-N-(1,3-dimethylimidazolidin-2-ylidene)phosphoramidate
  modified_base 4: mod_base = OTHER; note = 2-fluororibose uracil
  modified_base 5: mod_base = OTHER; note = 2-O-methylribose adenine
  modified_base 6: mod_base = OTHER; note = 2-fluororibose guanine
  modified_base 7: mod_base = OTHER; note = 2-O-methylribose adenine
  modified_base 8: mod_base = gm
  modified_base 9: mod_base = cm
  modified_base 10: mod_base = OTHER; note = 2-O-methylribose adenine
  modified_base 10..11: mod_base = OTHER; note R-N-(1,3-dimethylimidazolidin-2-ylidene)phosphoramidate
  modified_base 11: mod_base = OTHER; note = 2-fluororibose adenine
  modified_base 12: mod_base = gm
  modified_base 13: mod_base = OTHER; note = 2-O-methylribose adenine
  modified_base 14: mod_base = OTHER; note = 2-fluororibose adenine
  modified_base 15: mod_base = cm
  modified_base 16: mod_base = OTHER; note = 2-fluororibose adenine
  modified_base 17: mod_base = cm
  modified_base 18: mod_base = um
  modified_base 19: mod_base = gm
  modified_base 20: mod_base = um
  modified_base 21: mod_base = um
  modified_base 21..22: mod_base = OTHER; note = S-phosphorothioate
  modified_base 22: mod_base = um
  modified_base 22..23: mod_base = OTHER; note = S-phosphorothioate
  modified_base 23: mod_base = um
  source 1..23: mol_type = other RNA
ttatagagcaagaacactgtttt

SEQ ID NO: 909 - RNA, 23 nt, synthetic construct
  misc_feature 1..23: note = Synthetic: SSR-0106453
  modified_base 1: mod_base = um
  modified_base 1..2: mod_base = OTHER; note = S-phosphorothioate
  modified_base 2: mod_base = OTHER; note = 2-fluororibose uracil
  modified_base 2..3: mod_base = OTHER; note = R-phosphorothioate
  modified_base 3: mod_base = OTHER; note = 2,3-dideoxy-Beta-D-glucopyranose adenine
  modified_base 3..4: mod_base = OTHER; note S-N-(1,3-dimethylimidazolidin-2-ylidene)phosphoramidate
  modified_base 4: mod_base = OTHER; note = 2-fluororibose uracil
  modified_base 5: mod_base = OTHER; note = 2-O-methylribose adenine
  modified_base 6: mod_base = OTHER; note = 2-fluororibose guanine
  modified_base 7: mod_base = OTHER; note = 2-O-methylribose adenine
  modified_base 8: mod_base = gm
  modified_base 9: mod_base = cm
  modified_base 10: mod_base = OTHER; note = 2-O-methylribose adenine
  modified_base 10..11: mod_base = OTHER; note S-N-(1,3-dimethylimidazolidin-2-ylidene)phosphoramidate
  modified_base 11: mod_base = OTHER; note = 2-fluororibose adenine
  modified_base 12: mod_base = gm
  modified_base 13: mod_base = OTHER; note = 2-O-methylribose adenine
  modified_base 14: mod_base = OTHER; note = 2-fluororibose adenine
  modified_base 15: mod_base = cm
  modified_base 16: mod_base = OTHER; note = 2-fluororibose adenine
  modified_base 17: mod_base = cm
  modified_base 18: mod_base = um
  modified_base 19: mod_base = gm
  modified_base 20: mod_base = um
  modified_base 21: mod_base = um
  modified_base 21..22: mod_base = OTHER; note = S-phosphorothioate
  modified_base 22: mod_base = um
  modified_base 22..23: mod_base = OTHER; note = S-phosphorothioate
  modified_base 23: mod_base = um
  source 1..23: mol_type = other RNA
ttatagagcaagaacactgtttt

SEQ ID NO: 910 - RNA, 23 nt, synthetic construct
  misc_feature 1..23: note = Synthetic: SSR-0106454
  modified_base 1: mod_base = um
  modified_base 1..2: mod_base = OTHER; note = S-phosphorothioate
  modified_base 2: mod_base = OTHER; note = 2-fluororibose uracil
  modified_base 2..3: mod_base = OTHER; note = R-phosphorothioate
  modified_base 3: mod_base = OTHER; note = 2-O-methylribose adenine
  modified_base 3..4: mod_base = OTHER; note S-N-(1,3-dimethylimidazolidin-2-ylidene)phosphoramidate
  modified_base 4: mod_base = OTHER; note = 2-fluororibose uracil
  modified_base 5: mod_base = OTHER; note = 2,3-dideoxy-Beta-D-glucopyranose adenine
  modified_base 6: mod_base = OTHER; note = 2-fluororibose guanine
  modified_base 7: mod_base = OTHER; note = 2-O-methylribose adenine
  modified_base 8: mod_base = gm
  modified_base 9: mod_base = cm
  modified_base 10: mod_base = OTHER; note = 2-O-methylribose adenine
  modified_base 10..11: mod_base = OTHER; note S-N-(1,3-dimethylimidazolidin-2-ylidene)phosphoramidate
  modified_base 11: mod_base = OTHER; note = 2-fluororibose adenine
  modified_base 12: mod_base = gm
  modified_base 13: mod_base = OTHER; note = 2-O-methylribose adenine
  modified_base 14: mod_base = OTHER; note = 2-fluororibose adenine
  modified_base 15: mod_base = cm
  modified_base 16: mod_base = OTHER; note = 2-fluororibose adenine
  modified_base 17: mod_base = cm
  modified_base 18: mod_base = um
  modified_base 19: mod_base = gm
  modified_base 20: mod_base = um
  modified_base 21: mod_base = um
  modified_base 21..22: mod_base = OTHER; note = S-phosphorothioate
  modified_base 22: mod_base = um
  modified_base 22..23: mod_base = OTHER; note = S-phosphorothioate
  modified_base 23: mod_base = um
  source 1..23: mol_type = other RNA
ttatagagcaagaacactgtttt

SEQ ID NO: 911 - RNA, 23 nt, synthetic construct
  misc_feature 1..23: note = Synthetic: SSR-0106455
  modified_base 1: mod_base = um
  modified_base 1..2: mod_base = OTHER; note = S-phosphorothioate
  modified_base 2: mod_base = OTHER; note = 2-fluororibose uracil
  modified_base 2..3: mod_base = OTHER; note = R-phosphorothioate
  modified_base 3: mod_base = OTHER; note = 2-O-methylribose adenine
  modified_base 3..4: mod_base = OTHER; note S-N-(1,3-dimethylimidazolidin-2-ylidene)phosphoramidate
  modified_base 4: mod_base = OTHER; note = 2-fluororibose uracil
  modified_base 5: mod_base = OTHER; note = 2-O-methylribose adenine
  modified_base 6: mod_base = OTHER; note = 2-fluororibose guanine
  modified_base 7: mod_base = OTHER; note = 2,3-dideoxy-Beta-D-glucopyranose adenine
  modified_base 8: mod_base = gm
  modified_base 9: mod_base = cm
  modified_base 10: mod_base = OTHER; note = 2-O-methylribose adenine
  modified_base 10..11: mod_base = OTHER; note S-N-(1,3-dimethylimidazolidin-2-ylidene)phosphoramidate
  modified_base 11: mod_base = OTHER; note = 2-fluororibose adenine
  modified_base 12: mod_base = gm
  modified_base 13: mod_base = OTHER; note = 2-O-methylribose adenine
  modified_base 14: mod_base = OTHER; note = 2-fluororibose adenine
  modified_base 15: mod_base = cm
  modified_base 16: mod_base = OTHER; note = 2-fluororibose adenine
  modified_base 17: mod_base = cm
  modified_base 18: mod_base = um
  modified_base 19: mod_base = gm
  modified_base 20: mod_base = um
  modified_base 21: mod_base = um
  modified_base 21..22: mod_base = OTHER; note = S-phosphorothioate
  modified_base 22: mod_base = um
  modified_base 22..23: mod_base = OTHER; note = S-phosphorothioate
  modified_base 23: mod_base = um
  source 1..23: mol_type = other RNA
ttatagagcaagaacactgtttt

SEQ ID NO: 912 - RNA, 23 nt, synthetic construct
  misc_feature 1..23: note = Synthetic: SSR-0106456
  modified_base 1: mod_base = um
  modified_base 1..2: mod_base = OTHER; note = S-phosphorothioate
  modified_base 2: mod_base = OTHER; note = 2-fluororibose uracil
  modified_base 2..3: mod_base = OTHER; note = R-phosphorothioate
  modified_base 3: mod_base = OTHER; note = 2-O-methylribose adenine
  modified_base 3..4: mod_base = OTHER; note S-N-(1,3-dimethylimidazolidin-2-ylidene)phosphoramidate
  modified_base 4: mod_base = OTHER; note = 2-fluororibose uracil
  modified_base 5: mod_base = OTHER; note = 2-O-methylribose adenine
  modified_base 6: mod_base = OTHER; note = 2-fluororibose guanine
  modified_base 7: mod_base = OTHER; note = 2-O-methylribose adenine
  modified_base 8: mod_base = gm
  modified_base 9: mod_base = cm
  modified_base 10: mod_base = OTHER; note = 2,3-dideoxy-Beta-D-glucopyranose adenine
  modified_base 10..11: mod_base = OTHER; note S-N-(1,3-dimethylimidazolidin-2-ylidene)phosphoramidate
  modified_base 11: mod_base = OTHER; note = 2-fluororibose adenine
  modified_base 12: mod_base = gm
  modified_base 13: mod_base = OTHER; note = 2-O-methylribose adenine
  modified_base 14: mod_base = OTHER; note = 2-fluororibose adenine
  modified_base 15: mod_base = cm
  modified_base 16: mod_base = OTHER; note = 2-fluororibose adenine
  modified_base 17: mod_base = cm
  modified_base 18: mod_base = um
  modified_base 19: mod_base = gm
  modified_base 20: mod_base = um
  modified_base 21: mod_base = um
  modified_base 21..22: mod_base = OTHER; note = S-phosphorothioate
  modified_base 22: mod_base = um
  modified_base 22..23: mod_base = OTHER; note = S-phosphorothioate
  modified_base 23: mod_base = um
  source 1..23: mol_type = other RNA
ttatagagcaagaacactgtttt

SEQ ID NO: 913 - RNA, 23 nt, synthetic construct
  misc_feature 1..23: note = Synthetic: SSR-0106457
  modified_base 1: mod_base = OTHER; note = deoxyribose uracil (position 3 connectivity)
  modified_base 1..2: mod_base = OTHER; note = S-phosphorothioate
  modified_base 2: mod_base = OTHER; note = 2-fluororibose uracil
  modified_base 2..3: mod_base = OTHER; note = R-phosphorothioate
  modified_base 3: mod_base = OTHER; note = 2-O-methylribose adenine
  modified_base 3..4: mod_base = OTHER; note S-N-(1,3-dimethylimidazolidin-2-ylidene)phosphoramidate
  modified_base 4: mod_base = OTHER; note = 2-fluororibose uracil
  modified_base 5: mod_base = OTHER; note = 2-O-methylribose adenine
  modified_base 6: mod_base = OTHER; note = 2-fluororibose guanine
  modified_base 7: mod_base = OTHER; note = 2-O-methylribose adenine
  modified_base 8: mod_base = gm
  modified_base 9: mod_base = cm
  modified_base 10: mod_base = OTHER; note = 2-O-methylribose adenine
  modified_base 10..11: mod_base = OTHER; note S-N-(1,3-dimethylimidazolidin-2-ylidene)phosphoramidate
  modified_base 11: mod_base = OTHER; note = 2-fluororibose adenine
  modified_base 12: mod_base = gm
  modified_base 13: mod_base = OTHER; note = 2-O-methylribose adenine
  modified_base 14: mod_base = OTHER; note = 2-fluororibose adenine
  modified_base 15: mod_base = cm
  modified_base 16: mod_base = OTHER; note = 2-fluororibose adenine
  modified_base 17: mod_base = cm
  modified_base 18: mod_base = um
  modified_base 19: mod_base = gm
  modified_base 20: mod_base = um
  modified_base 21: mod_base = um
  modified_base 21..22: mod_base = OTHER; note = S-phosphorothioate
  modified_base 22: mod_base = um
  modified_base 22..23: mod_base = OTHER; note = S-phosphorothioate
  modified_base 23: mod_base = um
  source 1..23: mol_type = other RNA
ttatagagcaagaacactgtttt

SEQ ID NO: 914 - RNA, 23 nt, synthetic construct
  misc_feature 1..23: note = Synthetic: SSR-0106512
  modified_base 1: mod_base = um
  modified_base 1..2: mod_base = OTHER; note = R-phosphorothioate
  modified_base 2: mod_base = OTHER; note = 2-fluororibose cytosine
  modified_base 2..3: mod_base = OTHER; note = S-phosphorothioate
  modified_base 3: mod_base = um
  modified_base 3..4: mod_base = OTHER; note S-N-(1-(4-dimethylamino-butyl)-3-methylimidazolidin-2-ylide ne)phosphoramidate
  modified_base 4: mod_base = OTHER; note = 2-fluororibose adenine
  modified_base 5: mod_base = cm
  modified_base 6: mod_base = OTHER; note = 2-fluororibose uracil
  modified_base 7: mod_base = um
  modified_base 7..8: mod_base = OTHER; note S-N-(1-(4-dimethylamino-butyl)-3-methylimidazolidin-2-ylide ne)phosphoramidate
  modified_base 8: mod_base = OTHER; note = 2-fluororibose guanine
  modified_base 9: mod_base = um
  modified_base 10: mod_base = OTHER; note = 2-fluororibose guanine
  modified_base 11: mod_base = um
  modified_base 12: mod_base = um
  modified_base 13: mod_base = OTHER; note = 2-O-methylribose adenine
  modified_base 13..14: mod_base = OTHER; note = S-phosphorothioate
  modified_base 14: mod_base = OTHER; note = 2-fluororibose cytosine
  modified_base 14..15: mod_base = OTHER; note = S-phosphorothioate
  modified_base 15: mod_base = OTHER; note = 2-O-methylribose adenine
  modified_base 15..16: mod_base = OTHER; note = S-phosphorothioate
  modified_base 16: mod_base = OTHER; note = 2-fluororibose guanine
  modified_base 16..17: mod_base = OTHER; note = S-phosphorothioate
  modified_base 17: mod_base = cm
  modified_base 17..18: mod_base = OTHER; note = S-phosphorothioate
  modified_base 18: mod_base = OTHER; note = 2-fluororibose adenine
  modified_base 18..19: mod_base = OTHER; note S-N-(1-(4-dimethylamino-butyl)-3-methylimidazolidin-2-ylide ne)phosphoramidate
  modified_base 19: mod_base = cm
  modified_base 19..20: mod_base = OTHER; note = S-phosphorothioate
  modified_base 20: mod_base = OTHER; note = 2-fluororibose adenine
  modified_base 20..21: mod_base = OTHER; note = S-phosphorothioate
  modified_base 21: mod_base = gm
  modified_base 21..22: mod_base = OTHER; note = S-phosphorothioate
  modified_base 22: mod_base = um
  modified_base 22..23: mod_base = OTHER; note = S-phosphorothioate
  modified_base 23: mod_base = um
  source 1..23: mol_type = other RNA
tctacttgtgttacagcacagtt

SEQ ID NO: 915 - RNA, 23 nt, synthetic construct
  misc_feature 1..23: note = Synthetic: SSR-0106514
  modified_base 1: mod_base = OTHER; note = 5-deoxy-2-O-methylribose uracil
  modified_base 1..2: mod_base = OTHER; note = R-phosphorothioate
  modified_base 2: mod_base = OTHER; note = 2-fluororibose cytosine
  modified_base 2..3: mod_base = OTHER; note = S-phosphorothioate
  modified_base 3: mod_base = um
  modified_base 3..4: mod_base = OTHER; note S-N-(1,3-dimethylimidazolidin-2-ylidene)phosphoramidate
  modified_base 4: mod_base = OTHER; note = 2-fluororibose adenine
  modified_base 5: mod_base = cm
  modified_base 6: mod_base = OTHER; note = 2-fluororibose uracil
  modified_base 7: mod_base = um
  modified_base 7..8: mod_base = OTHER; note S-N-(1,3-dimethylimidazolidin-2-ylidene)phosphoramidate
  modified_base 8: mod_base = OTHER; note = 2-fluororibose guanine
  modified_base 9: mod_base = um
  modified_base 10: mod_base = OTHER; note = 2-fluororibose guanine
  modified_base 11: mod_base = um
  modified_base 12: mod_base = um
  modified_base 13: mod_base = OTHER; note = 2-O-methylribose adenine
  modified_base 13..14: mod_base = OTHER; note = S-phosphorothioate
  modified_base 14: mod_base = OTHER; note = 2-fluororibose cytosine
  modified_base 14..15: mod_base = OTHER; note = S-phosphorothioate
  modified_base 15: mod_base = OTHER; note = 2-O-methylribose adenine
  modified_base 15..16: mod_base = OTHER; note = S-phosphorothioate
  modified_base 16: mod_base = OTHER; note = 2-fluororibose guanine
  modified_base 16..17: mod_base = OTHER; note = S-phosphorothioate
  modified_base 17: mod_base = cm
  modified_base 17..18: mod_base = OTHER; note = S-phosphorothioate
  modified_base 18: mod_base = OTHER; note = 2-fluororibose adenine
  modified_base 18..19: mod_base = OTHER; note S-N-(1,3-dimethylimidazolidin-2-ylidene)phosphoramidate
  modified_base 19: mod_base = cm
  modified_base 19..20: mod_base = OTHER; note = S-phosphorothioate
  modified_base 20: mod_base = OTHER; note = 2-fluororibose adenine
  modified_base 20..21: mod_base = OTHER; note = S-phosphorothioate
  modified_base 21: mod_base = gm
  modified_base 21..22: mod_base = OTHER; note = S-phosphorothioate
  modified_base 22: mod_base = um
  modified_base 22..23: mod_base = OTHER; note = S-phosphorothioate
  modified_base 23: mod_base = um
  source 1..23: mol_type = other RNA
tctacttgtgttacagcacagtt

SEQ ID NO: 916 - RNA, 23 nt, synthetic construct
  misc_feature 1..23: note = Synthetic: SSR-0106515
  modified_base 1: mod_base = OTHER; note = 5-deoxy-2-O-methylribose uracil
  modified_base 1..2: mod_base = OTHER; note = S-phosphorothioate
  modified_base 2: mod_base = OTHER; note = 2-fluororibose cytosine
  modified_base 2..3: mod_base = OTHER; note = S-phosphorothioate
  modified_base 3: mod_base = um
  modified_base 3..4: mod_base = OTHER; note S-N-(1,3-dimethylimidazolidin-2-ylidene)phosphoramidate
  modified_base 4: mod_base = OTHER; note = 2-fluororibose adenine
  modified_base 5: mod_base = cm
  modified_base 6: mod_base = OTHER; note = 2-fluororibose uracil
  modified_base 7: mod_base = um
  modified_base 7..8: mod_base = OTHER; note S-N-(1,3-dimethylimidazolidin-2-ylidene)phosphoramidate
  modified_base 8: mod_base = OTHER; note = 2-fluororibose guanine
  modified_base 9: mod_base = um
  modified_base 10: mod_base = OTHER; note = 2-fluororibose guanine
  modified_base 11: mod_base = um
  modified_base 12: mod_base = um
  modified_base 13: mod_base = OTHER; note = 2-O-methylribose adenine
  modified_base 13..14: mod_base = OTHER; note = S-phosphorothioate
  modified_base 14: mod_base = OTHER; note = 2-fluororibose cytosine
  modified_base 14..15: mod_base = OTHER; note = S-phosphorothioate
  modified_base 15: mod_base = OTHER; note = 2-O-methylribose adenine
  modified_base 15..16: mod_base = OTHER; note = S-phosphorothioate
  modified_base 16: mod_base = OTHER; note = 2-fluororibose guanine
  modified_base 16..17: mod_base = OTHER; note = S-phosphorothioate
  modified_base 17: mod_base = cm
  modified_base 17..18: mod_base = OTHER; note = S-phosphorothioate
  modified_base 18: mod_base = OTHER; note = 2-fluororibose adenine
  modified_base 18..19: mod_base = OTHER; note S-N-(1,3-dimethylimidazolidin-2-ylidene)phosphoramidate
  modified_base 19: mod_base = cm
  modified_base 19..20: mod_base = OTHER; note = S-phosphorothioate
  modified_base 20: mod_base = OTHER; note = 2-fluororibose adenine
  modified_base 20..21: mod_base = OTHER; note = S-phosphorothioate
  modified_base 21: mod_base = gm
  modified_base 21..22: mod_base = OTHER; note = S-phosphorothioate
  modified_base 22: mod_base = um
  modified_base 22..23: mod_base = OTHER; note = S-phosphorothioate
  modified_base 23: mod_base = um
  source 1..23: mol_type = other RNA
tctacttgtgttacagcacagtt

SEQ ID NO: 917 - RNA, 23 nt, synthetic construct
  misc_feature 1..23: note = Synthetic: SSR-0106516
  modified_base 1: mod_base = OTHER; note = 5-(E)-vinylphosphonate-5-deoxy-2-methylribose uracil
  modified_base 1..2: mod_base = OTHER; note = R-phosphorothioate
  modified_base 2: mod_base = OTHER; note = 2-fluororibose cytosine
  modified_base 2..3: mod_base = OTHER; note = S-phosphorothioate
  modified_base 3: mod_base = um
  modified_base 3..4: mod_base = OTHER; note S-N-(1,3-dimethylimidazolidin-2-ylidene)phosphoramidate
  modified_base 4: mod_base = OTHER; note = 2-fluororibose adenine
  modified_base 5: mod_base = cm
  modified_base 6: mod_base = OTHER; note = 2-fluororibose uracil
  modified_base 7: mod_base = um
  modified_base 7..8: mod_base = OTHER; note S-N-(1,3-dimethylimidazolidin-2-ylidene)phosphoramidate
  modified_base 8: mod_base = OTHER; note = 2-fluororibose guanine
  modified_base 9: mod_base = um
  modified_base 10: mod_base = OTHER; note = 2-fluororibose guanine
  modified_base 11: mod_base = um
  modified_base 12: mod_base = um
  modified_base 13: mod_base = OTHER; note = 2-O-methylribose adenine
  modified_base 13..14: mod_base = OTHER; note = S-phosphorothioate
  modified_base 14: mod_base = OTHER; note = 2-fluororibose cytosine
  modified_base 14..15: mod_base = OTHER; note = S-phosphorothioate
  modified_base 15: mod_base = OTHER; note = 2-O-methylribose adenine
  modified_base 15..16: mod_base = OTHER; note = S-phosphorothioate
  modified_base 16: mod_base = OTHER; note = 2-fluororibose guanine
  modified_base 16..17: mod_base = OTHER; note = S-phosphorothioate
  modified_base 17: mod_base = cm
  modified_base 17..18: mod_base = OTHER; note = S-phosphorothioate
  modified_base 18: mod_base = OTHER; note = 2-fluororibose adenine
  modified_base 18..19: mod_base = OTHER; note S-N-(1,3-dimethylimidazolidin-2-ylidene)phosphoramidate
  modified_base 19: mod_base = cm
  modified_base 19..20: mod_base = OTHER; note = S-phosphorothioate
  modified_base 20: mod_base = OTHER; note = 2-fluororibose adenine
  modified_base 20..21: mod_base = OTHER; note = S-phosphorothioate
  modified_base 21: mod_base = gm
  modified_base 21..22: mod_base = OTHER; note = S-phosphorothioate
  modified_base 22: mod_base = um
  modified_base 22..23: mod_base = OTHER; note = S-phosphorothioate
  modified_base 23: mod_base = um
  source 1..23: mol_type = other RNA
tctacttgtgttacagcacagtt

SEQ ID NO: 918 - RNA, 23 nt, synthetic construct
  misc_feature 1..23: note = Synthetic: SSR-0106518
  modified_base 1: mod_base = OTHER; note = 2,5-deoxyribose thymine
  modified_base 1..2: mod_base = OTHER; note = S-phosphorothioate
  modified_base 2: mod_base = OTHER; note = 2-fluororibose cytosine
  modified_base 2..3: mod_base = OTHER; note = S-phosphorothioate
  modified_base 3: mod_base = um
  modified_base 3..4: mod_base = OTHER; note S-N-(1,3-dimethylimidazolidin-2-ylidene)phosphoramidate
  modified_base 4: mod_base = OTHER; note = 2-fluororibose adenine
  modified_base 5: mod_base = cm
  modified_base 6: mod_base = OTHER; note = 2-fluororibose uracil
  modified_base 7: mod_base = um
  modified_base 7..8: mod_base = OTHER; note S-N-(1,3-dimethylimidazolidin-2-ylidene)phosphoramidate
  modified_base 8: mod_base = OTHER; note = 2-fluororibose guanine
  modified_base 9: mod_base = um
  modified_base 10: mod_base = OTHER; note = 2-fluororibose guanine
  modified_base 11: mod_base = um
  modified_base 12: mod_base = um
  modified_base 13: mod_base = OTHER; note = 2-O-methylribose adenine
  modified_base 13..14: mod_base = OTHER; note = S-phosphorothioate
  modified_base 14: mod_base = OTHER; note = 2-fluororibose cytosine
  modified_base 14..15: mod_base = OTHER; note = S-phosphorothioate
  modified_base 15: mod_base = OTHER; note = 2-O-methylribose adenine
  modified_base 15..16: mod_base = OTHER; note = S-phosphorothioate
  modified_base 16: mod_base = OTHER; note = 2-fluororibose guanine
  modified_base 16..17: mod_base = OTHER; note = S-phosphorothioate
  modified_base 17: mod_base = cm
  modified_base 17..18: mod_base = OTHER; note = S-phosphorothioate
  modified_base 18: mod_base = OTHER; note = 2-fluororibose adenine
  modified_base 18..19: mod_base = OTHER; note S-N-(1,3-dimethylimidazolidin-2-ylidene)phosphoramidate
  modified_base 19: mod_base = cm
  modified_base 19..20: mod_base = OTHER; note = S-phosphorothioate
  modified_base 20: mod_base = OTHER; note = 2-fluororibose adenine
  modified_base 20..21: mod_base = OTHER; note = S-phosphorothioate
  modified_base 21: mod_base = gm
  modified_base 21..22: mod_base = OTHER; note = S-phosphorothioate
  modified_base 22: mod_base = um
  modified_base 22..23: mod_base = OTHER; note = S-phosphorothioate
  modified_base 23: mod_base = um
  source 1..23: mol_type = other RNA
tctacttgtgttacagcacagtt

SEQ ID NO: 919 - RNA, 23 nt, synthetic construct
  modified_base 1: mod_base = OTHER; note = ribose thymine
  source 1..23: mol_type = other RNA
tctacttgtgttacagcacagtt

SEQ ID NO: 920 - RNA, 23 nt, synthetic construct
  misc_feature 1..23: note = Synthetic: SSR-0106519
  modified_base 1: mod_base = OTHER; note = phosphate linked to the 5' end of 5-(R)-methyl-5-deoxy-2-O-methylribose uracil
  modified_base 1..2: mod_base = OTHER; note = R-phosphorothioate
  modified_base 2: mod_base = OTHER; note = 2-fluororibose cytosine
  modified_base 2..3: mod_base = OTHER; note = S-phosphorothioate
  modified_base 3: mod_base = um
  modified_base 3..4: mod_base = OTHER; note S-N-(1-(4-dimethylamino-butyl)-3-methylimidazolidin-2-ylide ne)phosphoramidate
  modified_base 4: mod_base = OTHER; note = 2-fluororibose adenine
  modified_base 5: mod_base = cm
  modified_base 6: mod_base = OTHER; note = 2-fluororibose uracil
  modified_base 7: mod_base = um
  modified_base 7..8: mod_base = OTHER; note S-N-(1-(4-dimethylamino-butyl)-3-methylimidazolidin-2-ylide ne)phosphoramidate
  modified_base 8: mod_base = OTHER; note = 2-fluororibose guanine
  modified_base 9: mod_base = um
  modified_base 10: mod_base = OTHER; note = 2-fluororibose guanine
  modified_base 11: mod_base = um
  modified_base 12: mod_base = um
  modified_base 13: mod_base = OTHER; note = 2-O-methylribose adenine
  modified_base 13..14: mod_base = OTHER; note = S-phosphorothioate
  modified_base 14: mod_base = OTHER; note = 2-fluororibose cytosine
  modified_base 14..15: mod_base = OTHER; note = S-phosphorothioate
  modified_base 15: mod_base = OTHER; note = 2-O-methylribose adenine
  modified_base 15..16: mod_base = OTHER; note = S-phosphorothioate
  modified_base 16: mod_base = OTHER; note = 2-fluororibose guanine
  modified_base 16..17: mod_base = OTHER; note = S-phosphorothioate
  modified_base 17: mod_base = cm
  modified_base 17..18: mod_base = OTHER; note = S-phosphorothioate
  modified_base 18: mod_base = OTHER; note = 2-fluororibose adenine
  modified_base 18..19: mod_base = OTHER; note S-N-(1-(4-dimethylamino-butyl)-3-methylimidazolidin-2-ylide ne)phosphoramidate
  modified_base 19: mod_base = cm
  modified_base 19..20: mod_base = OTHER; note = S-phosphorothioate
  modified_base 20: mod_base = OTHER; note = 2-fluororibose adenine
  modified_base 20..21: mod_base = OTHER; note = S-phosphorothioate
  modified_base 21: mod_base = gm
  modified_base 21..22: mod_base = OTHER; note = S-phosphorothioate
  modified_base 22: mod_base = um
  modified_base 22..23: mod_base = OTHER; note = S-phosphorothioate
  modified_base 23: mod_base = um
  source 1..23: mol_type = other RNA
tctacttgtgttacagcacagtt

SEQ ID NO: 921 - RNA, 23 nt, synthetic construct
  misc_feature 1..23: note = Synthetic: SSR-0106520
  modified_base 1: mod_base = um
  modified_base 1..2: mod_base = OTHER; note = phosphorothioate
  modified_base 2: mod_base = OTHER; note = 2-fluororibose uracil
  modified_base 2..3: mod_base = OTHER; note = phosphorothioate
  modified_base 3: mod_base = OTHER; note = 2-O-methylribose adenine
  modified_base 4: mod_base = OTHER; note = 2-fluororibose uracil
  modified_base 5: mod_base = OTHER; note = 2-O-methylribose adenine
  modified_base 6: mod_base = OTHER; note = 2-fluororibose guanine
  modified_base 7: mod_base = OTHER; note = 2,3-dideoxy-Beta-D-glucopyranose adenine
  modified_base 8: mod_base = gm
  modified_base 9: mod_base = cm
  modified_base 10: mod_base = OTHER; note = 2-O-methylribose adenine
  modified_base 11: mod_base = OTHER; note = 2-fluororibose adenine
  modified_base 12: mod_base = gm
  modified_base 13: mod_base = OTHER; note = 2-O-methylribose adenine
  modified_base 14: mod_base = OTHER; note = 2-fluororibose adenine
  modified_base 15: mod_base = cm
  modified_base 16: mod_base = OTHER; note = 2-fluororibose adenine
  modified_base 17: mod_base = cm
  modified_base 18: mod_base = um
  modified_base 19: mod_base = gm
  modified_base 20: mod_base = um
  modified_base 21: mod_base = um
  modified_base 21..22: mod_base = OTHER; note = phosphorothioate
  modified_base 22: mod_base = um
  modified_base 22..23: mod_base = OTHER; note = phosphorothioate
  modified_base 23: mod_base = um
  source 1..23: mol_type = other RNA
ttatagagcaagaacactgtttt

SEQ ID NO: 922 - RNA, 23 nt, synthetic construct
  misc_feature 1..23: note = Synthetic: SSR-0106521
  modified_base 1: mod_base = OTHER; note = 2,3-dideoxy-Beta-D-glucopyranose thymine
  modified_base 1..2: mod_base = OTHER; note = S-phosphorothioate
  modified_base 2: mod_base = OTHER; note = 2-fluororibose uracil
  modified_base 2..3: mod_base = OTHER; note = R-phosphorothioate
  modified_base 3: mod_base = OTHER; note = 2-O-methylribose adenine
  modified_base 3..4: mod_base = OTHER; note S-N-(1,3-dimethylimidazolidin-2-ylidene)phosphoramidate
  modified_base 4: mod_base = OTHER; note = 2-fluororibose uracil
  modified_base 5: mod_base = OTHER; note = 2-O-methylribose adenine
  modified_base 6: mod_base = OTHER; note = 2-fluororibose guanine
  modified_base 7: mod_base = OTHER; note = 2-O-methylribose adenine
  modified_base 8: mod_base = gm
  modified_base 9: mod_base = cm
  modified_base 10: mod_base = OTHER; note = 2-O-methylribose adenine
  modified_base 10..11: mod_base = OTHER; note S-N-(1,3-dimethylimidazolidin-2-ylidene)phosphoramidate
  modified_base 11: mod_base = OTHER; note = 2-fluororibose adenine
  modified_base 12: mod_base = gm
  modified_base 13: mod_base = OTHER; note = 2-O-methylribose adenine
  modified_base 14: mod_base = OTHER; note = 2-fluororibose adenine
  modified_base 15: mod_base = cm
  modified_base 16: mod_base = OTHER; note = 2-fluororibose adenine
  modified_base 17: mod_base = cm
  modified_base 18: mod_base = um
  modified_base 19: mod_base = gm
  modified_base 20: mod_base = um
  modified_base 21: mod_base = um
  modified_base 21..22: mod_base = OTHER; note = S-phosphorothioate
  modified_base 22: mod_base = um
  modified_base 22..23: mod_base = OTHER; note = S-phosphorothioate
  modified_base 23: mod_base = um
  source 1..23: mol_type = other RNA
ttatagagcaagaacactgtttt

SEQ ID NO: 923 - RNA, 23 nt, synthetic construct
  misc_feature 1..23: note = Synthetic: SSR-0106522
  modified_base 1: mod_base = um
  modified_base 1..2: mod_base = OTHER; note = S-phosphorothioate
  modified_base 2: mod_base = OTHER; note = 2,3-dideoxy-Beta-D-glucopyranose thymine
  modified_base 2..3: mod_base = OTHER; note = R-phosphorothioate
  modified_base 3: mod_base = OTHER; note = 2-O-methylribose adenine
  modified_base 3..4: mod_base = OTHER; note S-N-(1,3-dimethylimidazolidin-2-ylidene)phosphoramidate
  modified_base 4: mod_base = OTHER; note = 2-fluororibose uracil
  modified_base 5: mod_base = OTHER; note = 2-O-methylribose adenine
  modified_base 6: mod_base = OTHER; note = 2-fluororibose guanine
  modified_base 7: mod_base = OTHER; note = 2-O-methylribose adenine
  modified_base 8: mod_base = gm
  modified_base 9: mod_base = cm
  modified_base 10: mod_base = OTHER; note = 2-O-methylribose adenine
  modified_base 10..11: mod_base = OTHER; note S-N-(1,3-dimethylimidazolidin-2-ylidene)phosphoramidate
  modified_base 11: mod_base = OTHER; note = 2-fluororibose adenine
  modified_base 12: mod_base = gm
  modified_base 13: mod_base = OTHER; note = 2-O-methylribose adenine
  modified_base 14: mod_base = OTHER; note = 2-fluororibose adenine
  modified_base 15: mod_base = cm
  modified_base 16: mod_base = OTHER; note = 2-fluororibose adenine
  modified_base 17: mod_base = cm
  modified_base 18: mod_base = um
  modified_base 19: mod_base = gm
  modified_base 20: mod_base = um
  modified_base 21: mod_base = um
  modified_base 21..22: mod_base = OTHER; note = S-phosphorothioate
  modified_base 22: mod_base = um
  modified_base 22..23: mod_base = OTHER; note = S-phosphorothioate
  modified_base 23: mod_base = um
  source 1..23: mol_type = other RNA
ttatagagcaagaacactgtttt

SEQ ID NO: 924 - RNA, 23 nt, synthetic construct
  misc_feature 1..23: note = Synthetic: SSR-0106523
  modified_base 1: mod_base = um
  modified_base 1..2: mod_base = OTHER; note = S-phosphorothioate
  modified_base 2: mod_base = OTHER; note = 2-fluororibose uracil
  modified_base 2..3: mod_base = OTHER; note = R-phosphorothioate
  modified_base 3: mod_base = OTHER; note = 2-O-methylribose adenine
  modified_base 3..4: mod_base = OTHER; note S-N-(1,3-dimethylimidazolidin-2-ylidene)phosphoramidate
  modified_base 4: mod_base = OTHER; note = 2,3-dideoxy-Beta-D-glucopyranose thymine
  modified_base 5: mod_base = OTHER; note = 2-O-methylribose adenine
  modified_base 6: mod_base = OTHER; note = 2-fluororibose guanine
  modified_base 7: mod_base = OTHER; note = 2-O-methylribose adenine
  modified_base 8: mod_base = gm
  modified_base 9: mod_base = cm
  modified_base 10: mod_base = OTHER; note = 2-O-methylribose adenine
  modified_base 10..11: mod_base = OTHER; note S-N-(1,3-dimethylimidazolidin-2-ylidene)phosphoramidate
  modified_base 11: mod_base = OTHER; note = 2-fluororibose adenine
  modified_base 12: mod_base = gm
  modified_base 13: mod_base = OTHER; note = 2-O-methylribose adenine
  modified_base 14: mod_base = OTHER; note = 2-fluororibose adenine
  modified_base 15: mod_base = cm
  modified_base 16: mod_base = OTHER; note = 2-fluororibose adenine
  modified_base 17: mod_base = cm
  modified_base 18: mod_base = um
  modified_base 19: mod_base = gm
  modified_base 20: mod_base = um
  modified_base 21: mod_base = um
  modified_base 21..22: mod_base = OTHER; note = S-phosphorothioate
  modified_base 22: mod_base = um
  modified_base 22..23: mod_base = OTHER; note = S-phosphorothioate
  modified_base 23: mod_base = um
  source 1..23: mol_type = other RNA
ttatagagcaagaacactgtttt

SEQ ID NO: 925 - RNA, 23 nt, synthetic construct
  misc_feature 1..23: note = Synthetic: SSR-0106524
  modified_base 1: mod_base = um
  modified_base 1..2: mod_base = OTHER; note = S-phosphorothioate
  modified_base 2: mod_base = OTHER; note = 2-fluororibose uracil
  modified_base 2..3: mod_base = OTHER; note = R-phosphorothioate
  modified_base 3: mod_base = OTHER; note = 2-O-methylribose adenine
  modified_base 3..4: mod_base = OTHER; note S-N-(1,3-dimethylimidazolidin-2-ylidene)phosphoramidate
  modified_base 4: mod_base = OTHER; note = 2-fluororibose uracil
  modified_base 5: mod_base = OTHER; note = 2-O-methylribose adenine
  modified_base 6: mod_base = OTHER; note = 2,3-dideoxy-Beta-D-glucopyranose guanine
  modified_base 7: mod_base = OTHER; note = 2-O-methylribose adenine
  modified_base 8: mod_base = gm
  modified_base 9: mod_base = cm
  modified_base 10: mod_base = OTHER; note = 2-O-methylribose adenine
  modified_base 10..11: mod_base = OTHER; note S-N-(1,3-dimethylimidazolidin-2-ylidene)phosphoramidate
  modified_base 11: mod_base = OTHER; note = 2-fluororibose adenine
  modified_base 12: mod_base = gm
  modified_base 13: mod_base = OTHER; note = 2-O-methylribose adenine
  modified_base 14: mod_base = OTHER; note = 2-fluororibose adenine
  modified_base 15: mod_base = cm
  modified_base 16: mod_base = OTHER; note = 2-fluororibose adenine
  modified_base 17: mod_base = cm
  modified_base 18: mod_base = um
  modified_base 19: mod_base = gm
  modified_base 20: mod_base = um
  modified_base 21: mod_base = um
  modified_base 21..22: mod_base = OTHER; note = S-phosphorothioate
  modified_base 22: mod_base = um
  modified_base 22..23: mod_base = OTHER; note = S-phosphorothioate
  modified_base 23: mod_base = um
  source 1..23: mol_type = other RNA
ttatagagcaagaacactgtttt

SEQ ID NO: 926 - RNA, 23 nt, synthetic construct
  misc_feature 1..23: note = Synthetic: SSR-0106525
  modified_base 1: mod_base = um
  modified_base 1..2: mod_base = OTHER; note = S-phosphorothioate
  modified_base 2: mod_base = OTHER; note = 2-fluororibose uracil
  modified_base 2..3: mod_base = OTHER; note = R-phosphorothioate
  modified_base 3: mod_base = OTHER; note = 2-O-methylribose adenine
  modified_base 3..4: mod_base = OTHER; note S-N-(1,3-dimethylimidazolidin-2-ylidene)phosphoramidate
  modified_base 4: mod_base = OTHER; note = 2-fluororibose uracil
  modified_base 5: mod_base = OTHER; note = 2-O-methylribose adenine
  modified_base 6: mod_base = OTHER; note = 2-fluororibose guanine
  modified_base 7: mod_base = OTHER; note = 2-O-methylribose adenine
  modified_base 8: mod_base = OTHER; note = 2,3-dideoxy-Beta-D-glucopyranose guanine
  modified_base 9: mod_base = cm
  modified_base 10: mod_base = OTHER; note = 2-O-methylribose adenine
  modified_base 10..11: mod_base = OTHER; note S-N-(1,3-dimethylimidazolidin-2-ylidene)phosphoramidate
  modified_base 11: mod_base = OTHER; note = 2-fluororibose adenine
  modified_base 12: mod_base = gm
  modified_base 13: mod_base = OTHER; note = 2-O-methylribose adenine
  modified_base 14: mod_base = OTHER; note = 2-fluororibose adenine
  modified_base 15: mod_base = cm
  modified_base 16: mod_base = OTHER; note = 2-fluororibose adenine
  modified_base 17: mod_base = cm
  modified_base 18: mod_base = um
  modified_base 19: mod_base = gm
  modified_base 20: mod_base = um
  modified_base 21: mod_base = um
  modified_base 21..22: mod_base = OTHER; note = S-phosphorothioate
  modified_base 22: mod_base = um
  modified_base 22..23: mod_base = OTHER; note = S-phosphorothioate
  modified_base 23: mod_base = um
  source 1..23: mol_type = other RNA
ttatagagcaagaacactgtttt

SEQ ID NO: 927 - RNA, 23 nt, synthetic construct
  misc_feature 1..23: note = Synthetic: SSR-0106526
  modified_base 1: mod_base = um
  modified_base 1..2: mod_base = OTHER; note = S-phosphorothioate
  modified_base 2: mod_base = OTHER; note = 2-fluororibose uracil
  modified_base 2..3: mod_base = OTHER; note = R-phosphorothioate
  modified_base 3: mod_base = OTHER; note = 2-O-methylribose adenine
  modified_base 3..4: mod_base = OTHER; note S-N-(1,3-dimethylimidazolidin-2-ylidene)phosphoramidate
  modified_base 4: mod_base = OTHER; note = 2-fluororibose uracil
  modified_base 5: mod_base = OTHER; note = 2-O-methylribose adenine
  modified_base 6: mod_base = OTHER; note = 2-fluororibose guanine
  modified_base 7: mod_base = OTHER; note = 2-O-methylribose adenine
  modified_base 8: mod_base = gm
  modified_base 9: mod_base = OTHER; note = 2,3-dideoxy-Beta-D-glucopyranose cytosine
  modified_base 10: mod_base = OTHER; note = 2-O-methylribose adenine
  modified_base 10..11: mod_base = OTHER; note S-N-(1,3-dimethylimidazolidin-2-ylidene)phosphoramidate
  modified_base 11: mod_base = OTHER; note = 2-fluororibose adenine
  modified_base 12: mod_base = gm
  modified_base 13: mod_base = OTHER; note = 2-O-methylribose adenine
  modified_base 14: mod_base = OTHER; note = 2-fluororibose adenine
  modified_base 15: mod_base = cm
  modified_base 16: mod_base = OTHER; note = 2-fluororibose adenine
  modified_base 17: mod_base = cm
  modified_base 18: mod_base = um
  modified_base 19: mod_base = gm
  modified_base 20: mod_base = um
  modified_base 21: mod_base = um
  modified_base 21..22: mod_base = OTHER; note = S-phosphorothioate
  modified_base 22: mod_base = um
  modified_base 22..23: mod_base = OTHER; note = S-phosphorothioate
  modified_base 23: mod_base = um
  source 1..23: mol_type = other RNA
ttatagagcaagaacactgtttt

SEQ ID NO: 928 - RNA, 23 nt, synthetic construct
  misc_feature 1..23: note = Synthetic: SSR-0106527
  modified_base 1: mod_base = um
  modified_base 1..2: mod_base = OTHER; note = S-phosphorothioate
  modified_base 2: mod_base = OTHER; note = 2-fluororibose uracil
  modified_base 2..3: mod_base = OTHER; note = R-phosphorothioate
  modified_base 3: mod_base = OTHER; note = 2-O-methylribose adenine
  modified_base 3..4: mod_base = OTHER; note S-N-(1,3-dimethylimidazolidin-2-ylidene)phosphoramidate
  modified_base 4: mod_base = OTHER; note = 2-fluororibose uracil
  modified_base 5: mod_base = OTHER; note = 2-O-methylribose adenine
  modified_base 6: mod_base = OTHER; note = 2-fluororibose guanine
  modified_base 7: mod_base = OTHER; note = 2-O-methylribose adenine
  modified_base 8: mod_base = gm
  modified_base 9: mod_base = cm
  modified_base 10: mod_base = OTHER; note = 2-O-methylribose adenine
  modified_base 10..11: mod_base = OTHER; note S-N-(1,3-dimethylimidazolidin-2-ylidene)phosphoramidate
  modified_base 11: mod_base = OTHER; note = 2,3-dideoxy-Beta-D-glucopyranose adenine
  modified_base 12: mod_base = gm
  modified_base 13: mod_base = OTHER; note = 2-O-methylribose adenine
  modified_base 14: mod_base = OTHER; note = 2-fluororibose adenine
  modified_base 15: mod_base = cm
  modified_base 16: mod_base = OTHER; note = 2-fluororibose adenine
  modified_base 17: mod_base = cm
  modified_base 18: mod_base = um
  modified_base 19: mod_base = gm
  modified_base 20: mod_base = um
  modified_base 21: mod_base = um
  modified_base 21..22: mod_base = OTHER; note = S-phosphorothioate
  modified_base 22: mod_base = um
  modified_base 22..23: mod_base = OTHER; note = S-phosphorothioate
  modified_base 23: mod_base = um
  source 1..23: mol_type = other RNA
ttatagagcaagaacactgtttt

SEQ ID NO: 929 - RNA, 23 nt, synthetic construct
  misc_feature 1..23: note = Synthetic: SSR-0106528
  modified_base 1: mod_base = um
  modified_base 1..2: mod_base = OTHER; note = S-phosphorothioate
  modified_base 2: mod_base = OTHER; note = 2-fluororibose uracil
  modified_base 2..3: mod_base = OTHER; note = R-phosphorothioate
  modified_base 3: mod_base = OTHER; note = 2-O-methylribose adenine
  modified_base 3..4: mod_base = OTHER; note S-N-(1,3-dimethylimidazolidin-2-ylidene)phosphoramidate
  modified_base 4: mod_base = OTHER; note = 2-fluororibose uracil
  modified_base 5: mod_base = OTHER; note = 2-O-methylribose adenine
  modified_base 6: mod_base = OTHER; note = 2-fluororibose guanine
  modified_base 7: mod_base = OTHER; note = 2-O-methylribose adenine
  modified_base 8: mod_base = gm
  modified_base 9: mod_base = cm
  modified_base 10: mod_base = OTHER; note = 2-O-methylribose adenine
  modified_base 10..11: mod_base = OTHER; note S-N-(1,3-dimethylimidazolidin-2-ylidene)phosphoramidate
  modified_base 11: mod_base = OTHER; note = 2-fluororibose adenine
  modified_base 12: mod_base = OTHER; note = 2,3-dideoxy-Beta-D-glucopyranose guanine
  modified_base 13: mod_base = OTHER; note = 2-O-methylribose adenine
  modified_base 14: mod_base = OTHER; note = 2-fluororibose adenine
  modified_base 15: mod_base = cm
  modified_base 16: mod_base = OTHER; note = 2-fluororibose adenine
  modified_base 17: mod_base = cm
  modified_base 18: mod_base = um
  modified_base 19: mod_base = gm
  modified_base 20: mod_base = um
  modified_base 21: mod_base = um
  modified_base 21..22: mod_base = OTHER; note = S-phosphorothioate
  modified_base 22: mod_base = um
  modified_base 22..23: mod_base = OTHER; note = S-phosphorothioate
  modified_base 23: mod_base = um
  source 1..23: mol_type = other RNA
ttatagagcaagaacactgtttt

SEQ ID NO: 930 - RNA, 23 nt, synthetic construct
  misc_feature 1..23: note = Synthetic: SSR-0106529
  modified_base 1: mod_base = um
  modified_base 1..2: mod_base = OTHER; note = S-phosphorothioate
  modified_base 2: mod_base = OTHER; note = 2-fluororibose uracil
  modified_base 2..3: mod_base = OTHER; note = R-phosphorothioate
  modified_base 3: mod_base = OTHER; note = 2-O-methylribose adenine
  modified_base 3..4: mod_base = OTHER; note S-N-(1,3-dimethylimidazolidin-2-ylidene)phosphoramidate
  modified_base 4: mod_base = OTHER; note = 2-fluororibose uracil
  modified_base 5: mod_base = OTHER; note = 2-O-methylribose adenine
  modified_base 6: mod_base = OTHER; note = 2-fluororibose guanine
  modified_base 7: mod_base = OTHER; note = 2-O-methylribose adenine
  modified_base 8: mod_base = gm
  modified_base 9: mod_base = cm
  modified_base 10: mod_base = OTHER; note = 2-O-methylribose adenine
  modified_base 10..11: mod_base = OTHER; note S-N-(1,3-dimethylimidazolidin-2-ylidene)phosphoramidate
  modified_base 11: mod_base = OTHER; note = 2-fluororibose adenine
  modified_base 12: mod_base = gm
  modified_base 13: mod_base = OTHER; note = 2,3-dideoxy-Beta-D-glucopyranose adenine
  modified_base 14: mod_base = OTHER; note = 2-fluororibose adenine
  modified_base 15: mod_base = cm
  modified_base 16: mod_base = OTHER; note = 2-fluororibose adenine
  modified_base 17: mod_base = cm
  modified_base 18: mod_base = um
  modified_base 19: mod_base = gm
  modified_base 20: mod_base = um
  modified_base 21: mod_base = um
  modified_base 21..22: mod_base = OTHER; note = S-phosphorothioate
  modified_base 22: mod_base = um
  modified_base 22..23: mod_base = OTHER; note = S-phosphorothioate
  modified_base 23: mod_base = um
  source 1..23: mol_type = other RNA
ttatagagcaagaacactgtttt

SEQ ID NO: 931 - RNA, 23 nt, synthetic construct
  misc_feature 1..23: note = Synthetic: SSR-0106530
  modified_base 1: mod_base = um
  modified_base 1..2: mod_base = OTHER; note = S-phosphorothioate
  modified_base 2: mod_base = OTHER; note = 2-fluororibose uracil
  modified_base 2..3: mod_base = OTHER; note = R-phosphorothioate
  modified_base 3: mod_base = OTHER; note = 2-O-methylribose adenine
  modified_base 3..4: mod_base = OTHER; note S-N-(1,3-dimethylimidazolidin-2-ylidene)phosphoramidate
  modified_base 4: mod_base = OTHER; note = 2-fluororibose uracil
  modified_base 5: mod_base = OTHER; note = 2-O-methylribose adenine
  modified_base 6: mod_base = OTHER; note = 2-fluororibose guanine
  modified_base 7: mod_base = OTHER; note = 2-O-methylribose adenine
  modified_base 8: mod_base = gm
  modified_base 9: mod_base = cm
  modified_base 10: mod_base = OTHER; note = 2-O-methylribose adenine
  modified_base 10..11: mod_base = OTHER; note S-N-(1,3-dimethylimidazolidin-2-ylidene)phosphoramidate
  modified_base 11: mod_base = OTHER; note = 2-fluororibose adenine
  modified_base 12: mod_base = gm
  modified_base 13: mod_base = OTHER; note = 2-O-methylribose adenine
  modified_base 14: mod_base = OTHER; note = 2,3-dideoxy-Beta-D-glucopyranose adenine
  modified_base 15: mod_base = cm
  modified_base 16: mod_base = OTHER; note = 2-fluororibose adenine
  modified_base 17: mod_base = cm
  modified_base 18: mod_base = um
  modified_base 19: mod_base = gm
  modified_base 20: mod_base = um
  modified_base 21: mod_base = um
  modified_base 21..22: mod_base = OTHER; note = S-phosphorothioate
  modified_base 22: mod_base = um
  modified_base 22..23: mod_base = OTHER; note = S-phosphorothioate
  modified_base 23: mod_base = um
  source 1..23: mol_type = other RNA
ttatagagcaagaacactgtttt

SEQ ID NO: 932 - RNA, 23 nt, synthetic construct
  misc_feature 1..23: note = Synthetic: SSR-0106531
  modified_base 1: mod_base = um
  modified_base 1..2: mod_base = OTHER; note = S-phosphorothioate
  modified_base 2: mod_base = OTHER; note = 2-fluororibose uracil
  modified_base 2..3: mod_base = OTHER; note = R-phosphorothioate
  modified_base 3: mod_base = OTHER; note = 2-O-methylribose adenine
  modified_base 3..4: mod_base = OTHER; note S-N-(1,3-dimethylimidazolidin-2-ylidene)phosphoramidate
  modified_base 4: mod_base = OTHER; note = 2-fluororibose uracil
  modified_base 5: mod_base = OTHER; note = 2-O-methylribose adenine
  modified_base 6: mod_base = OTHER; note = 2-fluororibose guanine
  modified_base 7: mod_base = OTHER; note = 2-O-methylribose adenine
  modified_base 8: mod_base = gm
  modified_base 9: mod_base = cm
  modified_base 10: mod_base = OTHER; note = 2-O-methylribose adenine
  modified_base 10..11: mod_base = OTHER; note S-N-(1,3-dimethylimidazolidin-2-ylidene)phosphoramidate
  modified_base 11: mod_base = OTHER; note = 2-fluororibose adenine
  modified_base 12: mod_base = gm
  modified_base 13: mod_base = OTHER; note = 2-O-methylribose adenine
  modified_base 14: mod_base = OTHER; note = 2-fluororibose adenine
  modified_base 15: mod_base = OTHER; note = 2,3-dideoxy-Beta-D-glucopyranose cytosine
  modified_base 16: mod_base = OTHER; note = 2-fluororibose adenine
  modified_base 17: mod_base = cm
  modified_base 18: mod_base = um
  modified_base 19: mod_base = gm
  modified_base 20: mod_base = um
  modified_base 21: mod_base = um
  modified_base 21..22: mod_base = OTHER; note = S-phosphorothioate
  modified_base 22: mod_base = um
  modified_base 22..23: mod_base = OTHER; note = S-phosphorothioate
  modified_base 23: mod_base = um
  source 1..23: mol_type = other RNA
ttatagagcaagaacactgtttt

SEQ ID NO: 933 - RNA, 23 nt, synthetic construct
  misc_feature 1..23: note = Synthetic: SSR-0106532
  modified_base 1: mod_base = um
  modified_base 1..2: mod_base = OTHER; note = S-phosphorothioate
  modified_base 2: mod_base = OTHER; note = 2-fluororibose uracil
  modified_base 2..3: mod_base = OTHER; note = R-phosphorothioate
  modified_base 3: mod_base = OTHER; note = 2-O-methylribose adenine
  modified_base 3..4: mod_base = OTHER; note S-N-(1,3-dimethylimidazolidin-2-ylidene)phosphoramidate
  modified_base 4: mod_base = OTHER; note = 2-fluororibose uracil
  modified_base 5: mod_base = OTHER; note = 2-O-methylribose adenine
  modified_base 6: mod_base = OTHER; note = 2-fluororibose guanine
  modified_base 7: mod_base = OTHER; note = 2-O-methylribose adenine
  modified_base 8: mod_base = gm
  modified_base 9: mod_base = cm
  modified_base 10: mod_base = OTHER; note = 2-O-methylribose adenine
  modified_base 10..11: mod_base = OTHER; note S-N-(1,3-dimethylimidazolidin-2-ylidene)phosphoramidate
  modified_base 11: mod_base = OTHER; note = 2-fluororibose adenine
  modified_base 12: mod_base = gm
  modified_base 13: mod_base = OTHER; note = 2-O-methylribose adenine
  modified_base 14: mod_base = OTHER; note = 2-fluororibose adenine
  modified_base 15: mod_base = cm
  modified_base 16: mod_base = OTHER; note = 2,3-dideoxy-Beta-D-glucopyranose adenine
  modified_base 17: mod_base = cm
  modified_base 18: mod_base = um
  modified_base 19: mod_base = gm
  modified_base 20: mod_base = um
  modified_base 21: mod_base = um
  modified_base 21..22: mod_base = OTHER; note = S-phosphorothioate
  modified_base 22: mod_base = um
  modified_base 22..23: mod_base = OTHER; note = S-phosphorothioate
  modified_base 23: mod_base = um
  source 1..23: mol_type = other RNA
ttatagagcaagaacactgtttt

SEQ ID NO: 934 - RNA, 23 nt, synthetic construct
  misc_feature 1..23: note = Synthetic: SSR-0106533
  modified_base 1: mod_base = um
  modified_base 1..2: mod_base = OTHER; note = S-phosphorothioate
  modified_base 2: mod_base = OTHER; note = 2-fluororibose uracil
  modified_base 2..3: mod_base = OTHER; note = R-phosphorothioate
  modified_base 3: mod_base = OTHER; note = 2-O-methylribose adenine
  modified_base 3..4: mod_base = OTHER; note S-N-(1,3-dimethylimidazolidin-2-ylidene)phosphoramidate
  modified_base 4: mod_base = OTHER; note = 2-fluororibose uracil
  modified_base 5: mod_base = OTHER; note = 2-O-methylribose adenine
  modified_base 6: mod_base = OTHER; note = 2-fluororibose guanine
  modified_base 7: mod_base = OTHER; note = 2-O-methylribose adenine
  modified_base 8: mod_base = gm
  modified_base 9: mod_base = cm
  modified_base 10: mod_base = OTHER; note = 2-O-methylribose adenine
  modified_base 10..11: mod_base = OTHER; note S-N-(1,3-dimethylimidazolidin-2-ylidene)phosphoramidate
  modified_base 11: mod_base = OTHER; note = 2-fluororibose adenine
  modified_base 12: mod_base = gm
  modified_base 13: mod_base = OTHER; note = 2-O-methylribose adenine
  modified_base 14: mod_base = OTHER; note = 2-fluororibose adenine
  modified_base 15: mod_base = cm
  modified_base 16: mod_base = OTHER; note = 2-fluororibose adenine
  modified_base 17: mod_base = OTHER; note = 2,3-dideoxy-Beta-D-glucopyranose cytosine
  modified_base 18: mod_base = um
  modified_base 19: mod_base = gm
  modified_base 20: mod_base = um
  modified_base 21: mod_base = um
  modified_base 21..22: mod_base = OTHER; note = S-phosphorothioate
  modified_base 22: mod_base = um
  modified_base 22..23: mod_base = OTHER; note = S-phosphorothioate
  modified_base 23: mod_base = um
  source 1..23: mol_type = other RNA
ttatagagcaagaacactgtttt

SEQ ID NO: 935 - RNA, 23 nt, synthetic construct
  misc_feature 1..23: note = Synthetic: SSR-0106534
  modified_base 1: mod_base = um
  modified_base 1..2: mod_base = OTHER; note = S-phosphorothioate
  modified_base 2: mod_base = OTHER; note = 2-fluororibose uracil
  modified_base 2..3: mod_base = OTHER; note = R-phosphorothioate
  modified_base 3: mod_base = OTHER; note = 2-O-methylribose adenine
  modified_base 3..4: mod_base = OTHER; note S-N-(1,3-dimethylimidazolidin-2-ylidene)phosphoramidate
  modified_base 4: mod_base = OTHER; note = 2-fluororibose uracil
  modified_base 5: mod_base = OTHER; note = 2-O-methylribose adenine
  modified_base 6: mod_base = OTHER; note = 2-fluororibose guanine
  modified_base 7: mod_base = OTHER; note = 2-O-methylribose adenine
  modified_base 8: mod_base = gm
  modified_base 9: mod_base = cm
  modified_base 10: mod_base = OTHER; note = 2-O-methylribose adenine
  modified_base 10..11: mod_base = OTHER; note S-N-(1,3-dimethylimidazolidin-2-ylidene)phosphoramidate
  modified_base 11: mod_base = OTHER; note = 2-fluororibose adenine
  modified_base 12: mod_base = gm
  modified_base 13: mod_base = OTHER; note = 2-O-methylribose adenine
  modified_base 14: mod_base = OTHER; note = 2-fluororibose adenine
  modified_base 15: mod_base = cm
  modified_base 16: mod_base = OTHER; note = 2-fluororibose adenine
  modified_base 17: mod_base = cm
  modified_base 18: mod_base = OTHER; note = 2,3-dideoxy-Beta-D-glucopyranose thymine
  modified_base 19: mod_base = gm
  modified_base 20: mod_base = um
  modified_base 21: mod_base = um
  modified_base 21..22: mod_base = OTHER; note = S-phosphorothioate
  modified_base 22: mod_base = um
  modified_base 22..23: mod_base = OTHER; note = S-phosphorothioate
  modified_base 23: mod_base = um
  source 1..23: mol_type = other RNA
ttatagagcaagaacactgtttt

SEQ ID NO: 936 - RNA, 23 nt, synthetic construct
  modified_base 18: mod_base = OTHER; note = ribose thymine
  source 1..23: mol_type = other RNA
ttatagagcaagaacactgtttt

SEQ ID NO: 937 - RNA, 23 nt, synthetic construct
  misc_feature 1..23: note = Synthetic: SSR-0106535
  modified_base 1: mod_base = um
  modified_base 1..2: mod_base = OTHER; note = S-phosphorothioate
  modified_base 2: mod_base = OTHER; note = 2-fluororibose uracil
  modified_base 2..3: mod_base = OTHER; note = R-phosphorothioate
  modified_base 3: mod_base = OTHER; note = 2-O-methylribose adenine
  modified_base 3..4: mod_base = OTHER; note S-N-(1,3-dimethylimidazolidin-2-ylidene)phosphoramidate
  modified_base 4: mod_base = OTHER; note = 2-fluororibose uracil
  modified_base 5: mod_base = OTHER; note = 2-O-methylribose adenine
  modified_base 6: mod_base = OTHER; note = 2-fluororibose guanine
  modified_base 7: mod_base = OTHER; note = 2-O-methylribose adenine
  modified_base 8: mod_base = gm
  modified_base 9: mod_base = cm
  modified_base 10: mod_base = OTHER; note = 2-O-methylribose adenine
  modified_base 10..11: mod_base = OTHER; note S-N-(1,3-dimethylimidazolidin-2-ylidene)phosphoramidate
  modified_base 11: mod_base = OTHER; note = 2-fluororibose adenine
  modified_base 12: mod_base = gm
  modified_base 13: mod_base = OTHER; note = 2-O-methylribose adenine
  modified_base 14: mod_base = OTHER; note = 2-fluororibose adenine
  modified_base 15: mod_base = cm
  modified_base 16: mod_base = OTHER; note = 2-fluororibose adenine
  modified_base 17: mod_base = cm
  modified_base 18: mod_base = um
  modified_base 19: mod_base = OTHER; note = 2,3-dideoxy-Beta-D-glucopyranose guanine
  modified_base 20: mod_base = um
  modified_base 21: mod_base = um
  modified_base 21..22: mod_base = OTHER; note = S-phosphorothioate
  modified_base 22: mod_base = um
  modified_base 22..23: mod_base = OTHER; note = S-phosphorothioate
  modified_base 23: mod_base = um
  source 1..23: mol_type = other RNA
ttatagagcaagaacactgtttt

SEQ ID NO: 938 - RNA, 23 nt, synthetic construct
  misc_feature 1..23: note = Synthetic: SSR-0106536
  modified_base 1: mod_base = um
  modified_base 1..2: mod_base = OTHER; note = S-phosphorothioate
  modified_base 2: mod_base = OTHER; note = 2-fluororibose uracil
  modified_base 2..3: mod_base = OTHER; note = R-phosphorothioate
  modified_base 3: mod_base = OTHER; note = 2-O-methylribose adenine
  modified_base 3..4: mod_base = OTHER; note S-N-(1,3-dimethylimidazolidin-2-ylidene)phosphoramidate
  modified_base 4: mod_base = OTHER; note = 2-fluororibose uracil
  modified_base 5: mod_base = OTHER; note = 2-O-methylribose adenine
  modified_base 6: mod_base = OTHER; note = 2-fluororibose guanine
  modified_base 7: mod_base = OTHER; note = 2-O-methylribose adenine
  modified_base 8: mod_base = gm
  modified_base 9: mod_base = cm
  modified_base 10: mod_base = OTHER; note = 2-O-methylribose adenine
  modified_base 10..11: mod_base = OTHER; note S-N-(1,3-dimethylimidazolidin-2-ylidene)phosphoramidate
  modified_base 11: mod_base = OTHER; note = 2-fluororibose adenine
  modified_base 12: mod_base = gm
  modified_base 13: mod_base = OTHER; note = 2-O-methylribose adenine
  modified_base 14: mod_base = OTHER; note = 2-fluororibose adenine
  modified_base 15: mod_base = cm
  modified_base 16: mod_base = OTHER; note = 2-fluororibose adenine
  modified_base 17: mod_base = cm
  modified_base 18: mod_base = um
  modified_base 19: mod_base = gm
  modified_base 20: mod_base = OTHER; note = 2,3-dideoxy-Beta-D-glucopyranose thymine
  modified_base 21: mod_base = um
  modified_base 21..22: mod_base = OTHER; note = S-phosphorothioate
  modified_base 22: mod_base = um
  modified_base 22..23: mod_base = OTHER; note = S-phosphorothioate
  modified_base 23: mod_base = um
  source 1..23: mol_type = other RNA
ttatagagcaagaacactgtttt

SEQ ID NO: 939 - RNA, 23 nt, synthetic construct
  modified_base 20: mod_base = OTHER; note = ribose thymine
  source 1..23: mol_type = other RNA
ttatagagcaagaacactgtttt

SEQ ID NO: 940 - RNA, 23 nt, synthetic construct
  misc_feature 1..23: note = Synthetic: SSR-0106537
  modified_base 1: mod_base = um
  modified_base 1..2: mod_base = OTHER; note = S-phosphorothioate
  modified_base 2: mod_base = OTHER; note = 2-fluororibose uracil
  modified_base 2..3: mod_base = OTHER; note = R-phosphorothioate
  modified_base 3: mod_base = OTHER; note = 2-O-methylribose adenine
  modified_base 3..4: mod_base = OTHER; note S-N-(1,3-dimethylimidazolidin-2-ylidene)phosphoramidate
  modified_base 4: mod_base = OTHER; note = 2-fluororibose uracil
  modified_base 5: mod_base = OTHER; note = 2-O-methylribose adenine
  modified_base 6: mod_base = OTHER; note = 2-fluororibose guanine
  modified_base 7: mod_base = OTHER; note = 2-O-methylribose adenine
  modified_base 8: mod_base = gm
  modified_base 9: mod_base = cm
  modified_base 10: mod_base = OTHER; note = 2-O-methylribose adenine
  modified_base 10..11: mod_base = OTHER; note S-N-(1,3-dimethylimidazolidin-2-ylidene)phosphoramidate
  modified_base 11: mod_base = OTHER; note = 2-fluororibose adenine
  modified_base 12: mod_base = gm
  modified_base 13: mod_base = OTHER; note = 2-O-methylribose adenine
  modified_base 14: mod_base = OTHER; note = 2-fluororibose adenine
  modified_base 15: mod_base = cm
  modified_base 16: mod_base = OTHER; note = 2-fluororibose adenine
  modified_base 17: mod_base = cm
  modified_base 18: mod_base = um
  modified_base 19: mod_base = gm
  modified_base 20: mod_base = um
  modified_base 21: mod_base = OTHER; note = 2,3-dideoxy-Beta-D-glucopyranose thymine
  modified_base 21..22: mod_base = OTHER; note = S-phosphorothioate
  modified_base 22: mod_base = um
  modified_base 22..23: mod_base = OTHER; note = S-phosphorothioate
  modified_base 23: mod_base = um
  source 1..23: mol_type = other RNA
ttatagagcaagaacactgtttt

SEQ ID NO: 941 - RNA, 23 nt, synthetic construct
  modified_base 21: mod_base = OTHER; note = ribose thymine
  source 1..23: mol_type = other RNA
ttatagagcaagaacactgtttt

SEQ ID NO: 942 - RNA, 23 nt, synthetic construct
  misc_feature 1..23: note = Synthetic: SSR-0106538
  modified_base 1: mod_base = um
  modified_base 1..2: mod_base = OTHER; note = S-phosphorothioate
  modified_base 2: mod_base = OTHER; note = 2-fluororibose uracil
  modified_base 2..3: mod_base = OTHER; note = R-phosphorothioate
  modified_base 3: mod_base = OTHER; note = 2-O-methylribose adenine
  modified_base 3..4: mod_base = OTHER; note S-N-(1,3-dimethylimidazolidin-2-ylidene)phosphoramidate
  modified_base 4: mod_base = OTHER; note = 2-fluororibose uracil
  modified_base 5: mod_base = OTHER; note = 2-O-methylribose adenine
  modified_base 6: mod_base = OTHER; note = 2-fluororibose guanine
  modified_base 7: mod_base = OTHER; note = 2-O-methylribose adenine
  modified_base 8: mod_base = gm
  modified_base 9: mod_base = cm
  modified_base 10: mod_base = OTHER; note = 2-O-methylribose adenine
  modified_base 10..11: mod_base = OTHER; note S-N-(1,3-dimethylimidazolidin-2-ylidene)phosphoramidate
  modified_base 11: mod_base = OTHER; note = 2-fluororibose adenine
  modified_base 12: mod_base = gm
  modified_base 13: mod_base = OTHER; note = 2-O-methylribose adenine
  modified_base 14: mod_base = OTHER; note = 2-fluororibose adenine
  modified_base 15: mod_base = cm
  modified_base 16: mod_base = OTHER; note = 2-fluororibose adenine
  modified_base 17: mod_base = cm
  modified_base 18: mod_base = um
  modified_base 19: mod_base = gm
  modified_base 20: mod_base = um
  modified_base 21: mod_base = um
  modified_base 21..22: mod_base = OTHER; note = S-phosphorothioate
  modified_base 22: mod_base = OTHER; note = 2,3-dideoxy-Beta-D-glucopyranose thymine
  modified_base 22..23: mod_base = OTHER; note = S-phosphorothioate
  modified_base 23: mod_base = um
  source 1..23: mol_type = other RNA
ttatagagcaagaacactgtttt

SEQ ID NO: 943 - RNA, 23 nt, synthetic construct
  modified_base 22: mod_base = OTHER; note = ribose thymine
  source 1..23: mol_type = other RNA
ttatagagcaagaacactgtttt

SEQ ID NO: 944 - RNA, 23 nt, synthetic construct
  misc_feature 1..23: note = Synthetic: SSR-0106539
  modified_base 1: mod_base = um
  modified_base 1..2: mod_base = OTHER; note = S-phosphorothioate
  modified_base 2: mod_base = OTHER; note = 2-fluororibose uracil
  modified_base 2..3: mod_base = OTHER; note = R-phosphorothioate
  modified_base 3: mod_base = OTHER; note = 2-O-methylribose adenine
  modified_base 3..4: mod_base = OTHER; note S-N-(1,3-dimethylimidazolidin-2-ylidene)phosphoramidate
  modified_base 4: mod_base = OTHER; note = 2-fluororibose uracil
  modified_base 5: mod_base = OTHER; note = 2-O-methylribose adenine
  modified_base 6: mod_base = OTHER; note = 2-fluororibose guanine
  modified_base 7: mod_base = OTHER; note = 2-O-methylribose adenine
  modified_base 8: mod_base = gm
  modified_base 9: mod_base = cm
  modified_base 10: mod_base = OTHER; note = 2-O-methylribose adenine
  modified_base 10..11: mod_base = OTHER; note S-N-(1,3-dimethylimidazolidin-2-ylidene)phosphoramidate
  modified_base 11: mod_base = OTHER; note = 2-fluororibose adenine
  modified_base 12: mod_base = gm
  modified_base 13: mod_base = OTHER; note = 2-O-methylribose adenine
  modified_base 14: mod_base = OTHER; note = 2-fluororibose adenine
  modified_base 15: mod_base = cm
  modified_base 16: mod_base = OTHER; note = 2-fluororibose adenine
  modified_base 17: mod_base = cm
  modified_base 18: mod_base = um
  modified_base 19: mod_base = gm
  modified_base 20: mod_base = um
  modified_base 21: mod_base = um
  modified_base 21..22: mod_base = OTHER; note = S-phosphorothioate
  modified_base 22: mod_base = um
  modified_base 22..23: mod_base = OTHER; note = S-phosphorothioate
  modified_base 23: mod_base = OTHER; note = 2,3-dideoxy-Beta-D-glucopyranose thymine
  source 1..23: mol_type = other RNA
ttatagagcaagaacactgtttt

SEQ ID NO: 945 - RNA, 23 nt, synthetic construct
  modified_base 23: mod_base = OTHER; note = ribose thymine
  source 1..23: mol_type = other RNA
ttatagagcaagaacactgtttt

SEQ ID NO: 946 - RNA, 23 nt, synthetic construct
  misc_feature 1..23: note = Synthetic: SSR-0106584
  modified_base 1: mod_base = um
  modified_base 1..2: mod_base = OTHER; note = phosphorothioate
  modified_base 2: mod_base = OTHER; note = 2-fluororibose cytosine
  modified_base 2..3: mod_base = OTHER; note = phosphorothioate
  modified_base 3: mod_base = um
  modified_base 3..4: mod_base = OTHER; note = N-(1,3-dimethylimidazolidin-2-ylidene)phosphoramidate
  modified_base 4: mod_base = OTHER; note = 2-fluororibose adenine
  modified_base 5: mod_base = cm
  modified_base 6: mod_base = OTHER; note = 2-fluororibose uracil
  modified_base 7: mod_base = um
  modified_base 7..8: mod_base = OTHER; note = N-(1,3-dimethylimidazolidin-2-ylidene)phosphoramidate
  modified_base 8: mod_base = OTHER; note = 2-fluororibose guanine
  modified_base 9: mod_base = um
  modified_base 10: mod_base = OTHER; note = 2-fluororibose guanine
  modified_base 11: mod_base = um
  modified_base 12: mod_base = um
  modified_base 13: mod_base = OTHER; note = 2-O-methylribose adenine
  modified_base 13..14: mod_base = OTHER; note = phosphorothioate
  modified_base 14: mod_base = OTHER; note = 2-fluororibose cytosine
  modified_base 14..15: mod_base = OTHER; note = phosphorothioate
  modified_base 15: mod_base = OTHER; note = 2-O-methylribose adenine
  modified_base 15..16: mod_base = OTHER; note = phosphorothioate
  modified_base 16: mod_base = OTHER; note = 2-fluororibose guanine
  modified_base 16..17: mod_base = OTHER; note = phosphorothioate
  modified_base 17: mod_base = cm
  modified_base 17..18: mod_base = OTHER; note = phosphorothioate
  modified_base 18: mod_base = OTHER; note = 2-fluororibose adenine
  modified_base 18..19: mod_base = OTHER; note = N-(1,3-dimethylimidazolidin-2-ylidene)phosphoramidate
  modified_base 19: mod_base = cm
  modified_base 19..20: mod_base = OTHER; note = phosphorothioate
  modified_base 20: mod_base = OTHER; note = 2-fluororibose adenine
  modified_base 20..21: mod_base = OTHER; note = phosphorothioate
  modified_base 21: mod_base = gm
  modified_base 21..22: mod_base = OTHER; note = phosphorothioate
  modified_base 22: mod_base = um
  modified_base 22..23: mod_base = OTHER; note = phosphorothioate
  modified_base 23: mod_base = um
  source 1..23: mol_type = other RNA
tctacttgtgttacagcacagtt

SEQ ID NO: 947 - RNA, 23 nt, synthetic construct
  misc_feature 1..23: note = Synthetic: SSR-0106587
  modified_base 1: mod_base = OTHER; note = phosphate linked to the 5' end of 5-(R)-methyl-5-deoxy-2-O-methylribose uracil
  modified_base 1..2: mod_base = OTHER; note = R-phosphorothioate
  modified_base 2: mod_base = OTHER; note = 2-fluororibose cytosine
  modified_base 2..3: mod_base = OTHER; note = R-phosphorothioate
  modified_base 3: mod_base = cm
  modified_base 3..4: mod_base = OTHER; note S-N-(1,3-dimethylimidazolidin-2-ylidene)phosphoramidate
  modified_base 4: mod_base = OTHER; note = 2-fluororibose uracil
  modified_base 5: mod_base = um
  modified_base 6: mod_base = OTHER; note = 2-fluororibose cytosine
  modified_base 7: mod_base = cm
  modified_base 7..8: mod_base = OTHER; note S-N-(1,3-dimethylimidazolidin-2-ylidene)phosphoramidate
  modified_base 8: mod_base = OTHER; note = 2-fluororibose cytosine
  modified_base 9: mod_base = um
  modified_base 10: mod_base = OTHER; note = 2-fluororibose guanine
  modified_base 11: mod_base = OTHER; note = 2-O-methylribose adenine
  modified_base 12: mod_base = OTHER; note = 2-O-methylribose adenine
  modified_base 13: mod_base = gm
  modified_base 13..14: mod_base = OTHER; note = S-phosphorothioate
  modified_base 14: mod_base = OTHER; note = 2-fluororibose guanine
  modified_base 14..15: mod_base = OTHER; note = S-phosphorothioate
  modified_base 15: mod_base = um
  modified_base 15..16: mod_base = OTHER; note = S-phosphorothioate
  modified_base 16: mod_base = OTHER; note = 2-fluororibose uracil
  modified_base 16..17: mod_base = OTHER; note = S-phosphorothioate
  modified_base 17: mod_base = cm
  modified_base 17..18: mod_base = OTHER; note = S-phosphorothioate
  modified_base 18: mod_base = OTHER; note = 2-fluororibose cytosine
  modified_base 18..19: mod_base = OTHER; note S-N-(1,3-dimethylimidazolidin-2-ylidene)phosphoramidate
  modified_base 19: mod_base = um
  modified_base 19..20: mod_base = OTHER; note = S-phosphorothioate
  modified_base 20: mod_base = OTHER; note = 2-fluororibose cytosine
  modified_base 20..21: mod_base = OTHER; note = S-phosphorothioate
  modified_base 21: mod_base = cm
  modified_base 21..22: mod_base = OTHER; note = S-phosphorothioate
  modified_base 22: mod_base = um
  modified_base 22..23: mod_base = OTHER; note = S-phosphorothioate
  modified_base 23: mod_base = um
  source 1..23: mol_type = other RNA
tccttccctgaaggttcctcctt

SEQ ID NO: 948 - RNA, 23 nt, synthetic construct
  misc_feature 1..23: note = Synthetic: SSR-0106620
  modified_base 1: mod_base = OTHER; note = phosphate linked to the 5' end of 5-(R)-methyl-5-deoxy-2-O-methylribose uracil
  modified_base 1..2: mod_base = OTHER; note = R-phosphorothioate
  modified_base 2: mod_base = OTHER; note = 2-fluororibose uracil
  modified_base 2..3: mod_base = OTHER; note = R-phosphorothioate
  modified_base 3: mod_base = OTHER; note = 2-O-methylribose adenine
  modified_base 3..4: mod_base = OTHER; note S-N-(1,3-dimethylimidazolidin-2-ylidene)phosphoramidate
  modified_base 4: mod_base = OTHER; note = 2-fluororibose uracil
  modified_base 5: mod_base = OTHER; note = 2-O-methylribose adenine
  modified_base 6: mod_base = OTHER; note = 2-fluororibose guanine
  modified_base 7: mod_base = OTHER; note = 2-O-methylribose adenine
  modified_base 8: mod_base = gm
  modified_base 9: mod_base = cm
  modified_base 10: mod_base = OTHER; note = 2-O-methylribose adenine
  modified_base 10..11: mod_base = OTHER; note R-N-(1,3-dimethylimidazolidin-2-ylidene)phosphoramidate
  modified_base 11: mod_base = OTHER; note = 2-fluororibose adenine
  modified_base 12: mod_base = gm
  modified_base 13: mod_base = OTHER; note = 2-O-methylribose adenine
  modified_base 14: mod_base = OTHER; note = 2-fluororibose adenine
  modified_base 15: mod_base = cm
  modified_base 16: mod_base = OTHER; note = 2-fluororibose adenine
  modified_base 17: mod_base = cm
  modified_base 18: mod_base = um
  modified_base 19: mod_base = gm
  modified_base 20: mod_base = um
  modified_base 21: mod_base = um
  modified_base 21..22: mod_base = OTHER; note = S-phosphorothioate
  modified_base 22: mod_base = um
  modified_base 22..23: mod_base = OTHER; note = S-phosphorothioate
  modified_base 23: mod_base = um
  source 1..23: mol_type = other RNA
ttatagagcaagaacactgtttt

SEQ ID NO: 949 - RNA, 23 nt, synthetic construct
  misc_feature 1..23: note = Synthetic: SSR-0106621
  modified_base 1: mod_base = OTHER; note = phosphate linked to the 5' end of 5-(R)-methyl-5-deoxy-2-O-methylribose uracil
  modified_base 1..2: mod_base = OTHER; note = S-phosphorothioate
  modified_base 2: mod_base = OTHER; note = 2-fluororibose uracil
  modified_base 2..3: mod_base = OTHER; note = S-phosphorothioate
  modified_base 3: mod_base = OTHER; note = 2-O-methylribose adenine
  modified_base 3..4: mod_base = OTHER; note S-N-(1,3-dimethylimidazolidin-2-ylidene)phosphoramidate
  modified_base 4: mod_base = OTHER; note = 2-fluororibose uracil
  modified_base 5: mod_base = OTHER; note = 2-O-methylribose adenine
  modified_base 6: mod_base = OTHER; note = 2-fluororibose guanine
  modified_base 7: mod_base = OTHER; note = 2-O-methylribose adenine
  modified_base 8: mod_base = gm
  modified_base 9: mod_base = cm
  modified_base 10: mod_base = OTHER; note = 2-O-methylribose adenine
  modified_base 10..11: mod_base = OTHER; note R-N-(1,3-dimethylimidazolidin-2-ylidene)phosphoramidate
  modified_base 11: mod_base = OTHER; note = 2-fluororibose adenine
  modified_base 12: mod_base = gm
  modified_base 13: mod_base = OTHER; note = 2-O-methylribose adenine
  modified_base 14: mod_base = OTHER; note = 2-fluororibose adenine
  modified_base 15: mod_base = cm
  modified_base 16: mod_base = OTHER; note = 2-fluororibose adenine
  modified_base 17: mod_base = cm
  modified_base 18: mod_base = um
  modified_base 19: mod_base = gm
  modified_base 20: mod_base = um
  modified_base 21: mod_base = um
  modified_base 21..22: mod_base = OTHER; note = S-phosphorothioate
  modified_base 22: mod_base = um
  modified_base 22..23: mod_base = OTHER; note = S-phosphorothioate
  modified_base 23: mod_base = um
  source 1..23: mol_type = other RNA
ttatagagcaagaacactgtttt

SEQ ID NO: 950 - RNA, 23 nt, synthetic construct
  misc_feature 1..23: note = Synthetic: SSR-0106625
  modified_base 1: mod_base = um
  modified_base 1..2: mod_base = OTHER; note = S-phosphorothioate
  modified_base 2: mod_base = OTHER; note = 2-fluororibose uracil
  modified_base 2..3: mod_base = OTHER; note = R-phosphorothioate
  modified_base 3: mod_base = OTHER; note = 2,3-dideoxy-Beta-D-glucopyranose adenine
  modified_base 4: mod_base = OTHER; note = 2-fluororibose uracil
  modified_base 5: mod_base = OTHER; note = 2-O-methylribose adenine
  modified_base 6: mod_base = OTHER; note = 2-fluororibose guanine
  modified_base 7: mod_base = OTHER; note = 2-O-methylribose adenine
  modified_base 8: mod_base = gm
  modified_base 9: mod_base = cm
  modified_base 10: mod_base = OTHER; note = 2-O-methylribose adenine
  modified_base 11: mod_base = OTHER; note = 2-fluororibose adenine
  modified_base 12: mod_base = gm
  modified_base 13: mod_base = OTHER; note = 2-O-methylribose adenine
  modified_base 14: mod_base = OTHER; note = 2-fluororibose adenine
  modified_base 15: mod_base = cm
  modified_base 16: mod_base = OTHER; note = 2-fluororibose adenine
  modified_base 17: mod_base = cm
  modified_base 18: mod_base = um
  modified_base 19: mod_base = gm
  modified_base 20: mod_base = um
  modified_base 21: mod_base = um
  modified_base 21..22: mod_base = OTHER; note = S-phosphorothioate
  modified_base 22: mod_base = um
  modified_base 22..23: mod_base = OTHER; note = S-phosphorothioate
  modified_base 23: mod_base = um
  source 1..23: mol_type = other RNA
ttatagagcaagaacactgtttt

SEQ ID NO: 951 - RNA, 23 nt, synthetic construct
  misc_feature 1..23: note = Synthetic: SSR-0106626
  modified_base 1: mod_base = um
  modified_base 1..2: mod_base = OTHER; note = S-phosphorothioate
  modified_base 2: mod_base = OTHER; note = 2-fluororibose uracil
  modified_base 2..3: mod_base = OTHER; note = R-phosphorothioate
  modified_base 3: mod_base = OTHER; note = 2-O-methylribose adenine
  modified_base 4: mod_base = OTHER; note = 2,3-dideoxy-Beta-D-glucopyranose thymine
  modified_base 5: mod_base = OTHER; note = 2-O-methylribose adenine
  modified_base 6: mod_base = OTHER; note = 2-fluororibose guanine
  modified_base 7: mod_base = OTHER; note = 2-O-methylribose adenine
  modified_base 8: mod_base = gm
  modified_base 9: mod_base = cm
  modified_base 10: mod_base = OTHER; note = 2-O-methylribose adenine
  modified_base 11: mod_base = OTHER; note = 2-fluororibose adenine
  modified_base 12: mod_base = gm
  modified_base 13: mod_base = OTHER; note = 2-O-methylribose adenine
  modified_base 14: mod_base = OTHER; note = 2-fluororibose adenine
  modified_base 15: mod_base = cm
  modified_base 16: mod_base = OTHER; note = 2-fluororibose adenine
  modified_base 17: mod_base = cm
  modified_base 18: mod_base = um
  modified_base 19: mod_base = gm
  modified_base 20: mod_base = um
  modified_base 21: mod_base = um
  modified_base 21..22: mod_base = OTHER; note = S-phosphorothioate
  modified_base 22: mod_base = um
  modified_base 22..23: mod_base = OTHER; note = S-phosphorothioate
  modified_base 23: mod_base = um
  source 1..23: mol_type = other RNA
ttatagagcaagaacactgtttt

SEQ ID NO: 952 - RNA, 23 nt, synthetic construct
  misc_feature 1..23: note = Synthetic: SSR-0106627
  modified_base 1: mod_base = um
  modified_base 1..2: mod_base = OTHER; note = S-phosphorothioate
  modified_base 2: mod_base = OTHER; note = 2-fluororibose uracil
  modified_base 2..3: mod_base = OTHER; note = R-phosphorothioate
  modified_base 3: mod_base = OTHER; note = 2-O-methylribose adenine
  modified_base 4: mod_base = OTHER; note = 2-fluororibose uracil
  modified_base 5: mod_base = OTHER; note = 2-O-methylribose adenine
  modified_base 6: mod_base = OTHER; note = 2-fluororibose guanine
  modified_base 7: mod_base = OTHER; note = 2-O-methylribose adenine
  modified_base 8: mod_base = gm
  modified_base 9: mod_base = cm
  modified_base 10: mod_base = OTHER; note = 2,3-dideoxy-Beta-D-glucopyranose adenine
  modified_base 11: mod_base = OTHER; note = 2-fluororibose adenine
  modified_base 12: mod_base = gm
  modified_base 13: mod_base = OTHER; note = 2-O-methylribose adenine
  modified_base 14: mod_base = OTHER; note = 2-fluororibose adenine
  modified_base 15: mod_base = cm
  modified_base 16: mod_base = OTHER; note = 2-fluororibose adenine
  modified_base 17: mod_base = cm
  modified_base 18: mod_base = um
  modified_base 19: mod_base = gm
  modified_base 20: mod_base = um
  modified_base 21: mod_base = um
  modified_base 21..22: mod_base = OTHER; note = S-phosphorothioate
  modified_base 22: mod_base = um
  modified_base 22..23: mod_base = OTHER; note = S-phosphorothioate
  modified_base 23: mod_base = um
  source 1..23: mol_type = other RNA
ttatagagcaagaacactgtttt

SEQ ID NO: 953 - RNA, 23 nt, synthetic construct
  misc_feature 1..23: note = Synthetic: SSR-0106628
  modified_base 1: mod_base = um
  modified_base 1..2: mod_base = OTHER; note = S-phosphorothioate
  modified_base 2: mod_base = OTHER; note = 2-fluororibose uracil
  modified_base 2..3: mod_base = OTHER; note = R-phosphorothioate
  modified_base 3: mod_base = OTHER; note = 2-O-methylribose adenine
  modified_base 4: mod_base = OTHER; note = 2-fluororibose uracil
  modified_base 5: mod_base = OTHER; note = 2-O-methylribose adenine
  modified_base 6: mod_base = OTHER; note = 2-fluororibose guanine
  modified_base 7: mod_base = OTHER; note = 2-O-methylribose adenine
  modified_base 8: mod_base = gm
  modified_base 9: mod_base = cm
  modified_base 10: mod_base = OTHER; note = 2-O-methylribose adenine
  modified_base 11: mod_base = OTHER; note = 2,3-dideoxy-Beta-D-glucopyranose adenine
  modified_base 12: mod_base = gm
  modified_base 13: mod_base = OTHER; note = 2-O-methylribose adenine
  modified_base 14: mod_base = OTHER; note = 2-fluororibose adenine
  modified_base 15: mod_base = cm
  modified_base 16: mod_base = OTHER; note = 2-fluororibose adenine
  modified_base 17: mod_base = cm
  modified_base 18: mod_base = um
  modified_base 19: mod_base = gm
  modified_base 20: mod_base = um
  modified_base 21: mod_base = um
  modified_base 21..22: mod_base = OTHER; note = S-phosphorothioate
  modified_base 22: mod_base = um
  modified_base 22..23: mod_base = OTHER; note = S-phosphorothioate
  modified_base 23: mod_base = um
  source 1..23: mol_type = other RNA
ttatagagcaagaacactgtttt

SEQ ID NO: 954 - RNA, 23 nt, synthetic construct
  misc_feature 1..23: note = Synthetic: SSR-0107427
  modified_base 1: mod_base = OTHER; note = phosphate linked to the 5' end of 5-(R)-methyl-5-deoxy-2-O-methylribose uracil
  modified_base 1..2: mod_base = OTHER; note = R-phosphorothioate
  modified_base 2: mod_base = OTHER; note = 2-fluororibose uracil
  modified_base 2..3: mod_base = OTHER; note = S-phosphorothioate
  modified_base 3: mod_base = um
  modified_base 3..4: mod_base = OTHER; note S-N-(1,3-dimethylimidazolidin-2-ylidene)phosphoramidate
  modified_base 4: mod_base = OTHER; note = 2-fluororibose adenine
  modified_base 5: mod_base = gm
  modified_base 6: mod_base = OTHER; note = 2-fluororibose adenine
  modified_base 7: mod_base = gm
  modified_base 7..8: mod_base = OTHER; note S-N-(1,3-dimethylimidazolidin-2-ylidene)phosphoramidate
  modified_base 8: mod_base = OTHER; note = 2-fluororibose uracil
  modified_base 9: mod_base = OTHER; note = 2-fluororibose guanine
  modified_base 10: mod_base = OTHER; note = 2-O-methylribose adenine
  modified_base 11: mod_base = gm
  modified_base 12: mod_base = gm
  modified_base 13: mod_base = OTHER; note = 2-O-methylribose adenine
  modified_base 13..14: mod_base = OTHER; note = S-phosphorothioate
  modified_base 14: mod_base = OTHER; note = 2-fluororibose uracil
  modified_base 14..15: mod_base = OTHER; note = S-phosphorothioate
  modified_base 15: mod_base = um
  modified_base 15..16: mod_base = OTHER; note = S-phosphorothioate
  modified_base 16: mod_base = OTHER; note = 2-fluororibose adenine
  modified_base 16..17: mod_base = OTHER; note = S-phosphorothioate
  modified_base 17: mod_base = OTHER; note = 2-O-methylribose adenine
  modified_base 17..18: mod_base = OTHER; note = S-phosphorothioate
  modified_base 18: mod_base = OTHER; note = 2-O-methylribose adenine
  modified_base 18..19: mod_base = OTHER; note S-N-(1,3-dimethylimidazolidin-2-ylidene)phosphoramidate
  modified_base 19: mod_base = OTHER; note = 2-O-methylribose adenine
  modified_base 19..20: mod_base = OTHER; note = S-phosphorothioate
  modified_base 20: mod_base = um
  modified_base 20..21: mod_base = OTHER; note = S-phosphorothioate
  modified_base 21: mod_base = gm
  modified_base 21..22: mod_base = OTHER; note = S-phosphorothioate
  modified_base 22: mod_base = um
  modified_base 22..23: mod_base = OTHER; note = S-phosphorothioate
  modified_base 23: mod_base = um
  source 1..23: mol_type = other RNA
tttagagtgaggattaaaatgtt

SEQ ID NO: 955 - RNA, 23 nt, synthetic construct
  source 1..23: mol_type = other RNA
tttagagtgaggattaaaatgtt

SEQ ID NO: 956 - RNA, 23 nt, synthetic construct
  misc_feature 1..23: note = Synthetic: SSR-0107428
  modified_base 1: mod_base = OTHER; note = phosphate linked to the 5' end of 5-(R)-methyl-5-deoxy-2-O-methylribose uracil
  modified_base 1..2: mod_base = OTHER; note = R-phosphorothioate
  modified_base 2: mod_base = OTHER; note = 2-fluororibose uracil
  modified_base 2..3: mod_base = OTHER; note = S-phosphorothioate
  modified_base 3: mod_base = um
  modified_base 3..4: mod_base = OTHER; note S-N-(1,3-dimethylimidazolidin-2-ylidene)phosphoramidate
  modified_base 4: mod_base = OTHER; note = 2-fluororibose adenine
  modified_base 5: mod_base = gm
  modified_base 6: mod_base = OTHER; note = 2-fluororibose adenine
  modified_base 7: mod_base = gm
  modified_base 7..8: mod_base = OTHER; note S-N-(1,3-dimethylimidazolidin-2-ylidene)phosphoramidate
  modified_base 8: mod_base = OTHER; note = 2-fluororibose uracil
  modified_base 9: mod_base = OTHER; note = 2-fluororibose guanine
  modified_base 10: mod_base = OTHER; note = 2-O-methylribose adenine
  modified_base 11: mod_base = gm
  modified_base 12: mod_base = gm
  modified_base 13: mod_base = OTHER; note = 2-O-methylribose adenine
  modified_base 14: mod_base = OTHER; note = 2-fluororibose uracil
  modified_base 15: mod_base = um
  modified_base 16: mod_base = OTHER; note = 2-fluororibose adenine
  modified_base 17: mod_base = OTHER; note = 2-O-methylribose adenine
  modified_base 18: mod_base = OTHER; note = 2-O-methylribose adenine
  modified_base 18..19: mod_base = OTHER; note S-N-(1,3-dimethylimidazolidin-2-ylidene)phosphoramidate
  modified_base 19: mod_base = OTHER; note = 2-O-methylribose adenine
  modified_base 20: mod_base = um
  modified_base 21: mod_base = gm
  modified_base 21..22: mod_base = OTHER; note = S-phosphorothioate
  modified_base 22: mod_base = um
  modified_base 22..23: mod_base = OTHER; note = S-phosphorothioate
  modified_base 23: mod_base = um
  source 1..23: mol_type = other RNA
tttagagtgaggattaaaatgtt

SEQ ID NO: 957 - RNA, 23 nt, synthetic construct
  misc_feature 1..23: note = Synthetic: SSR-0108082
  modified_base 1: mod_base = OTHER; note = phosphate linked to the 5' end of 5-(R)-methyl-5-deoxy-2-O-methylribose uracil
  modified_base 1..2: mod_base = OTHER; note = R-phosphorothioate
  modified_base 2: mod_base = OTHER; note = 2-fluororibose adenine
  modified_base 2..3: mod_base = OTHER; note = S-phosphorothioate
  modified_base 3: mod_base = gm
  modified_base 3..4: mod_base = OTHER; note S-N-(1,3-dimethylimidazolidin-2-ylidene)phosphoramidate
  modified_base 4: mod_base = OTHER; note = 2-fluororibose adenine
  modified_base 5: mod_base = cm
  modified_base 6: mod_base = OTHER; note = 2-fluororibose adenine
  modified_base 7: mod_base = OTHER; note = 2-O-methylribose adenine
  modified_base 7..8: mod_base = OTHER; note S-N-(1,3-dimethylimidazolidin-2-ylidene)phosphoramidate
  modified_base 8: mod_base = OTHER; note = 2-fluororibose uracil
  modified_base 9: mod_base = OTHER; note = 2-fluororibose adenine
  modified_base 10: mod_base = OTHER; note = 2-O-methylribose adenine
  modified_base 11: mod_base = OTHER; note = 2-O-methylribose adenine
  modified_base 12: mod_base = um
  modified_base 13: mod_base = OTHER; note = 2-O-methylribose adenine
  modified_base 13..14: mod_base = OTHER; note = S-phosphorothioate
  modified_base 14: mod_base = OTHER; note = 2-fluororibose cytosine
  modified_base 14..15: mod_base = OTHER; note = S-phosphorothioate
  modified_base 15: mod_base = cm
  modified_base 15..16: mod_base = OTHER; note = S-phosphorothioate
  modified_base 16: mod_base = OTHER; note = 2-fluororibose guanine
  modified_base 16..17: mod_base = OTHER; note = S-phosphorothioate
  modified_base 17: mod_base = OTHER; note = 2-O-methylribose adenine
  modified_base 17..18: mod_base = OTHER; note = S-phosphorothioate
  modified_base 18: mod_base = gm
  modified_base 18..19: mod_base = OTHER; note S-N-(1,3-dimethylimidazolidin-2-ylidene)phosphoramidate
  modified_base 19: mod_base = gm
  modified_base 19..20: mod_base = OTHER; note = S-phosphorothioate
  modified_base 20: mod_base = OTHER; note = 2-O-methylribose adenine
  modified_base 20..21: mod_base = OTHER; note = S-phosphorothioate
  modified_base 21: mod_base = OTHER; note = 2-O-methylribose adenine
  modified_base 21..22: mod_base = OTHER; note = S-phosphorothioate
  modified_base 22: mod_base = um
  modified_base 22..23: mod_base = OTHER; note = S-phosphorothioate
  modified_base 23: mod_base = um
  source 1..23: mol_type = other RNA
tagacaataaataccgaggaatt

SEQ ID NO: 958 - RNA, 23 nt, synthetic construct
  source 1..23: mol_type = other RNA
tagacaataaataccgaggaatt

SEQ ID NO: 959 - RNA, 23 nt, synthetic construct
  misc_feature 1..23: note = Synthetic: SSR-0108084
  modified_base 1: mod_base = OTHER; note = phosphate linked to the 5' end of 5-(R)-methyl-5-deoxy-2-O-methylribose uracil
  modified_base 1..2: mod_base = OTHER; note = R-phosphorothioate
  modified_base 2: mod_base = OTHER; note = 2-fluororibose adenine
  modified_base 2..3: mod_base = OTHER; note = S-phosphorothioate
  modified_base 3: mod_base = gm
  modified_base 3..4: mod_base = OTHER; note S-N-(1,3-dimethylimidazolidin-2-ylidene)phosphoramidate
  modified_base 4: mod_base = OTHER; note = 2-fluororibose adenine
  modified_base 5: mod_base = cm
  modified_base 6: mod_base = OTHER; note = 2-fluororibose adenine
  modified_base 7: mod_base = OTHER; note = 2-O-methylribose adenine
  modified_base 7..8: mod_base = OTHER; note S-N-(1,3-dimethylimidazolidin-2-ylidene)phosphoramidate
  modified_base 8: mod_base = OTHER; note = 2-fluororibose uracil
  modified_base 9: mod_base = OTHER; note = 2-fluororibose adenine
  modified_base 10: mod_base = OTHER; note = 2-O-methylribose adenine
  modified_base 11: mod_base = OTHER; note = 2-O-methylribose adenine
  modified_base 12: mod_base = um
  modified_base 13: mod_base = OTHER; note = 2-O-methylribose adenine
  modified_base 14: mod_base = OTHER; note = 2-fluororibose cytosine
  modified_base 15: mod_base = cm
  modified_base 16: mod_base = OTHER; note = 2-fluororibose guanine
  modified_base 17: mod_base = OTHER; note = 2-O-methylribose adenine
  modified_base 18: mod_base = gm
  modified_base 18..19: mod_base = OTHER; note S-N-(1,3-dimethylimidazolidin-2-ylidene)phosphoramidate
  modified_base 19: mod_base = gm
  modified_base 20: mod_base = OTHER; note = 2-O-methylribose adenine
  modified_base 21: mod_base = OTHER; note = 2-O-methylribose adenine
  modified_base 21..22: mod_base = OTHER; note = S-phosphorothioate
  modified_base 22: mod_base = um
  modified_base 22..23: mod_base = OTHER; note = S-phosphorothioate
  modified_base 23: mod_base = um
  source 1..23: mol_type = other RNA
tagacaataaataccgaggaatt

SEQ ID NO: 960 - RNA, 23 nt, synthetic construct
  misc_feature 1..23: note = Synthetic: SSR-0108085
  modified_base 1: mod_base = OTHER; note = phosphate linked to the 5' end of 5-(R)-methyl-5-deoxy-2-O-methylribose uracil
  modified_base 1..2: mod_base = OTHER; note = R-phosphorothioate
  modified_base 2: mod_base = OTHER; note = 2-fluororibose adenine
  modified_base 2..3: mod_base = OTHER; note = S-phosphorothioate
  modified_base 3: mod_base = gm
  modified_base 3..4: mod_base = OTHER; note S-N-(1,3-dimethylimidazolidin-2-ylidene)phosphoramidate
  modified_base 4: mod_base = OTHER; note = 2-fluororibose adenine
  modified_base 5: mod_base = cm
  modified_base 6: mod_base = OTHER; note = 2-fluororibose adenine
  modified_base 7: mod_base = OTHER; note = 2-O-methylribose adenine
  modified_base 7..8: mod_base = OTHER; note S-N-(1,3-dimethylimidazolidin-2-ylidene)phosphoramidate
  modified_base 8: mod_base = OTHER; note = 2-fluororibose uracil
  modified_base 9: mod_base = OTHER; note = 2-fluororibose adenine
  modified_base 10: mod_base = OTHER; note = 2-O-methylribose adenine
  modified_base 11: mod_base = OTHER; note = 2-O-methylribose adenine
  modified_base 12: mod_base = um
  modified_base 13: mod_base = OTHER; note = 2-O-methylribose adenine
  modified_base 14: mod_base = OTHER; note = 2-fluororibose cytosine
  modified_base 15: mod_base = cm
  modified_base 16: mod_base = OTHER; note = 2-fluororibose guanine
  modified_base 17: mod_base = OTHER; note = 2-O-methylribose adenine
  modified_base 18: mod_base = gm
  modified_base 19: mod_base = gm
  modified_base 20: mod_base = OTHER; note = 2-O-methylribose adenine
  modified_base 21: mod_base = OTHER; note = 2-O-methylribose adenine
  modified_base 21..22: mod_base = OTHER; note = S-phosphorothioate
  modified_base 22: mod_base = um
  modified_base 22..23: mod_base = OTHER; note = S-phosphorothioate
  modified_base 23: mod_base = um
  source 1..23: mol_type = other RNA
tagacaataaataccgaggaatt

SEQ ID NO: 961 - RNA, 21 nt, synthetic construct
  misc_feature 1..21: note = Synthetic: SSR-0106503
  modified_base 1: mod_base = cm
  modified_base 1..2: mod_base = OTHER; note = S-phosphorothioate
  modified_base 2: mod_base = um
  modified_base 3: mod_base = OTHER; note = 2-fluororibose guanine
  modified_base 4: mod_base = um
  modified_base 5: mod_base = OTHER; note = 2-fluororibose guanine
  modified_base 6: mod_base = cm
  modified_base 7: mod_base = OTHER; note = 2-fluororibose uracil
  modified_base 7..8: mod_base = OTHER; note R-N-(1,3-dimethylimidazolidin-2-ylidene)phosphoramidate
  modified_base 8: mod_base = gm
  modified_base 9: mod_base = OTHER; note = 2-fluororibose uracil
  modified_base 10: mod_base = OTHER; note = 2-fluororibose adenine
  modified_base 11: mod_base = OTHER; note = 2-fluororibose adenine
  modified_base 12: mod_base = cm
  modified_base 13: mod_base = OTHER; note = 2-fluororibose adenine
  modified_base 14: mod_base = cm
  modified_base 15: mod_base = OTHER; note = 2-fluororibose adenine
  modified_base 16: mod_base = OTHER; note = 2-O-methylribose adenine
  modified_base 17: mod_base = OTHER; note = 2-fluororibose guanine
  modified_base 18: mod_base = um
  modified_base 19: mod_base = OTHER; note = 2-fluororibose adenine
  modified_base 20: mod_base = gm
  modified_base 20..21: mod_base = OTHER; note = S-phosphorothioate
  modified_base 21: mod_base = OTHER; note = 2-fluororibose adenine
  source 1..21: mol_type = other RNA
ctgtgctgtaacacaagtaga

SEQ ID NO: 962 - RNA, 21 nt, synthetic construct
  misc_feature 1..21: note = Synthetic: SSR-0106506
  modified_base 1: mod_base = cm
  modified_base 1..2: mod_base = OTHER; note = S-phosphorothioate
  modified_base 2: mod_base = um
  modified_base 3: mod_base = OTHER; note = 2-fluororibose guanine
  modified_base 4: mod_base = um
  modified_base 5: mod_base = OTHER; note = 2-fluororibose guanine
  modified_base 6: mod_base = cm
  modified_base 7: mod_base = OTHER; note = 2-O-hexadecylribose uracil
  modified_base 8: mod_base = gm
  modified_base 9: mod_base = OTHER; note = 2-fluororibose uracil
  modified_base 10: mod_base = OTHER; note = 2-fluororibose adenine
  modified_base 11: mod_base = OTHER; note = 2-fluororibose adenine
  modified_base 12: mod_base = cm
  modified_base 13: mod_base = OTHER; note = 2-fluororibose adenine
  modified_base 14: mod_base = cm
  modified_base 15: mod_base = OTHER; note = 2-fluororibose adenine
  modified_base 16: mod_base = OTHER; note = 2-O-methylribose adenine
  modified_base 17: mod_base = OTHER; note = 2-fluororibose guanine
  modified_base 18: mod_base = um
  modified_base 19: mod_base = OTHER; note = 2-fluororibose adenine
  modified_base 20: mod_base = gm
  modified_base 20..21: mod_base = OTHER; note = S-phosphorothioate
  modified_base 21: mod_base = OTHER; note = 2-fluororibose adenine
  source 1..21: mol_type = other RNA
ctgtgctgtaacacaagtaga

SEQ ID NO: 963 - RNA, 21 nt, synthetic construct
  misc_feature 1..21: note = Synthetic: SSR-0106507
  modified_base 1: mod_base = cm
  modified_base 1..2: mod_base = OTHER; note = S-phosphorothioate
  modified_base 2: mod_base = um
  modified_base 3: mod_base = OTHER; note = 2-fluororibose guanine
  modified_base 4: mod_base = um
  modified_base 5: mod_base = OTHER; note = 2-fluororibose guanine
  modified_base 6: mod_base = cm
  modified_base 7: mod_base = OTHER; note = 2-O-hexadecylribose uracil
  modified_base 7..8: mod_base = OTHER; note R-N-(1,3-dimethylimidazolidin-2-ylidene)phosphoramidate
  modified_base 8: mod_base = gm
  modified_base 9: mod_base = OTHER; note = 2-fluororibose uracil
  modified_base 10: mod_base = OTHER; note = 2-fluororibose adenine
  modified_base 11: mod_base = OTHER; note = 2-fluororibose adenine
  modified_base 12: mod_base = cm
  modified_base 13: mod_base = OTHER; note = 2-fluororibose adenine
  modified_base 14: mod_base = cm
  modified_base 15: mod_base = OTHER; note = 2-fluororibose adenine
  modified_base 16: mod_base = OTHER; note = 2-O-methylribose adenine
  modified_base 17: mod_base = OTHER; note = 2-fluororibose guanine
  modified_base 18: mod_base = um
  modified_base 19: mod_base = OTHER; note = 2-fluororibose adenine
  modified_base 20: mod_base = gm
  modified_base 20..21: mod_base = OTHER; note = S-phosphorothioate
  modified_base 21: mod_base = OTHER; note = 2-fluororibose adenine
  source 1..21: mol_type = other RNA
ctgtgctgtaacacaagtaga

SEQ ID NO: 964 - RNA, 21 nt, synthetic construct
  misc_feature 1..21: note = Synthetic: SSR-0106508
  modified_base 1: mod_base = cm
  modified_base 1..2: mod_base = OTHER; note = S-phosphorothioate
  modified_base 2: mod_base = um
  modified_base 3: mod_base = OTHER; note = 2-fluororibose guanine
  modified_base 4: mod_base = um
  modified_base 5: mod_base = OTHER; note = 2-fluororibose guanine
  modified_base 6: mod_base = cm
  modified_base 7: mod_base = OTHER; note = 2-O-hexadecylribose uracil
  modified_base 8: mod_base = gm
  modified_base 9: mod_base = OTHER; note = 2-fluororibose uracil
  modified_base 10: mod_base = OTHER; note = 2-fluororibose adenine
  modified_base 11: mod_base = OTHER; note = 2-fluororibose adenine
  modified_base 12: mod_base = cm
  modified_base 13: mod_base = OTHER; note = 2-fluororibose adenine
  modified_base 14: mod_base = cm
  modified_base 15: mod_base = OTHER; note = 2-fluororibose adenine
  modified_base 15..16: mod_base = OTHER; note R-N-(1,3-dimethylimidazolidin-2-ylidene)phosphoramidate
  modified_base 16: mod_base = OTHER; note = 2-O-methylribose adenine
  modified_base 17: mod_base = OTHER; note = 2-fluororibose guanine
  modified_base 18: mod_base = um
  modified_base 19: mod_base = OTHER; note = 2-fluororibose adenine
  modified_base 20: mod_base = gm
  modified_base 20..21: mod_base = OTHER; note = S-phosphorothioate
  modified_base 21: mod_base = OTHER; note = 2-fluororibose adenine
  source 1..21: mol_type = other RNA
ctgtgctgtaacacaagtaga

SEQ ID NO: 965 - RNA, 21 nt, synthetic construct
  misc_feature 1..21: note = Synthetic: SSR-0106509
  modified_base 1: mod_base = cm
  modified_base 1..2: mod_base = OTHER; note = S-phosphorothioate
  modified_base 2: mod_base = um
  modified_base 3: mod_base = OTHER; note = 2-fluororibose guanine
  modified_base 4: mod_base = um
  modified_base 5: mod_base = OTHER; note = 2-fluororibose guanine
  modified_base 6: mod_base = cm
  modified_base 7: mod_base = OTHER; note = 2-O-hexadecylribose uracil
  modified_base 7..8: mod_base = OTHER; note R-N-(1,3-dimethylimidazolidin-2-ylidene)phosphoramidate
  modified_base 8: mod_base = gm
  modified_base 9: mod_base = OTHER; note = 2-fluororibose uracil
  modified_base 10: mod_base = OTHER; note = 2-fluororibose adenine
  modified_base 11: mod_base = OTHER; note = 2-fluororibose adenine
  modified_base 12: mod_base = cm
  modified_base 13: mod_base = OTHER; note = 2-fluororibose adenine
  modified_base 14: mod_base = cm
  modified_base 15: mod_base = OTHER; note = 2-fluororibose adenine
  modified_base 15..16: mod_base = OTHER; note R-N-(1,3-dimethylimidazolidin-2-ylidene)phosphoramidate
  modified_base 16: mod_base = OTHER; note = 2-O-methylribose adenine
  modified_base 17: mod_base = OTHER; note = 2-fluororibose guanine
  modified_base 18: mod_base = um
  modified_base 19: mod_base = OTHER; note = 2-fluororibose adenine
  modified_base 20: mod_base = gm
  modified_base 20..21: mod_base = OTHER; note = S-phosphorothioate
  modified_base 21: mod_base = OTHER; note = 2-fluororibose adenine
  source 1..21: mol_type = other RNA
ctgtgctgtaacacaagtaga

SEQ ID NO: 966 - RNA, 21 nt, synthetic construct
  misc_feature 1..21: note = Synthetic: SSR-0106510
  modified_base 1: mod_base = cm
  modified_base 1..2: mod_base = OTHER; note = S-phosphorothioate
  modified_base 2: mod_base = um
  modified_base 2..3: mod_base = OTHER; note = S-phosphorothioate
  modified_base 3: mod_base = OTHER; note = 2-fluororibose guanine
  modified_base 3..4: mod_base = OTHER; note = S-phosphorothioate
  modified_base 4: mod_base = um
  modified_base 4..5: mod_base = OTHER; note = S-phosphorothioate
  modified_base 5: mod_base = OTHER; note = 2-fluororibose guanine
  modified_base 5..6: mod_base = OTHER; note = S-phosphorothioate
  modified_base 6: mod_base = cm
  modified_base 6..7: mod_base = OTHER; note = S-phosphorothioate
  modified_base 7: mod_base = OTHER; note = 2-O-hexadecylribose uracil
  modified_base 7..8: mod_base = OTHER; note R-N-(1,3-dimethylimidazolidin-2-ylidene)phosphoramidate
  modified_base 8: mod_base = gm
  modified_base 9: mod_base = OTHER; note = 2-fluororibose uracil
  modified_base 10: mod_base = OTHER; note = 2-fluororibose adenine
  modified_base 11: mod_base = OTHER; note = 2-fluororibose adenine
  modified_base 12: mod_base = cm
  modified_base 13: mod_base = OTHER; note = 2-fluororibose adenine
  modified_base 14: mod_base = cm
  modified_base 15: mod_base = OTHER; note = 2-fluororibose adenine
  modified_base 15..16: mod_base = OTHER; note R-N-(1,3-dimethylimidazolidin-2-ylidene)phosphoramidate
  modified_base 16: mod_base = OTHER; note = 2-O-methylribose adenine
  modified_base 16..17: mod_base = OTHER; note = S-phosphorothioate
  modified_base 17: mod_base = OTHER; note = 2-fluororibose guanine
  modified_base 17..18: mod_base = OTHER; note = S-phosphorothioate
  modified_base 18: mod_base = um
  modified_base 18..19: mod_base = OTHER; note = S-phosphorothioate
  modified_base 19: mod_base = OTHER; note = 2-fluororibose adenine
  modified_base 19..20: mod_base = OTHER; note = S-phosphorothioate
  modified_base 20: mod_base = gm
  modified_base 20..21: mod_base = OTHER; note = S-phosphorothioate
  modified_base 21: mod_base = OTHER; note = 2-O-methylribose adenine
  source 1..21: mol_type = other RNA
ctgtgctgtaacacaagtaga

SEQ ID NO: 967 - RNA, 21 nt, synthetic construct
  misc_feature 1..21: note = Synthetic: SSR-0106511
  modified_base 1: mod_base = cm
  modified_base 1..2: mod_base = OTHER; note = S-phosphorothioate
  modified_base 2: mod_base = um
  modified_base 3: mod_base = OTHER; note = 2-fluororibose guanine
  modified_base 4: mod_base = um
  modified_base 5: mod_base = OTHER; note = 2-fluororibose guanine
  modified_base 6: mod_base = cm
  modified_base 7: mod_base = OTHER; note = 2-fluororibose uracil
  modified_base 7..8: mod_base = OTHER; note R-N-(1-(4-dimethylamino-butyl)-3-methylimidazolidin-2-ylide ne)phosphoramidate
  modified_base 8: mod_base = gm
  modified_base 9: mod_base = OTHER; note = 2-fluororibose uracil
  modified_base 10: mod_base = OTHER; note = 2-fluororibose adenine
  modified_base 11: mod_base = OTHER; note = 2-fluororibose adenine
  modified_base 12: mod_base = cm
  modified_base 13: mod_base = OTHER; note = 2-fluororibose adenine
  modified_base 14: mod_base = cm
  modified_base 15: mod_base = OTHER; note = 2-fluororibose adenine
  modified_base 15..16: mod_base = OTHER; note R-N-(1-(4-dimethylamino-butyl)-3-methylimidazolidin-2-ylide ne)phosphoramidate
  modified_base 16: mod_base = OTHER; note = 2-O-methylribose adenine
  modified_base 17: mod_base = OTHER; note = 2-fluororibose guanine
  modified_base 18: mod_base = um
  modified_base 19: mod_base = OTHER; note = 2-fluororibose adenine
  modified_base 20: mod_base = gm
  modified_base 20..21: mod_base = OTHER; note = S-phosphorothioate
  modified_base 21: mod_base = OTHER; note = 2-fluororibose adenine
  source 1..21: mol_type = other RNA
ctgtgctgtaacacaagtaga

SEQ ID NO: 968 - RNA, 21 nt, synthetic construct
  misc_feature 1..21: note = Synthetic: SSR-0106513
  modified_base 1: mod_base = cm
  modified_base 1..2: mod_base = OTHER; note = S-phosphorothioate
  modified_base 2: mod_base = um
  modified_base 2..3: mod_base = OTHER; note = S-phosphorothioate
  modified_base 3: mod_base = OTHER; note = 2-fluororibose guanine
  modified_base 3..4: mod_base = OTHER; note = S-phosphorothioate
  modified_base 4: mod_base = um
  modified_base 4..5: mod_base = OTHER; note = S-phosphorothioate
  modified_base 5: mod_base = OTHER; note = 2-fluororibose guanine
  modified_base 5..6: mod_base = OTHER; note = S-phosphorothioate
  modified_base 6: mod_base = cm
  modified_base 6..7: mod_base = OTHER; note = S-phosphorothioate
  modified_base 7: mod_base = OTHER; note = 2-fluororibose uracil
  modified_base 7..8: mod_base = OTHER; note R-N-(1-(4-dimethylamino-butyl)-3-methylimidazolidin-2-ylide ne)phosphoramidate
  modified_base 8: mod_base = gm
  modified_base 9: mod_base = OTHER; note = 2-fluororibose uracil
  modified_base 10: mod_base = OTHER; note = 2-fluororibose adenine
  modified_base 11: mod_base = OTHER; note = 2-fluororibose adenine
  modified_base 12: mod_base = cm
  modified_base 13: mod_base = OTHER; note = 2-fluororibose adenine
  modified_base 14: mod_base = cm
  modified_base 15: mod_base = OTHER; note = 2-fluororibose adenine
  modified_base 15..16: mod_base = OTHER; note R-N-(1-(4-dimethylamino-butyl)-3-methylimidazolidin-2-ylide ne)phosphoramidate
  modified_base 16: mod_base = OTHER; note = 2-O-methylribose adenine
  modified_base 16..17: mod_base = OTHER; note = S-phosphorothioate
  modified_base 17: mod_base = OTHER; note = 2-fluororibose guanine
  modified_base 17..18: mod_base = OTHER; note = S-phosphorothioate
  modified_base 18: mod_base = um
  modified_base 18..19: mod_base = OTHER; note = S-phosphorothioate
  modified_base 19: mod_base = OTHER; note = 2-fluororibose adenine
  modified_base 19..20: mod_base = OTHER; note = S-phosphorothioate
  modified_base 20: mod_base = gm
  modified_base 20..21: mod_base = OTHER; note = S-phosphorothioate
  modified_base 21: mod_base = OTHER; note = 2-O-methylribose adenine
  source 1..21: mol_type = other RNA
ctgtgctgtaacacaagtaga

SEQ ID NO: 969 - RNA, 21 nt, synthetic construct
  misc_feature 1..21: note = Synthetic: SSR-0106563
  modified_base 1: mod_base = cm
  modified_base 1..2: mod_base = OTHER; note = phosphorothioate
  modified_base 2: mod_base = um
  modified_base 3: mod_base = OTHER; note = 2-fluororibose guanine
  modified_base 4: mod_base = um
  modified_base 5: mod_base = OTHER; note = 2-fluororibose guanine
  modified_base 6: mod_base = cm
  modified_base 7: mod_base = OTHER; note = 2-fluororibose uracil
  modified_base 7..8: mod_base = OTHER; note = N-(1,3-dimethylimidazolidin-2-ylidene)phosphoramidate
  modified_base 8: mod_base = gm
  modified_base 9: mod_base = OTHER; note = 2-fluororibose uracil
  modified_base 10: mod_base = OTHER; note = 2-fluororibose adenine
  modified_base 11: mod_base = OTHER; note = 2-fluororibose adenine
  modified_base 12: mod_base = cm
  modified_base 13: mod_base = OTHER; note = 2-fluororibose adenine
  modified_base 14: mod_base = cm
  modified_base 15: mod_base = OTHER; note = 2-fluororibose adenine
  modified_base 15..16: mod_base = OTHER; note = N-(1,3-dimethylimidazolidin-2-ylidene)phosphoramidate
  modified_base 16: mod_base = OTHER; note = 2-O-methylribose adenine
  modified_base 17: mod_base = OTHER; note = 2-fluororibose guanine
  modified_base 18: mod_base = um
  modified_base 19: mod_base = OTHER; note = 2-fluororibose adenine
  modified_base 20: mod_base = gm
  modified_base 20..21: mod_base = OTHER; note = phosphorothioate
  modified_base 21: mod_base = OTHER; note = 2-O-methylribose adenine
  source 1..21: mol_type = other RNA
ctgtgctgtaacacaagtaga

SEQ ID NO: 970 - RNA, 21 nt, synthetic construct
  misc_feature 1..21: note = Synthetic: SSR-0106589
  modified_base 1: mod_base = gm
  modified_base 1..2: mod_base = OTHER; note = S-phosphorothioate
  modified_base 2: mod_base = gm
  modified_base 3: mod_base = OTHER; note = 2-fluororibose adenine
  modified_base 4: mod_base = gm
  modified_base 5: mod_base = OTHER; note = 2-fluororibose guanine
  modified_base 6: mod_base = OTHER; note = 2-O-methylribose adenine
  modified_base 7: mod_base = OTHER; note = 2-fluororibose adenine
  modified_base 7..8: mod_base = OTHER; note R-N-(1,3-dimethylimidazolidin-2-ylidene)phosphoramidate
  modified_base 8: mod_base = cm
  modified_base 9: mod_base = OTHER; note = 2-fluororibose cytosine
  modified_base 10: mod_base = OTHER; note = 2-fluororibose uracil
  modified_base 11: mod_base = OTHER; note = 2-fluororibose uracil
  modified_base 12: mod_base = cm
  modified_base 13: mod_base = OTHER; note = 2-fluororibose adenine
  modified_base 14: mod_base = gm
  modified_base 15: mod_base = OTHER; note = 2-fluororibose guanine
  modified_base 15..16: mod_base = OTHER; note R-N-(1,3-dimethylimidazolidin-2-ylidene)phosphoramidate
  modified_base 16: mod_base = gm
  modified_base 17: mod_base = OTHER; note = 2-fluororibose adenine
  modified_base 18: mod_base = OTHER; note = 2-O-methylribose adenine
  modified_base 19: mod_base = OTHER; note = 2-fluororibose guanine
  modified_base 20: mod_base = gm
  modified_base 20..21: mod_base = OTHER; note = S-phosphorothioate
  modified_base 21: mod_base = OTHER; note = 2-O-methylribose adenine
  source 1..21: mol_type = other RNA
ggaggaaccttcagggaagga

SEQ ID NO: 971 - RNA, 21 nt, synthetic construct
  misc_feature 1..21: note = Synthetic: SSR-0106597
  modified_base 1: mod_base = cm
  modified_base 1..2: mod_base = OTHER; note = phosphorothioate
  modified_base 2: mod_base = um
  modified_base 3: mod_base = OTHER; note = 2-fluororibose guanine
  modified_base 4: mod_base = um
  modified_base 5: mod_base = OTHER; note = 2-fluororibose guanine
  modified_base 6: mod_base = cm
  modified_base 7: mod_base = OTHER; note = 2-O-hexadecylribose uracil
  modified_base 8: mod_base = gm
  modified_base 9: mod_base = OTHER; note = 2-fluororibose uracil
  modified_base 10: mod_base = OTHER; note = 2-fluororibose adenine
  modified_base 11: mod_base = OTHER; note = 2-fluororibose adenine
  modified_base 12: mod_base = cm
  modified_base 13: mod_base = OTHER; note = 2-fluororibose adenine
  modified_base 14: mod_base = cm
  modified_base 15: mod_base = OTHER; note = 2-fluororibose adenine
  modified_base 16: mod_base = OTHER; note = 2-O-methylribose adenine
  modified_base 17: mod_base = OTHER; note = 2-fluororibose guanine
  modified_base 18: mod_base = um
  modified_base 19: mod_base = OTHER; note = 2-fluororibose adenine
  modified_base 20: mod_base = gm
  modified_base 20..21: mod_base = OTHER; note = phosphorothioate
  modified_base 21: mod_base = OTHER; note = 2-fluororibose adenine
  source 1..21: mol_type = other RNA
ctgtgctgtaacacaagtaga

SEQ ID NO: 972 - RNA, 21 nt, synthetic construct
  misc_feature 1..21: note = Synthetic: SSR-0106598
  modified_base 1: mod_base = cm
  modified_base 1..2: mod_base = OTHER; note = phosphorothioate
  modified_base 2: mod_base = um
  modified_base 3: mod_base = OTHER; note = 2-fluororibose guanine
  modified_base 4: mod_base = um
  modified_base 5: mod_base = OTHER; note = 2-fluororibose guanine
  modified_base 6: mod_base = cm
  modified_base 7: mod_base = OTHER; note = 2-O-hexadecylribose uracil
  modified_base 7..8: mod_base = OTHER; note R-N-(1,3-dimethylimidazolidin-2-ylidene)phosphoramidate
  modified_base 8: mod_base = gm
  modified_base 9: mod_base = OTHER; note = 2-fluororibose uracil
  modified_base 10: mod_base = OTHER; note = 2-fluororibose adenine
  modified_base 11: mod_base = OTHER; note = 2-fluororibose adenine
  modified_base 12: mod_base = cm
  modified_base 13: mod_base = OTHER; note = 2-fluororibose adenine
  modified_base 14: mod_base = cm
  modified_base 15: mod_base = OTHER; note = 2-fluororibose adenine
  modified_base 16: mod_base = OTHER; note = 2-O-methylribose adenine
  modified_base 17: mod_base = OTHER; note = 2-fluororibose guanine
  modified_base 18: mod_base = um
  modified_base 19: mod_base = OTHER; note = 2-fluororibose adenine
  modified_base 20: mod_base = gm
  modified_base 20..21: mod_base = OTHER; note = phosphorothioate
  modified_base 21: mod_base = OTHER; note = 2-fluororibose adenine
  source 1..21: mol_type = other RNA
ctgtgctgtaacacaagtaga

SEQ ID NO: 973 - RNA, 21 nt, synthetic construct
  misc_feature 1..21: note = Synthetic: SSR-0106599
  modified_base 1: mod_base = cm
  modified_base 1..2: mod_base = OTHER; note = phosphorothioate
  modified_base 2: mod_base = um
  modified_base 3: mod_base = OTHER; note = 2-fluororibose guanine
  modified_base 4: mod_base = um
  modified_base 5: mod_base = OTHER; note = 2-fluororibose guanine
  modified_base 6: mod_base = cm
  modified_base 7: mod_base = OTHER; note = 2-O-hexadecylribose uracil
  modified_base 7..8: mod_base = OTHER; note R-N-(1-docecyl-3-methylimidazolidin-2-ylidene)phosphoramida te
  modified_base 8: mod_base = gm
  modified_base 9: mod_base = OTHER; note = 2-fluororibose uracil
  modified_base 10: mod_base = OTHER; note = 2-fluororibose adenine
  modified_base 11: mod_base = OTHER; note = 2-fluororibose adenine
  modified_base 12: mod_base = cm
  modified_base 13: mod_base = OTHER; note = 2-fluororibose adenine
  modified_base 14: mod_base = cm
  modified_base 15: mod_base = OTHER; note = 2-fluororibose adenine
  modified_base 16: mod_base = OTHER; note = 2-O-methylribose adenine
  modified_base 17: mod_base = OTHER; note = 2-fluororibose guanine
  modified_base 18: mod_base = um
  modified_base 19: mod_base = OTHER; note = 2-fluororibose adenine
  modified_base 20: mod_base = gm
  modified_base 20..21: mod_base = OTHER; note = phosphorothioate
  modified_base 21: mod_base = OTHER; note = 2-fluororibose adenine
  source 1..21: mol_type = other RNA
ctgtgctgtaacacaagtaga

SEQ ID NO: 974 - RNA, 21 nt, synthetic construct
  misc_feature 1..21: note = Synthetic: SSR-0106600
  modified_base 1: mod_base = cm
  modified_base 1..2: mod_base = OTHER; note = phosphorothioate
  modified_base 2: mod_base = um
  modified_base 3: mod_base = OTHER; note = 2-fluororibose guanine
  modified_base 4: mod_base = um
  modified_base 5: mod_base = OTHER; note = 2-fluororibose guanine
  modified_base 6: mod_base = cm
  modified_base 7: mod_base = OTHER; note = 2-O-hexadecylribose uracil
  modified_base 7..8: mod_base = OTHER; note R-N-(1-hexadecyl-3-methylimidazolidin-2-ylidene)phosphorami date
  modified_base 8: mod_base = gm
  modified_base 9: mod_base = OTHER; note = 2-fluororibose uracil
  modified_base 10: mod_base = OTHER; note = 2-fluororibose adenine
  modified_base 11: mod_base = OTHER; note = 2-fluororibose adenine
  modified_base 12: mod_base = cm
  modified_base 13: mod_base = OTHER; note = 2-fluororibose adenine
  modified_base 14: mod_base = cm
  modified_base 15: mod_base = OTHER; note = 2-fluororibose adenine
  modified_base 16: mod_base = OTHER; note = 2-O-methylribose adenine
  modified_base 17: mod_base = OTHER; note = 2-fluororibose guanine
  modified_base 18: mod_base = um
  modified_base 19: mod_base = OTHER; note = 2-fluororibose adenine
  modified_base 20: mod_base = gm
  modified_base 20..21: mod_base = OTHER; note = phosphorothioate
  modified_base 21: mod_base = OTHER; note = 2-fluororibose adenine
  source 1..21: mol_type = other RNA
ctgtgctgtaacacaagtaga

SEQ ID NO: 975 - RNA, 21 nt, synthetic construct
  misc_feature 1..21: note = Synthetic: SSR-0106603
  modified_base 1: mod_base = cm
  modified_base 1..2: mod_base = OTHER; note = S-phosphorothioate
  modified_base 2: mod_base = um
  modified_base 3: mod_base = OTHER; note = 2-fluororibose guanine
  modified_base 4: mod_base = um
  modified_base 5: mod_base = OTHER; note = 2-fluororibose guanine
  modified_base 6: mod_base = cm
  modified_base 7: mod_base = OTHER; note = 2-fluororibose uracil
  modified_base 7..8: mod_base = OTHER; note R-(1-hexyl-3-methylimidazolidin-2-ylidene)phosphoramidate
  modified_base 8: mod_base = gm
  modified_base 9: mod_base = OTHER; note = 2-fluororibose uracil
  modified_base 10: mod_base = OTHER; note = 2-fluororibose adenine
  modified_base 11: mod_base = OTHER; note = 2-fluororibose adenine
  modified_base 12: mod_base = cm
  modified_base 13: mod_base = OTHER; note = 2-fluororibose adenine
  modified_base 14: mod_base = cm
  modified_base 15: mod_base = OTHER; note = 2-fluororibose adenine
  modified_base 16: mod_base = OTHER; note = 2-O-methylribose adenine
  modified_base 17: mod_base = OTHER; note = 2-fluororibose guanine
  modified_base 18: mod_base = um
  modified_base 19: mod_base = OTHER; note = 2-fluororibose adenine
  modified_base 20: mod_base = gm
  modified_base 20..21: mod_base = OTHER; note = S-phosphorothioate
  modified_base 21: mod_base = OTHER; note = 2-fluororibose adenine
  source 1..21: mol_type = other RNA
ctgtgctgtaacacaagtaga

SEQ ID NO: 976 - RNA, 21 nt, synthetic construct
  misc_feature 1..21: note = Synthetic: SSR-0106604
  modified_base 1: mod_base = cm
  modified_base 1..2: mod_base = OTHER; note = S-phosphorothioate
  modified_base 2: mod_base = um
  modified_base 3: mod_base = OTHER; note = 2-fluororibose guanine
  modified_base 4: mod_base = um
  modified_base 5: mod_base = OTHER; note = 2-fluororibose guanine
  modified_base 6: mod_base = cm
  modified_base 7: mod_base = OTHER; note = 2-fluororibose uracil
  modified_base 7..8: mod_base = OTHER; note = R-(1,3-dihexylimidazolidin-2-ylidene)phosphoramidate
  modified_base 8: mod_base = gm
  modified_base 9: mod_base = OTHER; note = 2-fluororibose uracil
  modified_base 10: mod_base = OTHER; note = 2-fluororibose adenine
  modified_base 11: mod_base = OTHER; note = 2-fluororibose adenine
  modified_base 12: mod_base = cm
  modified_base 13: mod_base = OTHER; note = 2-fluororibose adenine
  modified_base 14: mod_base = cm
  modified_base 15: mod_base = OTHER; note = 2-fluororibose adenine
  modified_base 16: mod_base = OTHER; note = 2-O-methylribose adenine
  modified_base 17: mod_base = OTHER; note = 2-fluororibose guanine
  modified_base 18: mod_base = um
  modified_base 19: mod_base = OTHER; note = 2-fluororibose adenine
  modified_base 20: mod_base = gm
  modified_base 20..21: mod_base = OTHER; note = S-phosphorothioate
  modified_base 21: mod_base = OTHER; note = 2-fluororibose adenine
  source 1..21: mol_type = other RNA
ctgtgctgtaacacaagtaga

SEQ ID NO: 977 - RNA, 21 nt, synthetic construct
  misc_feature 1..21: note = Synthetic: SSR-0106605
  modified_base 1: mod_base = cm
  modified_base 1..2: mod_base = OTHER; note = S-phosphorothioate
  modified_base 2: mod_base = um
  modified_base 3: mod_base = OTHER; note = 2-fluororibose guanine
  modified_base 4: mod_base = um
  modified_base 5: mod_base = OTHER; note = 2-fluororibose guanine
  modified_base 6: mod_base = cm
  modified_base 7: mod_base = OTHER; note = 2-fluororibose uracil
  modified_base 7..8: mod_base = OTHER; note R-(1,3-di[(2E)-pent-2-en-1-yl]imidazolidin-2-ylidene)phosph oramidate
  modified_base 8: mod_base = gm
  modified_base 9: mod_base = OTHER; note = 2-fluororibose uracil
  modified_base 10: mod_base = OTHER; note = 2-fluororibose adenine
  modified_base 11: mod_base = OTHER; note = 2-fluororibose adenine
  modified_base 12: mod_base = cm
  modified_base 13: mod_base = OTHER; note = 2-fluororibose adenine
  modified_base 14: mod_base = cm
  modified_base 15: mod_base = OTHER; note = 2-fluororibose adenine
  modified_base 16: mod_base = OTHER; note = 2-O-methylribose adenine
  modified_base 17: mod_base = OTHER; note = 2-fluororibose guanine
  modified_base 18: mod_base = um
  modified_base 19: mod_base = OTHER; note = 2-fluororibose adenine
  modified_base 20: mod_base = gm
  modified_base 20..21: mod_base = OTHER; note = S-phosphorothioate
  modified_base 21: mod_base = OTHER; note = 2-fluororibose adenine
  source 1..21: mol_type = other RNA
ctgtgctgtaacacaagtaga

SEQ ID NO: 978 - RNA, 21 nt, synthetic construct
  misc_feature 1..21: note = Synthetic: SSR-0106606
  modified_base 1: mod_base = cm
  modified_base 1..2: mod_base = OTHER; note = S-phosphorothioate
  modified_base 2: mod_base = um
  modified_base 3: mod_base = OTHER; note = 2-fluororibose guanine
  modified_base 4: mod_base = um
  modified_base 5: mod_base = OTHER; note = 2-fluororibose guanine
  modified_base 6: mod_base = cm
  modified_base 7: mod_base = OTHER; note = 2-fluororibose uracil
  modified_base 7..8: mod_base = OTHER; note R-(1,3-di[(2Z)-pent-2-en-1-yl]imidazolidin-2-ylidene)phosph oramidate
  modified_base 8: mod_base = gm
  modified_base 9: mod_base = OTHER; note = 2-fluororibose uracil
  modified_base 10: mod_base = OTHER; note = 2-fluororibose adenine
  modified_base 11: mod_base = OTHER; note = 2-fluororibose adenine
  modified_base 12: mod_base = cm
  modified_base 13: mod_base = OTHER; note = 2-fluororibose adenine
  modified_base 14: mod_base = cm
  modified_base 15: mod_base = OTHER; note = 2-fluororibose adenine
  modified_base 16: mod_base = OTHER; note = 2-O-methylribose adenine
  modified_base 17: mod_base = OTHER; note = 2-fluororibose guanine
  modified_base 18: mod_base = um
  modified_base 19: mod_base = OTHER; note = 2-fluororibose adenine
  modified_base 20: mod_base = gm
  modified_base 20..21: mod_base = OTHER; note = S-phosphorothioate
  modified_base 21: mod_base = OTHER; note = 2-fluororibose adenine
  source 1..21: mol_type = other RNA
ctgtgctgtaacacaagtaga

SEQ ID NO: 979 - RNA, 21 nt, synthetic construct
  misc_feature 1..21: note = Synthetic: SSR-0106607
  modified_base 1: mod_base = cm
  modified_base 1..2: mod_base = OTHER; note = S-phosphorothioate
  modified_base 2: mod_base = um
  modified_base 3: mod_base = OTHER; note = 2-fluororibose guanine
  modified_base 4: mod_base = um
  modified_base 5: mod_base = OTHER; note = 2-fluororibose guanine
  modified_base 6: mod_base = cm
  modified_base 7: mod_base = OTHER; note = 2-fluororibose uracil
  modified_base 7..8: mod_base = OTHER; note R-N-(1,3-di(2-methoxyethyl)imidazolidin-2-ylidene)phosphora midate
  modified_base 8: mod_base = gm
  modified_base 9: mod_base = OTHER; note = 2-fluororibose uracil
  modified_base 10: mod_base = OTHER; note = 2-fluororibose adenine
  modified_base 11: mod_base = OTHER; note = 2-fluororibose adenine
  modified_base 12: mod_base = cm
  modified_base 13: mod_base = OTHER; note = 2-fluororibose adenine
  modified_base 14: mod_base = cm
  modified_base 15: mod_base = OTHER; note = 2-fluororibose adenine
  modified_base 16: mod_base = OTHER; note = 2-O-methylribose adenine
  modified_base 17: mod_base = OTHER; note = 2-fluororibose guanine
  modified_base 18: mod_base = um
  modified_base 19: mod_base = OTHER; note = 2-fluororibose adenine
  modified_base 20: mod_base = gm
  modified_base 20..21: mod_base = OTHER; note = S-phosphorothioate
  modified_base 21: mod_base = OTHER; note = 2-fluororibose adenine
  source 1..21: mol_type = other RNA
ctgtgctgtaacacaagtaga

SEQ ID NO: 980 - RNA, 21 nt, synthetic construct
  misc_feature 1..21: note = Synthetic: SSR-0106629
  modified_base 1: mod_base = OTHER; note = triantennary GalNAc with C12 linker linked to 6-aminohexanol linked by phosphate to the 5' end of 2-O-methylribose adenine
  modified_base 1..2: mod_base = OTHER; note = S-phosphorothioate
  modified_base 2: mod_base = OTHER; note = 2-O-methylribose adenine
  modified_base 3: mod_base = cm
  modified_base 4: mod_base = OTHER; note = 2-O-methylribose adenine
  modified_base 5: mod_base = gm
  modified_base 6: mod_base = um
  modified_base 7: mod_base = OTHER; note = 2-fluororibose guanine
  modified_base 8: mod_base = um
  modified_base 9: mod_base = OTHER; note = 2-fluororibose uracil
  modified_base 10: mod_base = OTHER; note = 2-fluororibose cytosine
  modified_base 11: mod_base = OTHER; note = 2-fluororibose uracil
  modified_base 12: mod_base = um
  modified_base 13: mod_base = gm
  modified_base 14: mod_base = cm
  modified_base 15: mod_base = um
  modified_base 16: mod_base = cm
  modified_base 17: mod_base = um
  modified_base 18: mod_base = OTHER; note = 2-O-methylribose adenine
  modified_base 19: mod_base = um
  modified_base 20: mod_base = OTHER; note = 2-O-methylribose adenine
  modified_base 20..21: mod_base = OTHER; note = S-phosphorothioate
  modified_base 21: mod_base = OTHER; note = 2,3-dideoxy-Beta-D-glucopyranose adenine
  source 1..21: mol_type = other RNA
aacagtgttcttgctctataa

SEQ ID NO: 981 - RNA, 21 nt, synthetic construct
  misc_feature 1..21: note = Synthetic: SSR-0106630
  modified_base 1: mod_base = OTHER; note = triantennary GalNAc with C12 linker linked to 6-aminohexanol linked by phosphate to the 5' end of 2-O-methylribose adenine
  modified_base 1..2: mod_base = OTHER; note = S-phosphorothioate
  modified_base 2: mod_base = OTHER; note = 2-O-methylribose adenine
  modified_base 3: mod_base = cm
  modified_base 4: mod_base = OTHER; note = 2-O-methylribose adenine
  modified_base 5: mod_base = gm
  modified_base 6: mod_base = um
  modified_base 7: mod_base = OTHER; note = 2-fluororibose guanine
  modified_base 8: mod_base = um
  modified_base 9: mod_base = OTHER; note = 2-fluororibose uracil
  modified_base 10: mod_base = OTHER; note = 2-fluororibose cytosine
  modified_base 11: mod_base = OTHER; note = 2-fluororibose uracil
  modified_base 12: mod_base = um
  modified_base 13: mod_base = gm
  modified_base 14: mod_base = cm
  modified_base 15: mod_base = um
  modified_base 16: mod_base = cm
  modified_base 17: mod_base = um
  modified_base 18: mod_base = OTHER; note = 2,3-dideoxy-Beta-D-glucopyranose adenine
  modified_base 19: mod_base = um
  modified_base 20: mod_base = OTHER; note = 2-O-methylribose adenine
  modified_base 20..21: mod_base = OTHER; note = S-phosphorothioate
  modified_base 21: mod_base = OTHER; note = 2-O-methylribose adenine
  source 1..21: mol_type = other RNA
aacagtgttcttgctctataa

SEQ ID NO: 982 - RNA, 21 nt, synthetic construct
  misc_feature 1..21: note = Synthetic: SSR-0106631
  modified_base 1: mod_base = OTHER; note = triantennary GalNAc with C12 linker linked to 6-aminohexanol linked by phosphate to the 5' end of 2-O-methylribose adenine
  modified_base 1..2: mod_base = OTHER; note = S-phosphorothioate
  modified_base 2: mod_base = OTHER; note = 2-O-methylribose adenine
  modified_base 3: mod_base = cm
  modified_base 4: mod_base = OTHER; note = 2-O-methylribose adenine
  modified_base 5: mod_base = gm
  modified_base 6: mod_base = um
  modified_base 7: mod_base = OTHER; note = 2-fluororibose guanine
  modified_base 8: mod_base = um
  modified_base 9: mod_base = OTHER; note = 2-fluororibose uracil
  modified_base 10: mod_base = OTHER; note = 2-fluororibose cytosine
  modified_base 11: mod_base = OTHER; note = 2-fluororibose uracil
  modified_base 12: mod_base = um
  modified_base 13: mod_base = gm
  modified_base 14: mod_base = cm
  modified_base 15: mod_base = um
  modified_base 16: mod_base = cm
  modified_base 17: mod_base = um
  modified_base 18: mod_base = OTHER; note = 2-O-methylribose adenine
  modified_base 19: mod_base = OTHER; note = 2,3-dideoxy-Beta-D-glucopyranose thymine
  modified_base 20: mod_base = OTHER; note = 2-O-methylribose adenine
  modified_base 20..21: mod_base = OTHER; note = S-phosphorothioate
  modified_base 21: mod_base = OTHER; note = 2-O-methylribose adenine
  source 1..21: mol_type = other RNA
aacagtgttcttgctctataa

SEQ ID NO: 983 - RNA, 21 nt, synthetic construct
  modified_base 19: mod_base = OTHER; note = ribose thymine
  source 1..21: mol_type = other RNA
aacagtgttcttgctctataa

SEQ ID NO: 984 - RNA, 21 nt, synthetic construct
  misc_feature 1..21: note = Synthetic: SSR-0106632
  modified_base 1: mod_base = OTHER; note = triantennary GalNAc with C12 linker linked to 6-aminohexanol linked by phosphate to the 5' end of 2-O-methylribose adenine
  modified_base 1..2: mod_base = OTHER; note = S-phosphorothioate
  modified_base 2: mod_base = OTHER; note = 2-O-methylribose adenine
  modified_base 3: mod_base = cm
  modified_base 4: mod_base = OTHER; note = 2-O-methylribose adenine
  modified_base 5: mod_base = gm
  modified_base 6: mod_base = um
  modified_base 7: mod_base = OTHER; note = 2-fluororibose guanine
  modified_base 8: mod_base = um
  modified_base 9: mod_base = OTHER; note = 2-fluororibose uracil
  modified_base 10: mod_base = OTHER; note = 2-fluororibose cytosine
  modified_base 11: mod_base = OTHER; note = 2-fluororibose uracil
  modified_base 12: mod_base = um
  modified_base 13: mod_base = gm
  modified_base 14: mod_base = cm
  modified_base 15: mod_base = um
  modified_base 16: mod_base = cm
  modified_base 17: mod_base = um
  modified_base 18: mod_base = OTHER; note = 2-O-methylribose adenine
  modified_base 19: mod_base = um
  modified_base 20: mod_base = OTHER; note = 2,3-dideoxy-Beta-D-glucopyranose adenine
  modified_base 20..21: mod_base = OTHER; note = S-phosphorothioate
  modified_base 21: mod_base = OTHER; note = 2-O-methylribose adenine
  source 1..21: mol_type = other RNA
aacagtgttcttgctctataa

SEQ ID NO: 985 - RNA, 21 nt, synthetic construct
  misc_feature 1..21: note = Synthetic: SSR-0106633
  modified_base 1: mod_base = OTHER; note = triantennary GalNAc with C12 linker linked to 6-aminohexanol linked by phosphate to the 5' end of 2-O-methylribose adenine
  modified_base 1..2: mod_base = OTHER; note = S-phosphorothioate
  modified_base 2: mod_base = OTHER; note = 2-O-methylribose adenine
  modified_base 3: mod_base = cm
  modified_base 4: mod_base = OTHER; note = 2-O-methylribose adenine
  modified_base 5: mod_base = gm
  modified_base 6: mod_base = um
  modified_base 7: mod_base = OTHER; note = 2-fluororibose guanine
  modified_base 8: mod_base = um
  modified_base 9: mod_base = OTHER; note = 2-fluororibose uracil
  modified_base 10: mod_base = OTHER; note = 2-fluororibose cytosine
  modified_base 11: mod_base = OTHER; note = 2-fluororibose uracil
  modified_base 12: mod_base = um
  modified_base 13: mod_base = gm
  modified_base 14: mod_base = cm
  modified_base 15: mod_base = um
  modified_base 16: mod_base = cm
  modified_base 17: mod_base = OTHER; note = 2,3-dideoxy-Beta-D-glucopyranose thymine
  modified_base 18: mod_base = OTHER; note = 2-O-methylribose adenine
  modified_base 19: mod_base = um
  modified_base 20: mod_base = OTHER; note = 2-O-methylribose adenine
  modified_base 20..21: mod_base = OTHER; note = S-phosphorothioate
  modified_base 21: mod_base = OTHER; note = 2-O-methylribose adenine
  source 1..21: mol_type = other RNA
aacagtgttcttgctctataa

SEQ ID NO: 986 - RNA, 21 nt, synthetic construct
  modified_base 17: mod_base = OTHER; note = ribose thymine
  source 1..21: mol_type = other RNA
aacagtgttcttgctctataa

SEQ ID NO: 987 - RNA, 21 nt, synthetic construct
  misc_feature 1..21: note = Synthetic: SSR-0106634
  modified_base 1: mod_base = OTHER; note = triantennary GalNAc with C12 linker linked to 6-aminohexanol linked by phosphate to the 5' end of 2-O-methylribose adenine
  modified_base 1..2: mod_base = OTHER; note = S-phosphorothioate
  modified_base 2: mod_base = OTHER; note = 2-O-methylribose adenine
  modified_base 3: mod_base = cm
  modified_base 4: mod_base = OTHER; note = 2-O-methylribose adenine
  modified_base 5: mod_base = gm
  modified_base 6: mod_base = um
  modified_base 7: mod_base = OTHER; note = 2-fluororibose guanine
  modified_base 8: mod_base = um
  modified_base 9: mod_base = OTHER; note = 2-fluororibose uracil
  modified_base 10: mod_base = OTHER; note = 2-fluororibose cytosine
  modified_base 11: mod_base = OTHER; note = 2-fluororibose uracil
  modified_base 12: mod_base = um
  modified_base 13: mod_base = gm
  modified_base 14: mod_base = OTHER; note = 2,3-dideoxy-Beta-D-glucopyranose cytosine
  modified_base 15: mod_base = um
  modified_base 16: mod_base = cm
  modified_base 17: mod_base = um
  modified_base 18: mod_base = OTHER; note = 2-O-methylribose adenine
  modified_base 19: mod_base = um
  modified_base 20: mod_base = OTHER; note = 2-O-methylribose adenine
  modified_base 20..21: mod_base = OTHER; note = S-phosphorothioate
  modified_base 21: mod_base = OTHER; note = 2-O-methylribose adenine
  source 1..21: mol_type = other RNA
aacagtgttcttgctctataa

SEQ ID NO: 988 - RNA, 21 nt, synthetic construct
  misc_feature 1..21: note = Synthetic: SSR-0106635
  modified_base 1: mod_base = OTHER; note = triantennary GalNAc with C12 linker linked to 6-aminohexanol linked by phosphate to the 5' end of 2-O-methylribose adenine
  modified_base 1..2: mod_base = OTHER; note = S-phosphorothioate
  modified_base 2: mod_base = OTHER; note = 2-O-methylribose adenine
  modified_base 3: mod_base = cm
  modified_base 4: mod_base = OTHER; note = 2-O-methylribose adenine
  modified_base 5: mod_base = gm
  modified_base 6: mod_base = um
  modified_base 7: mod_base = OTHER; note = 2-fluororibose guanine
  modified_base 8: mod_base = um
  modified_base 9: mod_base = OTHER; note = 2-fluororibose uracil
  modified_base 10: mod_base = OTHER; note = 2-fluororibose cytosine
  modified_base 11: mod_base = OTHER; note = 2-fluororibose uracil
  modified_base 12: mod_base = um
  modified_base 13: mod_base = gm
  modified_base 14: mod_base = cm
  modified_base 15: mod_base = OTHER; note = 2,3-dideoxy-Beta-D-glucopyranose thymine
  modified_base 16: mod_base = cm
  modified_base 17: mod_base = um
  modified_base 18: mod_base = OTHER; note = 2-O-methylribose adenine
  modified_base 19: mod_base = um
  modified_base 20: mod_base = OTHER; note = 2-O-methylribose adenine
  modified_base 20..21: mod_base = OTHER; note = S-phosphorothioate
  modified_base 21: mod_base = OTHER; note = 2-O-methylribose adenine
  source 1..21: mol_type = other RNA
aacagtgttcttgctctataa

SEQ ID NO: 989 - RNA, 21 nt, synthetic construct
  modified_base 15: mod_base = OTHER; note = ribose thymine
  source 1..21: mol_type = other RNA
aacagtgttcttgctctataa

SEQ ID NO: 990 - RNA, 21 nt, synthetic construct
  misc_feature 1..21: note = Synthetic: SSR-0106637
  modified_base 1: mod_base = OTHER; note = triantennary GalNAc with C12 linker linked to 6-aminohexanol linked by phosphate to the 5' end of 2-O-methylribose adenine
  modified_base 1..2: mod_base = OTHER; note = S-phosphorothioate
  modified_base 2: mod_base = OTHER; note = 2-O-methylribose adenine
  modified_base 3: mod_base = cm
  modified_base 4: mod_base = OTHER; note = 2-O-methylribose adenine
  modified_base 5: mod_base = gm
  modified_base 6: mod_base = um
  modified_base 7: mod_base = OTHER; note = 2-fluororibose guanine
  modified_base 8: mod_base = um
  modified_base 9: mod_base = OTHER; note = 2-fluororibose uracil
  modified_base 10: mod_base = OTHER; note = 2-fluororibose cytosine
  modified_base 11: mod_base = OTHER; note = 2-fluororibose uracil
  modified_base 12: mod_base = um
  modified_base 13: mod_base = OTHER; note = 2,3-dideoxy-Beta-D-glucopyranose guanine
  modified_base 14: mod_base = cm
  modified_base 15: mod_base = um
  modified_base 16: mod_base = cm
  modified_base 17: mod_base = um
  modified_base 18: mod_base = OTHER; note = 2-O-methylribose adenine
  modified_base 19: mod_base = um
  modified_base 20: mod_base = OTHER; note = 2-O-methylribose adenine
  modified_base 20..21: mod_base = OTHER; note = S-phosphorothioate
  modified_base 21: mod_base = OTHER; note = 2-O-methylribose adenine
  source 1..21: mol_type = other RNA
aacagtgttcttgctctataa

SEQ ID NO: 991 - RNA, 21 nt, synthetic construct
  misc_feature 1..21: note = Synthetic: SSR-0106638
  modified_base 1: mod_base = OTHER; note = triantennary GalNAc with C12 linker linked to 6-aminohexanol linked by phosphate to the 5' end of 2-O-methylribose adenine
  modified_base 1..2: mod_base = OTHER; note = S-phosphorothioate
  modified_base 2: mod_base = OTHER; note = 2-O-methylribose adenine
  modified_base 3: mod_base = cm
  modified_base 4: mod_base = OTHER; note = 2-O-methylribose adenine
  modified_base 5: mod_base = gm
  modified_base 6: mod_base = um
  modified_base 7: mod_base = OTHER; note = 2-fluororibose guanine
  modified_base 8: mod_base = um
  modified_base 9: mod_base = OTHER; note = 2-fluororibose uracil
  modified_base 10: mod_base = OTHER; note = 2-fluororibose cytosine
  modified_base 11: mod_base = OTHER; note = 2-fluororibose uracil
  modified_base 12: mod_base = OTHER; note = 2,3-dideoxy-Beta-D-glucopyranose thymine
  modified_base 13: mod_base = gm
  modified_base 14: mod_base = cm
  modified_base 15: mod_base = um
  modified_base 16: mod_base = cm
  modified_base 17: mod_base = um
  modified_base 18: mod_base = OTHER; note = 2-O-methylribose adenine
  modified_base 19: mod_base = um
  modified_base 20: mod_base = OTHER; note = 2-O-methylribose adenine
  modified_base 20..21: mod_base = OTHER; note = S-phosphorothioate
  modified_base 21: mod_base = OTHER; note = 2-O-methylribose adenine
  source 1..21: mol_type = other RNA
aacagtgttcttgctctataa

SEQ ID NO: 992 - RNA, 21 nt, synthetic construct
  modified_base 12: mod_base = OTHER; note = ribose thymine
  source 1..21: mol_type = other RNA
aacagtgttcttgctctataa

SEQ ID NO: 993 - RNA, 21 nt, synthetic construct
  misc_feature 1..21: note = Synthetic: SSR-0106640
  modified_base 1: mod_base = OTHER; note = triantennary GalNAc with C12 linker linked to 6-aminohexanol linked by phosphate to the 5' end of 2-O-methylribose adenine
  modified_base 1..2: mod_base = OTHER; note = S-phosphorothioate
  modified_base 2: mod_base = OTHER; note = 2-O-methylribose adenine
  modified_base 3: mod_base = cm
  modified_base 4: mod_base = OTHER; note = 2-O-methylribose adenine
  modified_base 5: mod_base = gm
  modified_base 6: mod_base = um
  modified_base 7: mod_base = OTHER; note = 2-fluororibose guanine
  modified_base 8: mod_base = um
  modified_base 9: mod_base = OTHER; note = 2-fluororibose uracil
  modified_base 10: mod_base = OTHER; note = 2-fluororibose cytosine
  modified_base 11: mod_base = OTHER; note = 2-fluororibose uracil
  modified_base 12: mod_base = um
  modified_base 13: mod_base = gm
  modified_base 14: mod_base = cm
  modified_base 15: mod_base = um
  modified_base 16: mod_base = OTHER; note = 2,3-dideoxy-Beta-D-glucopyranose cytosine
  modified_base 17: mod_base = um
  modified_base 18: mod_base = OTHER; note = 2-O-methylribose adenine
  modified_base 19: mod_base = um
  modified_base 20: mod_base = OTHER; note = 2-O-methylribose adenine
  modified_base 20..21: mod_base = OTHER; note = S-phosphorothioate
  modified_base 21: mod_base = OTHER; note = 2-O-methylribose adenine
  source 1..21: mol_type = other RNA
aacagtgttcttgctctataa

SEQ ID NO: 994 - RNA, 21 nt, synthetic construct
  misc_feature 1..21: note = Synthetic: SSR-0106643
  modified_base 1: mod_base = OTHER; note = triantennary GalNAc with C12 linker linked to 6-aminohexanol linked by phosphate to the 5' end of 2-O-methylribose adenine
  modified_base 1..2: mod_base = OTHER; note = phosphorothioate
  modified_base 2: mod_base = OTHER; note = 2-O-methylribose adenine
  modified_base 3: mod_base = cm
  modified_base 4: mod_base = OTHER; note = 2-O-methylribose adenine
  modified_base 5: mod_base = gm
  modified_base 6: mod_base = um
  modified_base 7: mod_base = OTHER; note = 2-fluororibose guanine
  modified_base 8: mod_base = um
  modified_base 9: mod_base = OTHER; note = 2-fluororibose uracil
  modified_base 10: mod_base = OTHER; note = 2-fluororibose cytosine
  modified_base 11: mod_base = OTHER; note = 2-fluororibose uracil
  modified_base 12: mod_base = um
  modified_base 13: mod_base = gm
  modified_base 14: mod_base = cm
  modified_base 15: mod_base = um
  modified_base 16: mod_base = cm
  modified_base 17: mod_base = um
  modified_base 18: mod_base = OTHER; note = 2-O-methylribose adenine
  modified_base 19: mod_base = um
  modified_base 20: mod_base = OTHER; note = 2,3-dideoxy-Beta-D-glucopyranose adenine
  modified_base 20..21: mod_base = OTHER; note = phosphorothioate
  modified_base 21: mod_base = OTHER; note = 2-O-methylribose adenine
  source 1..21: mol_type = other RNA
aacagtgttcttgctctataa

SEQ ID NO: 995 - RNA, 21 nt, synthetic construct
  misc_feature 1..21: note = Synthetic: SSR-0107400
  modified_base 1: mod_base = cm
  modified_base 1..2: mod_base = OTHER; note = S-phosphorothioate
  modified_base 2: mod_base = OTHER; note = 2-O-methylribose adenine
  modified_base 3: mod_base = um
  modified_base 4: mod_base = um
  modified_base 5: mod_base = um
  modified_base 6: mod_base = um
  modified_base 7: mod_base = OTHER; note = 2-fluororibose adenine
  modified_base 7..8: mod_base = OTHER; note R-N-(1,3-dimethylimidazolidin-2-ylidene)phosphoramidate
  modified_base 8: mod_base = OTHER; note = 2-O-methylribose adenine
  modified_base 9: mod_base = OTHER; note = 2-fluororibose uracil
  modified_base 10: mod_base = OTHER; note = 2-fluororibose cytosine
  modified_base 11: mod_base = OTHER; note = 2-fluororibose cytosine
  modified_base 12: mod_base = um
  modified_base 13: mod_base = cm
  modified_base 14: mod_base = OTHER; note = 2-O-methylribose adenine
  modified_base 15: mod_base = cm
  modified_base 15..16: mod_base = OTHER; note R-N-(1,3-dimethylimidazolidin-2-ylidene)phosphoramidate
  modified_base 16: mod_base = um
  modified_base 17: mod_base = cm
  modified_base 18: mod_base = um
  modified_base 19: mod_base = OTHER; note = 2-O-methylribose adenine
  modified_base 20: mod_base = OTHER; note = 2-O-methylribose adenine
  modified_base 20..21: mod_base = OTHER; note = S-phosphorothioate
  modified_base 21: mod_base = OTHER; note = 2-O-methylribose adenine
  source 1..21: mol_type = other RNA
cattttaatcctcactctaaa

SEQ ID NO: 996 - RNA, 21 nt, synthetic construct
  source 1..21: mol_type = other RNA
cattttaatcctcactctaaa

SEQ ID NO: 997 - RNA, 21 nt, synthetic construct
  misc_feature 1..21: note = Synthetic: SSR-0107412
  modified_base 1: mod_base = cm
  modified_base 1..2: mod_base = OTHER; note = S-phosphorothioate
  modified_base 2: mod_base = OTHER; note = 2-O-methylribose adenine
  modified_base 3: mod_base = um
  modified_base 4: mod_base = um
  modified_base 5: mod_base = um
  modified_base 6: mod_base = um
  modified_base 7: mod_base = OTHER; note = 2-fluororibose adenine
  modified_base 7..8: mod_base = OTHER; note R-N-(1-docecyl-3-methylimidazolidin-2-ylidene)phosphoramida te
  modified_base 8: mod_base = OTHER; note = 2-O-methylribose adenine
  modified_base 9: mod_base = OTHER; note = 2-fluororibose uracil
  modified_base 10: mod_base = OTHER; note = 2-fluororibose cytosine
  modified_base 11: mod_base = OTHER; note = 2-fluororibose cytosine
  modified_base 12: mod_base = um
  modified_base 13: mod_base = cm
  modified_base 14: mod_base = OTHER; note = 2-O-methylribose adenine
  modified_base 15: mod_base = cm
  modified_base 15..16: mod_base = OTHER; note R-N-(1-docecyl-3-methylimidazolidin-2-ylidene)phosphoramida te
  modified_base 16: mod_base = um
  modified_base 17: mod_base = cm
  modified_base 18: mod_base = um
  modified_base 19: mod_base = OTHER; note = 2-O-methylribose adenine
  modified_base 20: mod_base = OTHER; note = 2-O-methylribose adenine
  modified_base 20..21: mod_base = OTHER; note = S-phosphorothioate
  modified_base 21: mod_base = OTHER; note = 2-O-methylribose adenine
  source 1..21: mol_type = other RNA
cattttaatcctcactctaaa

SEQ ID NO: 998 - RNA, 21 nt, synthetic construct
  misc_feature 1..21: note = Synthetic: SSR-0107413
  modified_base 1: mod_base = cm
  modified_base 1..2: mod_base = OTHER; note = S-phosphorothioate
  modified_base 2: mod_base = OTHER; note = 2-O-methylribose adenine
  modified_base 3: mod_base = um
  modified_base 4: mod_base = um
  modified_base 5: mod_base = um
  modified_base 6: mod_base = um
  modified_base 7: mod_base = OTHER; note = 2-fluororibose adenine
  modified_base 7..8: mod_base = OTHER; note R-N-(1,3-dimethylimidazolidin-2-ylidene)phosphoramidate
  modified_base 8: mod_base = OTHER; note = 2-O-methylribose adenine
  modified_base 9: mod_base = OTHER; note = 2-fluororibose uracil
  modified_base 10: mod_base = OTHER; note = 2-fluororibose cytosine
  modified_base 11: mod_base = OTHER; note = 2-fluororibose cytosine
  modified_base 12: mod_base = um
  modified_base 13: mod_base = cm
  modified_base 14: mod_base = OTHER; note = 2-O-methylribose adenine
  modified_base 15: mod_base = cm
  modified_base 16: mod_base = um
  modified_base 17: mod_base = cm
  modified_base 18: mod_base = um
  modified_base 19: mod_base = OTHER; note = 2-O-methylribose adenine
  modified_base 20: mod_base = OTHER; note = 2-O-methylribose adenine
  modified_base 20..21: mod_base = OTHER; note = S-phosphorothioate
  modified_base 21: mod_base = OTHER; note = 2-O-methylribose adenine
  source 1..21: mol_type = other RNA
cattttaatcctcactctaaa

SEQ ID NO: 999 - RNA, 21 nt, synthetic construct
  misc_feature 1..21: note = Synthetic: SSR-0107414
  modified_base 1: mod_base = cm
  modified_base 1..2: mod_base = OTHER; note = S-phosphorothioate
  modified_base 2: mod_base = OTHER; note = 2-O-methylribose adenine
  modified_base 3: mod_base = um
  modified_base 4: mod_base = um
  modified_base 5: mod_base = um
  modified_base 6: mod_base = um
  modified_base 7: mod_base = OTHER; note = 2-fluororibose adenine
  modified_base 7..8: mod_base = OTHER; note R-N-(1-docecyl-3-methylimidazolidin-2-ylidene)phosphoramida te
  modified_base 8: mod_base = OTHER; note = 2-O-methylribose adenine
  modified_base 9: mod_base = OTHER; note = 2-fluororibose uracil
  modified_base 10: mod_base = OTHER; note = 2-fluororibose cytosine
  modified_base 11: mod_base = OTHER; note = 2-fluororibose cytosine
  modified_base 12: mod_base = um
  modified_base 13: mod_base = cm
  modified_base 14: mod_base = OTHER; note = 2-O-methylribose adenine
  modified_base 15: mod_base = cm
  modified_base 16: mod_base = um
  modified_base 17: mod_base = cm
  modified_base 18: mod_base = um
  modified_base 19: mod_base = OTHER; note = 2-O-methylribose adenine
  modified_base 20: mod_base = OTHER; note = 2-O-methylribose adenine
  modified_base 20..21: mod_base = OTHER; note = S-phosphorothioate
  modified_base 21: mod_base = OTHER; note = 2-O-methylribose adenine
  source 1..21: mol_type = other RNA
cattttaatcctcactctaaa

SEQ ID NO: 1000 - RNA, 21 nt, synthetic construct
  misc_feature 1..21: note = Synthetic: SSR-0107415
  modified_base 1: mod_base = cm
  modified_base 1..2: mod_base = OTHER; note = S-phosphorothioate
  modified_base 2: mod_base = OTHER; note = 2-O-methylribose adenine
  modified_base 3: mod_base = um
  modified_base 4: mod_base = um
  modified_base 5: mod_base = um
  modified_base 6: mod_base = um
  modified_base 7: mod_base = OTHER; note = 2-fluororibose adenine
  modified_base 7..8: mod_base = OTHER; note R-N-(1,3-didodecylimidazolidin-2-ylidene)phosphoramidate
  modified_base 8: mod_base = OTHER; note = 2-O-methylribose adenine
  modified_base 9: mod_base = OTHER; note = 2-fluororibose uracil
  modified_base 10: mod_base = OTHER; note = 2-fluororibose cytosine
  modified_base 11: mod_base = OTHER; note = 2-fluororibose cytosine
  modified_base 12: mod_base = um
  modified_base 13: mod_base = cm
  modified_base 14: mod_base = OTHER; note = 2-O-methylribose adenine
  modified_base 15: mod_base = cm
  modified_base 16: mod_base = um
  modified_base 17: mod_base = cm
  modified_base 18: mod_base = um
  modified_base 19: mod_base = OTHER; note = 2-O-methylribose adenine
  modified_base 20: mod_base = OTHER; note = 2-O-methylribose adenine
  modified_base 20..21: mod_base = OTHER; note = S-phosphorothioate
  modified_base 21: mod_base = OTHER; note = 2-O-methylribose adenine
  source 1..21: mol_type = other RNA
cattttaatcctcactctaaa

SEQ ID NO: 1001 - RNA, 21 nt, synthetic construct
  misc_feature 1..21: note = Synthetic: SSR-0107419
  modified_base 1: mod_base = cm
  modified_base 1..2: mod_base = OTHER; note = S-phosphorothioate
  modified_base 2: mod_base = OTHER; note = 2-O-methylribose adenine
  modified_base 3: mod_base = um
  modified_base 4: mod_base = um
  modified_base 5: mod_base = um
  modified_base 6: mod_base = um
  modified_base 7: mod_base = OTHER; note = 2-fluororibose adenine
  modified_base 7..8: mod_base = OTHER; note R-N-(1-docecyl-3-methylimidazolidin-2-ylidene)phosphoramida te
  modified_base 8: mod_base = OTHER; note = 2-O-methylribose adenine
  modified_base 9: mod_base = OTHER; note = 2-fluororibose uracil
  modified_base 10: mod_base = OTHER; note = 2-fluororibose cytosine
  modified_base 11: mod_base = OTHER; note = 2-fluororibose cytosine
  modified_base 12: mod_base = um
  modified_base 13: mod_base = cm
  modified_base 14: mod_base = OTHER; note = 2-O-methylribose adenine
  modified_base 15: mod_base = cm
  modified_base 15..16: mod_base = OTHER; note R-N-(1,3-dimethylimidazolidin-2-ylidene)phosphoramidate
  modified_base 16: mod_base = um
  modified_base 17: mod_base = cm
  modified_base 18: mod_base = um
  modified_base 19: mod_base = OTHER; note = 2-O-methylribose adenine
  modified_base 20: mod_base = OTHER; note = 2-O-methylribose adenine
  modified_base 20..21: mod_base = OTHER; note = S-phosphorothioate
  modified_base 21: mod_base = OTHER; note = 2-O-methylribose adenine
  source 1..21: mol_type = other RNA
cattttaatcctcactctaaa

SEQ ID NO: 1002 - RNA, 21 nt, synthetic construct
  misc_feature 1..21: note = Synthetic: SSR-0107420
  modified_base 1: mod_base = cm
  modified_base 1..2: mod_base = OTHER; note = S-phosphorothioate
  modified_base 2: mod_base = OTHER; note = 2-O-methylribose adenine
  modified_base 3: mod_base = um
  modified_base 4: mod_base = um
  modified_base 5: mod_base = um
  modified_base 6: mod_base = um
  modified_base 7: mod_base = OTHER; note = 2-fluororibose adenine
  modified_base 7..8: mod_base = OTHER; note R-N-(1-hexadecyl-3-methylimidazolidin-2-ylidene)phosphorami date
  modified_base 8: mod_base = OTHER; note = 2-O-methylribose adenine
  modified_base 9: mod_base = OTHER; note = 2-fluororibose uracil
  modified_base 10: mod_base = OTHER; note = 2-fluororibose cytosine
  modified_base 11: mod_base = OTHER; note = 2-fluororibose cytosine
  modified_base 12: mod_base = um
  modified_base 13: mod_base = cm
  modified_base 14: mod_base = OTHER; note = 2-O-methylribose adenine
  modified_base 15: mod_base = cm
  modified_base 15..16: mod_base = OTHER; note R-N-(1,3-dimethylimidazolidin-2-ylidene)phosphoramidate
  modified_base 16: mod_base = um
  modified_base 17: mod_base = cm
  modified_base 18: mod_base = um
  modified_base 19: mod_base = OTHER; note = 2-O-methylribose adenine
  modified_base 20: mod_base = OTHER; note = 2-O-methylribose adenine
  modified_base 20..21: mod_base = OTHER; note = S-phosphorothioate
  modified_base 21: mod_base = OTHER; note = 2-O-methylribose adenine
  source 1..21: mol_type = other RNA
cattttaatcctcactctaaa

SEQ ID NO: 1003 - RNA, 21 nt, synthetic construct
  misc_feature 1..21: note = Synthetic: SSR-0107421
  modified_base 1: mod_base = cm
  modified_base 1..2: mod_base = OTHER; note = S-phosphorothioate
  modified_base 2: mod_base = OTHER; note = 2-O-methylribose adenine
  modified_base 3: mod_base = um
  modified_base 4: mod_base = um
  modified_base 5: mod_base = um
  modified_base 6: mod_base = um
  modified_base 7: mod_base = OTHER; note = 2-fluororibose adenine
  modified_base 7..8: mod_base = OTHER; note R-N-(1-hexadecyl-3-methylimidazolidin-2-ylidene)phosphorami date
  modified_base 8: mod_base = OTHER; note = 2-O-methylribose adenine
  modified_base 9: mod_base = OTHER; note = 2-fluororibose uracil
  modified_base 10: mod_base = OTHER; note = 2-fluororibose cytosine
  modified_base 11: mod_base = OTHER; note = 2-fluororibose cytosine
  modified_base 12: mod_base = um
  modified_base 13: mod_base = cm
  modified_base 14: mod_base = OTHER; note = 2-O-methylribose adenine
  modified_base 15: mod_base = cm
  modified_base 16: mod_base = um
  modified_base 17: mod_base = cm
  modified_base 18: mod_base = um
  modified_base 19: mod_base = OTHER; note = 2-O-methylribose adenine
  modified_base 20: mod_base = OTHER; note = 2-O-methylribose adenine
  modified_base 20..21: mod_base = OTHER; note = S-phosphorothioate
  modified_base 21: mod_base = OTHER; note = 2-O-methylribose adenine
  source 1..21: mol_type = other RNA
cattttaatcctcactctaaa

SEQ ID NO: 1004 - RNA, 21 nt, synthetic construct
  misc_feature 1..21: note = Synthetic: SSR-0108086
  modified_base 1: mod_base = um
  modified_base 1..2: mod_base = OTHER; note = S-phosphorothioate
  modified_base 2: mod_base = um
  modified_base 3: mod_base = cm
  modified_base 4: mod_base = cm
  modified_base 5: mod_base = um
  modified_base 6: mod_base = cm
  modified_base 7: mod_base = OTHER; note = 2-fluororibose guanine
  modified_base 7..8: mod_base = OTHER; note R-N-(1-docecyl-3-methylimidazolidin-2-ylidene)phosphoramida te
  modified_base 8: mod_base = gm
  modified_base 9: mod_base = OTHER; note = 2-fluororibose uracil
  modified_base 10: mod_base = OTHER; note = 2-fluororibose adenine
  modified_base 11: mod_base = OTHER; note = 2-fluororibose uracil
  modified_base 12: mod_base = um
  modified_base 13: mod_base = um
  modified_base 14: mod_base = OTHER; note = 2-O-methylribose adenine
  modified_base 15: mod_base = um
  modified_base 15..16: mod_base = OTHER; note R-N-(1-docecyl-3-methylimidazolidin-2-ylidene)phosphoramida te
  modified_base 16: mod_base = um
  modified_base 17: mod_base = gm
  modified_base 18: mod_base = um
  modified_base 19: mod_base = cm
  modified_base 20: mod_base = um
  modified_base 20..21: mod_base = OTHER; note = S-phosphorothioate
  modified_base 21: mod_base = OTHER; note = 2-O-methylribose adenine
  source 1..21: mol_type = other RNA
ttcctcggtatttattgtcta

SEQ ID NO: 1005 - RNA, 21 nt, synthetic construct
  source 1..21: mol_type = other RNA
ttcctcggtatttattgtcta

SEQ ID NO: 1006 - RNA, 18 nt, synthetic construct
  misc_feature 1..18: note = Synthetic: WV-2782
  misc_feature 1..18: note = Synthetic: ASO-0104323
  modified_base 1: mod_base = OTHER; note = 2-O-methoxyethylribose thymine
  modified_base 1..2: mod_base = OTHER; note = phosphorothioate
  modified_base 2: mod_base = OTHER; note = 2-O-methoxyethylribose 5-methyl-cytidine
  modified_base 2..3: mod_base = OTHER; note = phosphorothioate
  modified_base 3: mod_base = OTHER; note = 2-O-methoxyethylribose adenine
  modified_base 3..4: mod_base = OTHER; note = phosphorothioate
  modified_base 4: mod_base = OTHER; note = 2-O-methoxyethylribose 5-methyl-cytidine
  modified_base 4..5: mod_base = OTHER; note = phosphorothioate
  modified_base 5: mod_base = OTHER; note = 2-O-methoxyethylribose thymine
  modified_base 5..6: mod_base = OTHER; note = phosphorothioate
  modified_base 6: mod_base = OTHER; note = 2-O-methoxyethylribose thymine
  modified_base 6..7: mod_base = OTHER; note = phosphorothioate
  modified_base 7: mod_base = OTHER; note = 2-O-methoxyethylribose thymine
  modified_base 7..8: mod_base = OTHER; note = phosphorothioate
  modified_base 8: mod_base = OTHER; note = 2-O-methoxyethylribose 5-methyl-cytidine
  modified_base 8..9: mod_base = OTHER; note = phosphorothioate
  modified_base 9: mod_base = OTHER; note = 2-O-methoxyethylribose adenine
  modified_base 9..10: mod_base = OTHER; note = phosphorothioate
  modified_base 10: mod_base = OTHER; note = 2-O-methoxyethylribose thymine
  modified_base 10..11: mod_base = OTHER; note = phosphorothioate
  modified_base 11: mod_base = OTHER; note = 2-O-methoxyethylribose adenine
  modified_base 11..12: mod_base = OTHER; note = phosphorothioate
  modified_base 12: mod_base = OTHER; note = 2-O-methoxyethylribose adenine
  modified_base 12..13: mod_base = OTHER; note = phosphorothioate
  modified_base 13: mod_base = OTHER; note = 2-O-methoxyethylribose thymine
  modified_base 13..14: mod_base = OTHER; note = phosphorothioate
  modified_base 14: mod_base = OTHER; note = 2-O-methoxyethylribose guanine
  modified_base 14..15: mod_base = OTHER; note = phosphorothioate
  modified_base 15: mod_base = OTHER; note = 2-O-methoxyethylribose 5-methyl-cytidine
  modified_base 15..16: mod_base = OTHER; note = phosphorothioate
  modified_base 16: mod_base = OTHER; note = 2-O-methoxyethylribose thymine
  modified_base 16..17: mod_base = OTHER; note = phosphorothioate
  modified_base 17: mod_base = OTHER; note = 2-O-methoxyethylribose guanine
  modified_base 17..18: mod_base = OTHER; note = phosphorothioate
  modified_base 18: mod_base = OTHER; note = 2-O-methoxyethylribose guanine
  source 1..18: mol_type = other RNA
tcactttcataatgctgg

SEQ ID NO: 1007 - RNA, 18 nt, synthetic construct
  modified_base 1: mod_base = OTHER; note = ribose thymine
  modified_base 5: mod_base = OTHER; note = ribose thymine
  modified_base 6: mod_base = OTHER; note = ribose thymine
  modified_base 7: mod_base = OTHER; note = ribose thymine
  modified_base 10: mod_base = OTHER; note = ribose thymine
  modified_base 13: mod_base = OTHER; note = ribose thymine
  modified_base 16: mod_base = OTHER; note = ribose thymine
  source 1..18: mol_type = other RNA
tcactttcataatgctgg

SEQ ID NO: 1008 - RNA, 20 nt, synthetic construct
  misc_feature 1..20: note = Synthetic: WV-8012
  misc_feature 1..20: note = Synthetic: ASO-0109259
  modified_base 1: mod_base = cm
  modified_base 1..2: mod_base = OTHER; note = S-phosphorothioate
  modified_base 2: mod_base = OTHER; note = 2-O-methoxyethylribose 5-methyl-cytidine
  modified_base 3: mod_base = OTHER; note = 2-O-methoxyethylribose thymine
  modified_base 4: mod_base = OTHER; note = 2-O-methoxyethylribose 5-methyl-cytidine
  modified_base 5: mod_base = OTHER; note = 2-O-methylribose adenine
  modified_base 5..6: mod_base = OTHER; note = S-phosphorothioate
  modified_base 6: mod_base = OTHER; note = deoxyribose cytosine
  modified_base 6..7: mod_base = OTHER; note = S-phosphorothioate
  modified_base 7: mod_base = OTHER; note = deoxyribose thymine
  modified_base 7..8: mod_base = OTHER; note = S-phosphorothioate
  modified_base 8: mod_base = OTHER; note = deoxyribose cytosine
  modified_base 8..9: mod_base = OTHER; note = R-phosphorothioate
  modified_base 9: mod_base = OTHER; note = deoxyribose adenine
  modified_base 9..10: mod_base = OTHER; note = S-phosphorothioate
  modified_base 10: mod_base = OTHER; note = deoxyribose cytosine
  modified_base 10..11: mod_base = OTHER; note = S-phosphorothioate
  modified_base 11: mod_base = OTHER; note = deoxyribose cytosine
  modified_base 11..12: mod_base = OTHER; note = R-phosphorothioate
  modified_base 12: mod_base = OTHER; note = deoxyribose cytosine
  modified_base 12..13: mod_base = OTHER; note = S-phosphorothioate
  modified_base 13: mod_base = OTHER; note = deoxyribose adenine
  modified_base 13..14: mod_base = OTHER; note = S-phosphorothioate
  modified_base 14: mod_base = OTHER; note = deoxyribose cytosine
  modified_base 14..15: mod_base = OTHER; note = S-phosphorothioate
  modified_base 15: mod_base = OTHER; note = deoxyribose thymine
  modified_base 15..16: mod_base = OTHER; note = S-phosphorothioate
  modified_base 16: mod_base = cm
  modified_base 16..17: mod_base = OTHER; note = S-phosphorothioate
  modified_base 17: mod_base = gm
  modified_base 17..18: mod_base = OTHER; note = S-phosphorothioate
  modified_base 18: mod_base = cm
  modified_base 18..19: mod_base = OTHER; note = S-phosphorothioate
  modified_base 19: mod_base = cm
  modified_base 19..20: mod_base = OTHER; note = S-phosphorothioate
  modified_base 20: mod_base = OTHER; note = 2-O-methylribose adenine
  source 1..20: mol_type = other RNA
cctcactcacccactcgcca

SEQ ID NO: 1009 - RNA, 20 nt, synthetic construct
  modified_base 3: mod_base = OTHER; note = ribose thymine
  modified_base 7: mod_base = OTHER; note = ribose thymine
  modified_base 15: mod_base = OTHER; note = ribose thymine
  source 1..20: mol_type = other RNA
cctcactcacccactcgcca

SEQ ID NO: 1010 - RNA, 20 nt, synthetic construct
  misc_feature 1..20: note = Synthetic: WV-942
  misc_feature 1..20: note = Synthetic: ASO-0100157
  modified_base 1: mod_base = um
  modified_base 1..2: mod_base = OTHER; note = phosphorothioate
  modified_base 2: mod_base = cm
  modified_base 2..3: mod_base = OTHER; note = phosphorothioate
  modified_base 3: mod_base = OTHER; note = 2-O-methylribose adenine
  modified_base 3..4: mod_base = OTHER; note = phosphorothioate
  modified_base 4: mod_base = OTHER; note = 2-O-methylribose adenine
  modified_base 4..5: mod_base = OTHER; note = phosphorothioate
  modified_base 5: mod_base = gm
  modified_base 5..6: mod_base = OTHER; note = phosphorothioate
  modified_base 6: mod_base = gm
  modified_base 6..7: mod_base = OTHER; note = phosphorothioate
  modified_base 7: mod_base = OTHER; note = 2-O-methylribose adenine
  modified_base 7..8: mod_base = OTHER; note = phosphorothioate
  modified_base 8: mod_base = OTHER; note = 2-O-methylribose adenine
  modified_base 8..9: mod_base = OTHER; note = phosphorothioate
  modified_base 9: mod_base = gm
  modified_base 9..10: mod_base = OTHER; note = phosphorothioate
  modified_base 10: mod_base = OTHER; note = 2-O-methylribose adenine
  modified_base 10..11: mod_base = OTHER; note = phosphorothioate
  modified_base 11: mod_base = um
  modified_base 11..12: mod_base = OTHER; note = phosphorothioate
  modified_base 12: mod_base = gm
  modified_base 12..13: mod_base = OTHER; note = phosphorothioate
  modified_base 13: mod_base = gm
  modified_base 13..14: mod_base = OTHER; note = phosphorothioate
  modified_base 14: mod_base = cm
  modified_base 14..15: mod_base = OTHER; note = phosphorothioate
  modified_base 15: mod_base = OTHER; note = 2-O-methylribose adenine
  modified_base 15..16: mod_base = OTHER; note = phosphorothioate
  modified_base 16: mod_base = um
  modified_base 16..17: mod_base = OTHER; note = phosphorothioate
  modified_base 17: mod_base = um
  modified_base 17..18: mod_base = OTHER; note = phosphorothioate
  modified_base 18: mod_base = um
  modified_base 18..19: mod_base = OTHER; note = phosphorothioate
  modified_base 19: mod_base = cm
  modified_base 19..20: mod_base = OTHER; note = phosphorothioate
  modified_base 20: mod_base = um
  source 1..20: mol_type = other RNA
tcaaggaagatggcatttct

SEQ ID NO: 1011 - RNA, 20 nt, synthetic construct
  source 1..20: mol_type = other RNA
tcaaggaagatggcatttct

SEQ ID NO: 1012 - RNA, 24 nt, synthetic construct
  misc_feature 1..24: note = Synthetic: WV-2021
  misc_feature 1..24: note = Synthetic: ASO-0136356
  modified_base 1: mod_base = OTHER; note = deoxyribose thymine
  modified_base 1..2: mod_base = OTHER; note = phosphorothioate
  modified_base 2: mod_base = OTHER; note = deoxyribose cytosine
  modified_base 2..3: mod_base = OTHER; note = phosphorothioate
  modified_base 3: mod_base = OTHER; note = deoxyribose guanine
  modified_base 3..4: mod_base = OTHER; note = phosphorothioate
  modified_base 4: mod_base = OTHER; note = deoxyribose thymine
  modified_base 4..5: mod_base = OTHER; note = phosphorothioate
  modified_base 5: mod_base = OTHER; note = deoxyribose cytosine
  modified_base 5..6: mod_base = OTHER; note = phosphorothioate
  modified_base 6: mod_base = OTHER; note = deoxyribose guanine
  modified_base 6..7: mod_base = OTHER; note = phosphorothioate
  modified_base 7: mod_base = OTHER; note = deoxyribose thymine
  modified_base 7..8: mod_base = OTHER; note = phosphorothioate
  modified_base 8: mod_base = OTHER; note = deoxyribose thymine
  modified_base 8..9: mod_base = OTHER; note = phosphorothioate
  modified_base 9: mod_base = OTHER; note = deoxyribose thymine
  modified_base 9..10: mod_base = OTHER; note = phosphorothioate
  modified_base 10: mod_base = OTHER; note = deoxyribose thymine
  modified_base 10..11: mod_base = OTHER; note = phosphorothioate
  modified_base 11: mod_base = OTHER; note = deoxyribose guanine
  modified_base 11..12: mod_base = OTHER; note = phosphorothioate
  modified_base 12: mod_base = OTHER; note = deoxyribose thymine
  modified_base 12..13: mod_base = OTHER; note = phosphorothioate
  modified_base 13: mod_base = OTHER; note = deoxyribose cytosine
  modified_base 13..14: mod_base = OTHER; note = phosphorothioate
  modified_base 14: mod_base = OTHER; note = deoxyribose guanine
  modified_base 14..15: mod_base = OTHER; note = phosphorothioate
  modified_base 15: mod_base = OTHER; note = deoxyribose thymine
  modified_base 15..16: mod_base = OTHER; note = phosphorothioate
  modified_base 16: mod_base = OTHER; note = deoxyribose thymine
  modified_base 16..17: mod_base = OTHER; note = phosphorothioate
  modified_base 17: mod_base = OTHER; note = deoxyribose thymine
  modified_base 17..18: mod_base = OTHER; note = phosphorothioate
  modified_base 18: mod_base = OTHER; note = deoxyribose thymine
  modified_base 18..19: mod_base = OTHER; note = phosphorothioate
  modified_base 19: mod_base = OTHER; note = deoxyribose guanine
  modified_base 19..20: mod_base = OTHER; note = phosphorothioate
  modified_base 20: mod_base = OTHER; note = deoxyribose thymine
  modified_base 20..21: mod_base = OTHER; note = phosphorothioate
  modified_base 21: mod_base = OTHER; note = deoxyribose cytosine
  modified_base 21..22: mod_base = OTHER; note = phosphorothioate
  modified_base 22: mod_base = OTHER; note = deoxyribose guanine
  modified_base 22..23: mod_base = OTHER; note = phosphorothioate
  modified_base 23: mod_base = OTHER; note = deoxyribose thymine
  modified_base 23..24: mod_base = OTHER; note = phosphorothioate
  modified_base 24: mod_base = OTHER; note = deoxyribose thymine
  source 1..24: mol_type = other RNA
tcgtcgttttgtcgttttgtcgtt

SEQ ID NO: 1013 - RNA, 24 nt, synthetic construct
  modified_base 1: mod_base = OTHER; note = ribose thymine
  modified_base 4: mod_base = OTHER; note = ribose thymine
  modified_base 7: mod_base = OTHER; note = ribose thymine
  modified_base 8: mod_base = OTHER; note = ribose thymine
  modified_base 9: mod_base = OTHER; note = ribose thymine
  modified_base 10: mod_base = OTHER; note = ribose thymine
  modified_base 12: mod_base = OTHER; note = ribose thymine
  modified_base 15: mod_base = OTHER; note = ribose thymine
  modified_base 16: mod_base = OTHER; note = ribose thymine
  modified_base 17: mod_base = OTHER; note = ribose thymine
  modified_base 18: mod_base = OTHER; note = ribose thymine
  modified_base 20: mod_base = OTHER; note = ribose thymine
  modified_base 23: mod_base = OTHER; note = ribose thymine
  modified_base 24: mod_base = OTHER; note = ribose thymine
  source 1..24: mol_type = other RNA
tcgtcgttttgtcgttttgtcgtt

SEQ ID NO: 1014 - RNA, 21 nt, synthetic construct
  modified_base 6: mod_base = OTHER; note = ribose thymine
  modified_base 7: mod_base = OTHER; note = ribose thymine
  modified_base 8: mod_base = OTHER; note = ribose thymine
  modified_base 11: mod_base = OTHER; note = ribose thymine
  modified_base 12: mod_base = OTHER; note = ribose thymine
  modified_base 13: mod_base = OTHER; note = ribose thymine
  modified_base 17: mod_base = OTHER; note = ribose thymine
  modified_base 20: mod_base = OTHER; note = ribose thymine
  modified_base 21: mod_base = OTHER; note = ribose thymine
  source 1..21: mol_type = other RNA
caaactttgctttccctggtt

SEQ ID NO: 1015 - RNA, 20 nt, synthetic construct
  modified_base 1: mod_base = OTHER; note = ribose thymine
  modified_base 6: mod_base = OTHER; note = ribose thymine
  modified_base 8: mod_base = OTHER; note = ribose thymine
  modified_base 10: mod_base = OTHER; note = ribose thymine
  modified_base 18: mod_base = OTHER; note = ribose thymine
  modified_base 19: mod_base = OTHER; note = ribose thymine
  source 1..20: mol_type = other RNA
tggcctgtatccaacacttc

SEQ ID NO: 1016 - RNA, 20 nt, synthetic construct
  modified_base 1: mod_base = OTHER; note = ribose thymine
  modified_base 6: mod_base = OTHER; note = ribose thymine
  modified_base 8: mod_base = OTHER; note = ribose thymine
  modified_base 13: mod_base = OTHER; note = ribose thymine
  modified_base 17: mod_base = OTHER; note = ribose thymine
  source 1..20: mol_type = other RNA
tggaatatgccctgcgtaaa

SEQ ID NO: 1017 - RNA, 22 nt, synthetic construct
  modified_base 1: mod_base = OTHER; note = ribose thymine
  modified_base 4: mod_base = OTHER; note = ribose thymine
  modified_base 7: mod_base = OTHER; note = ribose thymine
  modified_base 8: mod_base = OTHER; note = ribose thymine
  modified_base 10: mod_base = OTHER; note = ribose thymine
  modified_base 12: mod_base = OTHER; note = ribose thymine
  modified_base 18: mod_base = OTHER; note = ribose thymine
  source 1..22: mol_type = other RNA
tggtgcttctctcaggataaac

SEQ ID NO: 1018 - RNA, 25 nt, synthetic construct
  modified_base 1: mod_base = OTHER; note = ribose thymine
  modified_base 5: mod_base = OTHER; note = ribose thymine
  modified_base 15: mod_base = OTHER; note = ribose thymine
  modified_base 16: mod_base = OTHER; note = ribose thymine
  modified_base 21: mod_base = OTHER; note = ribose thymine
  modified_base 23: mod_base = OTHER; note = ribose thymine
  source 1..25: mol_type = other RNA
tggatgacaccaaattccgctctca
